United States Patent Application Publication US 2011/0183924 A1 - sequence listing, part 216

SEQ ID NO: 542997 - DNA, 183 bp, Homo sapiens
gagcaaaatgagattgattacagcggcctcagggttcaggcaatgcaaataagcagtgaaaggaagaagacgataattgttacagaaacccagaccagcgatgactagtggtgtgtataggcctcctcgggccaggttaaccacaaccaaggaaacaccacaaggccaccagaatctacagtg

SEQ ID NO: 542998 - DNA, 171 bp, Homo sapiens
tccagggaccccagtttcagggcccaaacaggtgggagtggaccccaggttttccattggaggtccctaaaaaactccccaagtttggttttcccgaagtttcctgctcagccctttttaaaaatggatgctttttcaaaaagagttaaagctataccctgtaccctttta

SEQ ID NO: 542999 - DNA, 551 bp, Homo sapiens
  misc_feature (151)..(151): n is a, c, g, or t
  misc_feature (155)..(156): n is a, c, g, or t
  misc_feature (159)..(160): n is a, c, g, or t
  misc_feature (166)..(166): n is a, c, g, or t
  misc_feature (170)..(170): n is a, c, g, or t
  misc_feature (173)..(173): n is a, c, g, or t
ctcgataaggccaatgtgactgtatttggagatagggcttttcggcagtaatttaggttaaatgaggtcagaaagatagggtcctaatctgataggattggtgaccttataagaggaagaaagagagacggctctctctccatgtggtggnccannganngaccanctcnagnctggagaaaagccctcaccagaagcggaatgctaccagaccttgattttggactttctaacctccagagctatgagaaaataaatttctgttgttggagccacccaatctatggtatttgtagaggcagcctgagctgactaatacagttgggtacccagccctggaaccaagaggtggagtcagccctgttcaaactgtgggaactgtgggaaggggtgtctctcccccaaggaaagtcatgttgctgcggctggaaaaagatggatgagatgttttgacatgcagagatgacagctggccacctcttttggataactctcttaacctatctttgcttctatctcccgatctataaaatggagtgctaccaaaaaaa

SEQ ID NO: 543000 - DNA, 986 bp, Homo sapiens
tggctggtactggccccgagttcgttaggatgcggggggcttgtgtgtcctccttccccctcccactgacaactgccccaactgctcttccctgccccggtcacagtgaaaatgtagatggggtctgtatgtccgtacgactgtgctgccagggctcggaggatgtgggcgccctccgctgtgatgcgcccccctgtggaatatttgaacataatcacctctcattccagactatgttagtgtcttaatggtggtgaggacgcccgagtgctcggcccgtatcagccctgaggaggaattgcacacttgggtcatgactgccatcagagtggctgccagagcaagggacctgtgacgcgatgttggagatgtagggactcgctgtatggccttggagcggccttggtgctgcttcgggattccgatggagtgggaggggcgcagatctcttgaaaggctgcttgatcaagaaatctgcacatggttgtaggggagcaagtgcatatccttgggcctgtgaccgtgagcgaggaaagagtttcggtgacaggataagactctgatatcgaacaaatcggctggtataccatgacttcttcagagaccctctcaactggtcgaaacatgaggaggccttacctgggagggccggcatgggagcctatgaggagaccatgtgcatagaagacaggatcctgatacactggaaaccaattgatcatcagagtacaactcaaggttgcagtgctactatcgaccattccatgcaacaacagtacatgccaagggttacatgaaatgcataggagcagcacgattaaagagaagctccattgatacagtgggtaaccaaacatacattacaatgggggcaaagtgagcatgtgcatggggctatggctacattgaagacgcttaaatgcaccaggaaccatgaggaacactaagcagcaatgatcagagctgaagagacccaggccagaaca

SEQ ID NO: 543001 - DNA, 464 bp, Homo sapiens
  misc_feature (105)..(105): n is a, c, g, or t
gtatcaacgcagagtggccattacggccgggggtttccgtagtgtagtggttatcacgttcgcctaacacgcgaaaggtccccggttcgaaaccgggcggaaccnaccactaaaaaaaaaaaacaaaaaaaacaaaaaaaaaaactggtgggcgcgccgccccgggcccctggaaaaaggttttcaaaaaccaatcgggtgggggggggggggcccaagagggtaagggaaactggggccaaaggcgggtgcccaaggagaaacccggggccaaggacaaggggcgggggatcctccccacataaaaaaaggcccgggggggcaaccggaggggtcctgaaacaaaatctccggagagggggtttggggagggccaataagggggactcttatcaaaggggggtcccagaggggagccccgatttccaaattaggcccggcgcgggggaaacaaccacgacgaa

SEQ ID NO: 543002 - DNA, 314 bp, Homo sapiens
acagacatccagggcccaatatgacgagctggctcggaagaacacgagaaggagctacgacaagtactggtctacagcagattgcatggagagcaccacagtggtcaccacaacagtctgctgaggttggagcagactgaaacgacgctacacagagctgagacgtacagtccagtccttggagatcgaactggactccatgagaaatctgcaggccagcttggagaacagcctgagggaggtggaggcccgatacgccctacagatggagcagctcaacagggatcctgctgcaccttgagtcagagctggca

SEQ ID NO: 543003 - DNA, 481 bp, Homo sapiens
tcagacacaaactgaacctacacattgacttacctggctctccagattgccaatttcaaatctctctctcaggacaggcctggtggctcacacctgtaatcccagcaccttcagaggccaaggcaggtggatcacttgaggtcaggagttcaagaccagcctgactaacatggtgaaaccccgtctctattaaaaatgcaaaaattagctgggcatggtgatgtacccctgtaatcccagctacttaggtggctgcagcacgagaatggcttgaacccaggaggcagaggtggcagtgagccaagatcgcgacactgcactccagcctgtgtgacagagcgagactctatctcaaaaaaaaaaaaaaaaaactgtctctctgtctatacacacacacacacacacacacacacacacacacacacacacacacacacacacacacaggctcttgccccaggatagaagctgcccaaaaact

SEQ ID NO: 543004 - DNA, 377 bp, Homo sapiens
acacactcataaacatatacttctcatgccccctgcgaatatcaaagatgtgcaaacattgtgttgaacaagcagtatctaggtgcactgagtgtatagcaacttaggacaaatcaacatctaggcctttctcctggagacccttggcttggcatgacagtatagaatctgctgacctgctaggttttccaattagcttccacaaaatagtagaccttgagtaggagagaggaagagaactatgggagagatcagaatagctttgctccctttgtaaggaatcagtcttggtgagatacctgatagcccagtcctagccactgggggtatgtcaggttcagcaacaggagcgtatgtcttggagatcccccatagat

SEQ ID NO: 543005 - DNA, 907 bp, Homo sapiens
  misc_feature (52)..(52): n is a, c, g, or t
  misc_feature (88)..(89): n is a, c, g, or t
  misc_feature (91)..(91): n is a, c, g, or t
  misc_feature (107)..(107): n is a, c, g, or t
  misc_feature (114)..(115): n is a, c, g, or t
  misc_feature (119)..(119): n is a, c, g, or t
  misc_feature (132)..(132): n is a, c, g, or t
  misc_feature (165)..(165): n is a, c, g, or t
  misc_feature (172)..(172): n is a, c, g, or t
  misc_feature (202)..(202): n is a, c, g, or t
  misc_feature (208)..(208): n is a, c, g, or t
  misc_feature (225)..(225): n is a, c, g, or t
  misc_feature (235)..(235): n is a, c, g, or t
  misc_feature (242)..(242): n is a, c, g, or t
  misc_feature (253)..(253): n is a, c, g, or t
  misc_feature (262)..(265): n is a, c, g, or t
  misc_feature (286)..(286): n is a, c, g, or t
  misc_feature (291)..(291): n is a, c, g, or t
  misc_feature (294)..(294): n is a, c, g, or t
  misc_feature (302)..(303): n is a, c, g, or t
  misc_feature (310)..(310): n is a, c, g, or t
  misc_feature (313)..(313): n is a, c, g, or t
  misc_feature (328)..(328): n is a, c, g, or t
  misc_feature (338)..(338): n is a, c, g, or t
  misc_feature (342)..(342): n is a, c, g, or t
  misc_feature (346)..(346): n is a, c, g, or t
  misc_feature (351)..(351): n is a, c, g, or t
  misc_feature (354)..(354): n is a, c, g, or t
  misc_feature (360)..(360): n is a, c, g, or t
  misc_feature (366)..(367): n is a, c, g, or t
  misc_feature (372)..(372): n is a, c, g, or t
  misc_feature (383)..(384): n is a, c, g, or t
  misc_feature (411)..(411): n is a, c, g, or t
  misc_feature (413)..(413): n is a, c, g, or t
  misc_feature (418)..(418): n is a, c, g, or t
  misc_feature (431)..(431): n is a, c, g, or t
  misc_feature (436)..(436): n is a, c, g, or t
  misc_feature (459)..(459): n is a, c, g, or t
  misc_feature (465)..(465): n is a, c, g, or t
  misc_feature (470)..(470): n is a, c, g, or t
  misc_feature (488)..(488): n is a, c, g, or t
  misc_feature (507)..(508): n is a, c, g, or t
  misc_feature (550)..(550): n is a, c, g, or t
  misc_feature (583)..(583): n is a, c, g, or t
  misc_feature (603)..(603): n is a, c, g, or t
  misc_feature (642)..(642): n is a, c, g, or t
attagttagtttgtactaataaattctcatattacataggcaatttaatggnagaatcttccttttgatatttgaatcatctgaaatnncncaaacagaacaatacnttcaaannaatntcatttgcttaanaaaaagacaagttaaacaacaaaaaaatttttnctttctnacaggtggacattgaagtggacctaattangttttncttttaaaagccccgcnaacaaaagtngtttaanacctatttaanatgaataannnnttggtttactaaactactggnctccngcnccattttnngttttcngtngtttgggtgcgggtncttctttgtntgtntctnctctngcncttttnaggggnncagtngggccattttnntcatgttcatcatgttcatcatcgctngngaatntggttttcttgcnctganactgtacttttcctttaccaganccaggntgggnagctttattaccctttcnttttcctttaaatctacgnncttttgacttccatttgtttagggattcttgttggtcttctnttattttcttcagtgcttctttttccacctctncttctagtacttcccaagtnacttctttgttccttaattgtaggttaccattatttgcntctttggctttacccaatgcttccttggctttttctttaaatagaattatcccctcttttgctcctctgacgaagctaatccattttatttcaccatgatttgagaaaagtatgtgtaaatcttctctacaggtctgatcatctaaatcacccgaaaatttcagcaagcatccaatcttttcttctagagatttcatttcagcatcttcttctaacttttgttttgcttcttgctcctgtttagctcttaatttagcttccactt

SEQ ID NO: 543006 - DNA, 270 bp, Homo sapiens
tggagcccaggagacactggagcaggccgagaagagggccactgactgctgaggcagatgtggcctcgctgagccgccgcattcagctggttgaggaggagcaggaccgggcccaggagcgcctggctacagccctgcagaagctggcggaggccgacacggcggctgctgagagcgagagaggactgacggtcatcgaaaacccgggccatgacggatgaggagaacgatggaactgcaggagaatgcagctggaggtggcgccgcgcg

SEQ ID NO: 543007 - DNA, 505 bp, Homo sapiens
aaatgatatatttgtattgtgggaaaaagacaacttttgataaatagaagaacatttacatcagattacctcccagtttttgcttagacttagaattaagaactatttataaaggaactatttgattttaaagtaatattgtaatgatacagaatagtacggcagctcactttccgaacttgagggagataaacataatttccattaagaaaatcttgaggccaagtattgtggctcactcccgtaatctcagcactttgggaagccgaggtgggaggatcgcttgaggccaggagtgcgacaccagtctgggcagcctagcaagactccgtctctacaaaaaattaaaaaatgagccaggcacggtggcatgcgtctgtggtcccagctgctttggagactgaggctagaggatcgcttgagcccagaaggtcgaggttgtggtgagcaatggttgtgccactgcactccaaccttggtaacagagtgagccactttgtctcca

SEQ ID NO: 543008 - DNA, 170 bp, Homo sapiens
gactcatcattggagtgacggggctgggagggctgcagaaggttgcgtacatgggaggcaaaggcgtggagatcacttgaatccgggaggctggagtgttgcagtgatccgagatcccctcactgcactccagcctgggcaagagaccgagactccctctcaaacaaaaa

SEQ ID NO: 543009 - DNA, 139 bp, Homo sapiens
atggccggtcctattatcccaacaccactcctcttagcaatatgtgctatgccatactagtcttgccgccgcgaagcagggtgggcctagccctactagtctcaatctccaacacatatggcctagactacgtacatca

SEQ ID NO: 543010 - DNA, 170 bp, Homo sapiens
atacccaccctgttcttctcctaggaagtgctcggactccctggtcaacaatgtcacgtttagctgctcaatgccctccgctaccatactgtgcagcatgctagtcctgactgtatgagctgaaacacggcatgatcctcttcccaagcccagggatccttcagcttcaa

SEQ ID NO: 543011 - DNA, 261 bp, Homo sapiens
  misc_feature (38)..(38): n is a, c, g, or t
  misc_feature (107)..(107): n is a, c, g, or t
  misc_feature (164)..(164): n is a, c, g, or t
cccttccaacccccacttggtattacagactcatcacnaaaaccctctggaatctttggaaagaaaacactggggctgagtacacaatgcccccctccacccaaccnacactaccatcatgcatacaacataggaatgttccagaggcatcctagcttcaaacnacaaagcaacttgtctgctagcatcatgcggttccaccagaaagacaggaaacccagagcatatctagatgcatgcattttctgagtgatggggccc

SEQ ID NO: 543012 - DNA, 238 bp, Homo sapiens
  misc_feature (17)..(17): n is a, c, g, or t
ttattaagcaatatgcnctaagacaaaggatatggaaaaataaaaacttttattcagaacacaatgaatagatatgtttatacaatacatagtatgagttaaaagtcttgggtaagatatttgaaaaaaaataatcaagattcggaatatcttgatcttgattaattttaatagcaagagaagcttaaataataaggttcttgtagaaagagtttgaagaagatacttggaaaaaaaa

SEQ ID NO: 543013 - DNA, 339 bp, Homo sapiens
cgtcctcagctgcaatggcatcatgtatgatctgtgtttgtgtgtataattttcaatacatgttgggtttctatgatagatttgtgtatatcttatggcagtaatgatacaatggactaatatccacattttatgcattatgacgtactaaacttcttaattttttcaatatttctagactacacagtctgcaagttttttttttttttgagagggatttttgctctgttgcccaggctggagtgcaggtggtgtgatctcggctcacgtgcaagctccgcctcccagtttcacgccatttctcctgcctcagccttcccaagtttgctaggaccatcg

SEQ ID NO: 543014 - DNA, 296 bp, Homo sapiens
agaggataggctcaggggattacacctgtaaccccaacactgcgggagactaaggtgggaggatcacttgagtttggagttcaggaccagtctgggtaacatcttgagaccctgtctctataaaaataaaaataagaaatcagccaggcctgttggtgtgtgctgtaatctttagactactcaggaggctgaggtgggaggattccttgagcccaggagtttgaggttgcagtgagctatgattgcaccactgcactccagcctgggtgacagagcaagaccctgtccctgtctca

SEQ ID NO: 543015 - DNA, 140 bp, Homo sapiens
cgtaaaagaaggctttttttgttttaatttttgggctaacttccccggtgtacattatttaaattgacaaaaattgctccttttgggttgacacacccttacaaagttttttgcttgttacagaacattatacgccgcac

SEQ ID NO: 543016 - DNA, 408 bp, Homo sapiens
tctccagtaggaaagggtcagatcaaagatcctctgcctccgcttaaaagtgatatagttatgctttgcacgtatttacctggtgtacagtaaggatagatccgtgaatagcatgagtagtatgagaaaggggccgtccaagagatgaacaacctgtagtccaagcgaccagtggagcctcatgcagcccattatcatcagtgctcagggcctaatagtcattctgacatctgttcatgtaaatcacaatcaaagtgaaaggtggtggtatggacggctaatttgatcctcctgtgtattcaataaccagcctacaggaatgagctagtgctattgaacggtttaaaatattccggggttaagagtgcccattgaggatctttttccacactgaaatcattatgaatt

SEQ ID NO: 543017 - DNA, 253 bp, Homo sapiens
tacgccgccgcaattgcggcgttcgcgcgccccgggaggacgcatgtccgggtatctacctgttctgatcttgttcgtcgtcgcgctcacgatcgcgttagccgtgatcgtgctcgtcgcgttccttgggccgaaacgtcccaacaagtggaagaacgcggtgatcgagtgcggcgttcctccctcgggcgacgcgaggaaacgcttctcggtgcgtttctacctcgtggcgctttcgtttctcttgttcggc

SEQ ID NO: 543018 - DNA, 151 bp, Homo sapiens
accttagaggaccccttcgactagcctgacaggcacggtgtgggatagtgacttctctaccggtcagagctaatggtcgtccgaccaccagaacaaccctcattcccttcatcgtcgcccggatccagagtctgtcggactagccgggggc

SEQ ID NO: 543019 - DNA, 150 bp, Homo sapiens
tcgatctaccgatgcttaagcatcctaacagagaacatggcactaaaatttttgtctgcttacaaaaacttacctacataaccagtttagccacttttccagtaagatttcaaagtaatattcatttcctttttcctgtagcccagaaac

SEQ ID NO: 543020 - DNA, 123 bp, Homo sapiens
acagattagagtgacacgatcagactgttacatttagcaatcacagcatggggtgcaaaaaaaaaaaatctacattaaaacccttggtgggaattgcttaacacttttccacagatacagaaa

SEQ ID NO: 543021 - DNA, 210 bp, Homo sapiens
gggccccaaaggggggaacaaaaagggggggggtttcccccccccccccccttgggaaaaaagggggttttttttttttcccccccccctttttcccccccccccgggggggggcccttttggggggggggggggggccccaattgggccccccctaaaaagttaaaacccccccccaaattttttttttatttaatttttggtttccca

SEQ ID NO: 543022 - DNA, 570 bp, Homo sapiens
  misc_feature (55)..(55): n is a, c, g, or t
  misc_feature (71)..(71): n is a, c, g, or t
  misc_feature (86)..(86): n is a, c, g, or t
  misc_feature (97)..(97): n is a, c, g, or t
  misc_feature (110)..(110): n is a, c, g, or t
  misc_feature (121)..(121): n is a, c, g, or t
  misc_feature (140)..(140): n is a, c, g, or t
  misc_feature (143)..(143): n is a, c, g, or t
  misc_feature (149)..(149): n is a, c, g, or t
  misc_feature (166)..(166): n is a, c, g, or t
  misc_feature (240)..(240): n is a, c, g, or t
  misc_feature (243)..(243): n is a, c, g, or t
  misc_feature (254)..(254): n is a, c, g, or t
  misc_feature (289)..(289): n is a, c, g, or t
  misc_feature (298)..(298): n is a, c, g, or t
  misc_feature (305)..(305): n is a, c, g, or t
  misc_feature (310)..(310): n is a, c, g, or t
  misc_feature (340)..(342): n is a, c, g, or t
  misc_feature (371)..(371): n is a, c, g, or t
  misc_feature (430)..(430): n is a, c, g, or t
  misc_feature (442)..(442): n is a, c, g, or t
  misc_feature (495)..(495): n is a, c, g, or t
cagttttggatataactatttggaaggagagtagacatgaagagggcaaaccctngcttttcattatctanaatcaatagtttgtntttcttttttnaaaaagaaagaanaaccctttcantcttcaatactctttaaangcnctcttnttagctactggccaatncacaccaattatttaaattcacttggtacacacctttgtccactgggtaccttatattccttatgccccctgcngcngcgcgcctaanccaccacccctgcctggctgcgcagggcctaatcnggggctgcnggggggngggcntgccaaccaggatcagggtgtttctccgcnnnggctgtctgccaggctggtccctacgagnaggcatatgaaagccggcaagtttagctactgtgttgcaagagaagccaggaccttgtnaaataggtctcnccattaccatttattctctcaagggaagcttaaaaaaaaaacaacaacaaaanggcacattggtctggccacctcatgaatccaacaagcattagtgtggcatttcagtggagaaggaaacttggggg

SEQ ID NO: 543023 - DNA, 1060 bp, Homo sapiens
  misc_feature (413)..(413): n is a, c, g, or t
gggaaggttgaagggtttgttcccagtcacacaaccaggaatccttaggacagtcagaccaggaaaccatttccaaactgccaagccatggcgagagatagtcaagatcctcaggaaccagtcgagcatcaccatggaagcattgggaaaagcctccttagcatttgtgaagcgtccttcaattggtatcttgagttgtgcagtggagcccagtgactgcggggcttttgtagacaccctctagggattacagtgactaggtaccccatgacaaacgtcgaatggcgtgctgggaccacacaatgaggtccgaggcattctctaggggtgccatcgttagggcgccaacgcatgcgtgcgtgggctagttcgggagaatgtccccccctatttacatggcgcccatcgacatntctccttttcctttcccatgtgctgtaatgcgtgagcgagagtctcacggtaccagtctcactaagagagagggtgccacaatggggcgactgagacagcgacggacgttgggacaggtgtcatagcgaagagggacataatccgttcacttgcactgggggtgctaggaactcactggcgtcacctgcacgggggcccgttgatgttgaacagggtgtccccgttgtcaggacgagtaatgcggtttcaccccatccttgaaatttttcccaggggtggaatacacggccccatgttcataggggggaactgttgccaagttcccctaattgcaagcgaacgcccttctagcaacccatatgaatgggcccaaagtttggggacgaaagcccattggctcgcagggcagaaagaaacacggggtttcatgatcgactaggcccgctccaaaaagagaaacggtcacccgtcgtcggaacaggcttgggttcgcccgtaataccctagggccgcaccttaggatagccgggagatgaaacattggggggcccctatttggcgctcccgcaacaggcgggcaaattttctcacaccacccccacagggatgttgcccctcgcagcaatagagggcaacaagtggggag

SEQ ID NO: 543024 - DNA, 242 bp, Homo sapiens
aacctggggcccctgtttgtatgacacctcgattacgtgaactgactatcaactcctaaaggacctagtaggacaggcatccaaatgctgatgggggtgagggtggcaccagaggtccccatatcctggcaagacccactggcttcgagtggctggtgggacgagaaacacatgctgccctacttttcagctaatcatggcgctgacccaatgagaactcaccactattcttcattatcccc

SEQ ID NO: 543025 - DNA, 196 bp, Homo sapiens
agcgttggacacataaataggttatataactggtgattaggtgggtgtagagaagcaagttaaaaggctaaatggaagggcaagtttccatcatctaatgaaagatactataagacaaggactccccttattaatacctcaaaggcattgtaaaaagaattgatttatagacggagtctcgactcatgtcgccagg

SEQ ID NO: 543026 - DNA, 105 bp, Homo sapiens
agcattcgatcacctatagaaggtcaggtatgccagaatggtccaggtattccagaaggtccaggtatgccagaaggtccaggtatgccagaaggtccaggtatg

SEQ ID NO: 543027 - DNA, 106 bp, Homo sapiens
atgatgagctcggtaccacatgattgatcaccgctctatagccaagtgctcagatataattatatacatagttaccatttatttggcacttacttcaggagcggtg

SEQ ID NO: 543028 - DNA, 507 bp, Homo sapiens
  misc_feature (224)..(224): n is a, c, g, or t
ttagagatcccctcgaatcgacggtttctttcctggcaccctgtctcaggtgcacacaggctgcattcccccgacttcccatctcctgggagctccagcttggaacttctcttctcctagcgctaatgattcccagctcttgaatttcagcttcccggttcgtggagcttttggagctcggagcaatgctctgcctcccggggttcacgccaattctccagccntcaggcaccagaggagctgggactacaggcgcccgccaccaggcctggctaagttttttgtatttttagtagagacagggtttcaccatgttagccaggatggtctcaatctcctgacctcgtgatccacctgcccttgcctcccaaagttgctgggattatgaatgtgagccaccatgccttggcccttgtaattttaaagttctgggtgacaacttcaatatttggataccttctgaggttggttttaattgatcgtgtataagggtgggttggtcctatt

SEQ ID NO: 543029 - DNA, 1075 bp, Homo sapiens
ggggttatgcacatgcaatgccttagaaacttcttccatcctatttccatgtcgtaatgctcactgggtaagaaggcaaaaccgacttgagtttttaaacacatgaaaaatttttcatcgctggaattggcggcctacctcatagggagctccccacagtgttccatcagcgttcaaaatttttgcctggggaactgggccttgccggaattcaaatggatgcccacctattgatatgatcctcaagaataggaccatgttgtgtcacgcgtgatattaggacattctgccccttgtgtgaccctggttaacaacgtcaaggggacgcccaaggcctttcccttaccctttctttctccttgtgaactttccagaatcccacccgtccgtgcttcctctagttcacactgtgcatgatgcgcctatgaataggcaagaaagtaggtggtttcctcgctgtactcctagcctgtcctgccgtaaaggattatggtatggagaacatgtcaacacacaactctacatgagtctgcaactgcacccaacatctggagggcacacacgtaccccgcacccgaggcaactgccatgacagaaagctcgctccgctactccaatatgggactcaggcaccccagcatgagtcctagacaagtctgcatcgcgaccgtggtattgatatgtcagttgctgcatcatccagggatacctctcaagctggactgtgggttccaaacttactcatagaggagaaaaccagagaaagatgaagaggaggagcttaggtctattctcaaatgcccaggggctacgtctagatgaggaataaggctgataataagaaactatttcaccagccatttgagagactagacatgaccccacccttctcttcagcgagcagaatcatctgtggtcagtctcaatgtcccagcattcagttcactgaatactcactgttcctccagtttcccatcctttgtcatgctgtcaccccacttagtaaagataagggtctcaacccctccccaccacgtctatgatggaatacgcacaggtggtgggactaaggggg

SEQ ID NO: 543030 - DNA, 365 bp, Homo sapiens
  misc_feature (6)..(6): n is a, c, g, or t
  misc_feature (12)..(12): n is a, c, g, or t
  misc_feature (20)..(20): n is a, c, g, or t
  misc_feature (26)..(26): n is a, c, g, or t
  misc_feature (34)..(34): n is a, c, g, or t
  misc_feature (49)..(49): n is a, c, g, or t
  misc_feature (105)..(105): n is a, c, g, or t
gaaatnccggancctggttnaaaccngaactccncggttttggcccttntcctaagaaatggtcaataataaatgggaaaatgtaacaagtatgtagctttttcnagactggcttttttcaccttaaacactatgcatttaagattcatctgtgacttgtccctggtttaaatggctcattttcttttttggtgggcgggtggagagacagggtctcactctctcacccaggctggagtgcagtggggcaatctaggctcactgtagctagcctccacttccctggctcaagcaagcctctcacctcagcctcccgagtagctgggagactacaggtgctcgccaccatgcccggccagtgtttt

SEQ ID NO: 543031 - DNA, 220 bp, Homo sapiens
ggtgattgacctcagagcagggcagttcacagctctaattatttgggtctaatggcctcggggcccaagggtaggtgaggtgataggcacagattttcacctaaaattagcagaggtgaggcctaggaattttggggttatttcttcaatcaagccttcaaaccccctagaccttttgccaggggaccaagcctgagaataaacgaacctttgcgtacca

SEQ ID NO: 543032 - DNA, 692 bp, Homo sapiens
tgtagagcaaggaagcacttcttcccaagagggtcggagaaggaaaagcctctgggagcacattctgctgtcatcacagtccttggcttctactgggccctcctctcctacctacacagctactcacctgtccaaagaggcatctggattctctcatgtggatggatggactctggggtacctcttgggacgtggcaatcccatgcatgctgtattctaaaccctctctgatcaaaccagagcctgcatcccagatgagcatctgaactgtcctcagggagcagagagccacacagcctatacttacccaactcatatctagaccagctacaaagaattccatgagttatacatacgagtcactgtgagtggagcccatgctagggctactgtgccctactgtgtactagtgcatgcgacgtggtgtagtgtaggagcgtgctgtagcatattgcttgggccagcttgaagtggaagtgccacgtcatgtccctagccactctagttatagcaaagatgccaaaaacccagttctagatgtgtggctccaacagccaaggctgtggtcccttatgacgttcctcacctagttagccaacctatcccgtagatgaactgaaaccccaatgaagacagaactgtgctgtgggagcatgcaatgatgtgagggcttgaactcatctttaatatac

SEQ ID NO: 543033 - DNA, 414 bp, Homo sapiens
  misc_feature (252)..(252): n is a, c, g, or t
  misc_feature (263)..(263): n is a, c, g, or t
  misc_feature (290)..(290): n is a, c, g, or t
  misc_feature (297)..(297): n is a, c, g, or t
  misc_feature (325)..(325): n is a, c, g, or t
  misc_feature (330)..(330): n is a, c, g, or t
  misc_feature (361)..(361): n is a, c, g, or t
  misc_feature (397)..(397): n is a, c, g, or t
tctagcacagccaatgctaagaaccacttcaccaatccaaattcacaaatatcagccaggtacaatattttgatactaaaacctgcctatgcctactatatagagcatatataggcagcagctccaggccctggggtacaagccagtgtcatgctggctgggagacccgcagaaactgtccagagtcttgccagccctcagatttttaggggaccaaaggaccatggcaactcctgggggaacacagtgttntgtgggtcttngggggtgattttaattcttgcacttgnttaaggntcccagttgacccaggccccgagttgantcttncccccctctgttttggaaaattcttgttatnctttccccaggcttgaggggaaggtttttgggtttngaaagagttttttaggg

SEQ ID NO: 543034 - DNA, 909 bp, Homo sapiens
ggctgaggcgggaggatgcttcagtccaggaagttcaggctgcagggagctatgatcatgccactgcactccaacttgggtgacagagcaaggccctgtctccaaaaaaaaaaaaaaaaaaccccttttaatgggattgaattttaagctaatttggactctatttttttattcccaaattcctctttggtaattaacctttgggcaaattttgtgtggatttataccgggggtataagggccctgggggtgatgtggaagtttaggggcaaaatggcatacgggttccggaccttctaagaagcttacaatctggtctggtatgtgtgaggggaaataatggctagatgccatttatggagtccatactcgggtgccgggcaccatggggttatactcatttaacttctatatccttacggtcatccggcaaggaagggtgcattaattttttcccatttttacaggattgaagagacaggaaggtccagagagggttaagaaaccaaagccaagggtttcggggcattattaggcaaagaagtattagtggactaactttttccgtggaggtggtttttaagaaccagaagaaataatgagataaagaaaagaaaaattgtggggggcgcagttgggggccttagggagaagttttgtataaaacacatgggtgggggggcggcgcggggccccagtaggtgacaagcaaacacatgtggggcaaaaagcgggtgcacaaaaggaaagaccccggggcaaaagacaagaggggcggggagggtctctccccaaaaaaaaaaacccccgggggggaccccgagggctgtggagaacaaccaagagaggagggcacggggagacaaagggagacaacacaggggggtccaagggagccgaataaagacg

SEQ ID NO: 543035 - DNA, 181 bp, Homo sapiens
  misc_feature (14)..(14): n is a, c, g, or t
tctctactccaggntctcagctcagacggttgaaaaaataaacagacttttggagctggggcctgggctggcgcaggctgtgaagagcctgtctgccaccccactgttccaccacacttcagaccacctcaccccggccctctgtttgtcttaggccctactcgaatccccagttgctttc

SEQ ID NO: 543036 - DNA, 733 bp, Homo sapiens
  misc_feature (3)..(4): n is a, c, g, or t
  misc_feature (8)..(8): n is a, c, g, or t
  misc_feature (15)..(15): n is a, c, g, or t
  misc_feature (21)..(21): n is a, c, g, or t
  misc_feature (82)..(82): n is a, c, g, or t
  misc_feature (84)..(84): n is a, c, g, or t
  misc_feature (86)..(86): n is a, c, g, or t
  misc_feature (124)..(124): n is a, c, g, or t
  misc_feature (180)..(180): n is a, c, g, or t
  misc_feature (252)..(252): n is a, c, g, or t
ganngcancacaganaacatnagagagccgtgctctctctataatgtgtattgtatatgagacacatctatatatctacatntntntatctctggtggtgctctctcgtggtgagtgaatacanacaaacacacacaacaaaacaaactctctttgtctgctgagaatacgagactgttnttctaacacaaacacaccaccacctccacgcggtgtggtgcgcacacagtgtgtgtgagaacacacagcaanactcttcggcgaacgcctttagagcgcgagtgttttattggcgcgagaaataatattctataaacaaagaaagagggccacggaggtgttaatatcttcgtggtataaattatttaggttgtgaaaaaaaaattttaaaattgtgctcaataacccttaataagaagggggttttaaaacgcccttcctctcgggaaaaaaaggggtctatttattttatgccgcccctttaaacaacaataaaaggcgtttgggtggtataaaggaacaaaaaatcctcgttttttacttggggggaggggcaacaaggaacattaaaaacaccttgttattttatttttgcgggggcccgaaaaccctttttttttaaaaaaaaaagagaaggggcccctcttttttttttttaaaaaaacattttgggggcgaagaaaaaaaaccccggggtctctttgaataaaaaaaccaacaacaccccccggcg

SEQ ID NO: 543037 - DNA, 107 bp, Homo sapiens
aacttttatgggttatgggggtgcagaggcattaggctgtggggtggggaggtcctgtgttccatatagaggaaccccaaataataaaggtgctttttttgtctgtg

SEQ ID NO: 543038 - DNA, 1450 bp, Homo sapiens
  misc_feature (466)..(466): n is a, c, g, or t
  misc_feature (1261)..(1261): n is a, c, g, or t
gcaccactgcactccagcctgggcaatagagccagccctgtctcaaaaaaaaaaaaaaaaaaggccacaatttaaatttggaagggctctcaaaatttttctactttcacaccagggaattgttccaaattgttctccaaagcgccgggtcatttttcttataccgtgctttggaccaacttaaattaacccttctaagatgtcttcatatttgttgtttttaaattggacaatctcaggttaagaaacattttgcataaactttggggacttgtgaaacaaaacatctccttgtgggtgtgtctctccaaggaaattctacttcacaattagggagggcaatgtgagggagggataatatagtggtggatataaaccacgcttttaaaaatttctcgagtagaactgtgcaccgagtgtgtactataagtctctataaacagagtgtatattgtgagaagcactntgattcggtcataaaaatttgttctctgtctctcgccaaggtttctccccccaaaggacgggtgtttctatatttctccacagaaatctgaggccgctctcaagtttgtctcggctccggtggaagaaaaaaatccgctgtggaaacacacatttcttgtgacaaaaacacgagttgtcgcttatatgtataatgtgcgccatattactctatgagtggacagttgaaaacagagtgtgtggggggatacttctcttaaagaggtgcgttaattgcgggggtcattccgaccaaaattgtgatgatctctcctcccgaattattgatgttctcggccgtttgtgtagaagaaaaacttttttttccacgatctttttttaaaacacaccacaaccaagttacaacacgggcggggccgacaatacaatctgcggcgcgaacacaccggggggaaaaacaccccactctctctatcacgcttgggcgcgtcccccaaggggcggatataatatacccgcgggcggcaagcacaaccatcagagccatagagggggggcgcccactcgtggggaggggcgaccaaccctgggtggcgacccactttgtggcgaccgagaacaagcgcccacccacggaggaatgtcttgggggcaaccaattgttggacacagcactgttggtctttcacaaggtgtggctaaacacaggggccccccggtgaaagaaagctcgccaatagctggccaaaaaaaagggagcgacatccttcttaccacagcggacgggcggcggtcnacacacagctccgcaggacaacaacacaactcggtctttttctggacacaacaagaactcttttgtggagcgacacctccccaactattagtggcgagcaacagcattcagagcaacaacacactaagggcacgggagggcaaacctagcctggcgaaccaccacgtgcggcactattacagagcacac

SEQ ID NO: 543039 - DNA, 928 bp, Homo sapiens
  misc_feature (32)..(32): n is a, c, g, or t
  misc_feature (104)..(105): n is a, c, g, or t
  misc_feature (107)..(107): n is a, c, g, or t
  misc_feature (109)..(111): n is a, c, g, or t
  misc_feature (114)..(114): n is a, c, g, or t
  misc_feature (252)..(254): n is a, c, g, or t
  misc_feature (261)..(263): n is a, c, g, or t
  misc_feature (265)..(266): n is a, c, g, or t
  misc_feature (275)..(275): n is a, c, g, or t
  misc_feature (279)..(279): n is a, c, g, or t
  misc_feature (285)..(285): n is a, c, g, or t
  misc_feature (288)..(288): n is a, c, g, or t
  misc_feature (290)..(290): n is a, c, g, or t
  misc_feature (292)..(292): n is a, c, g, or t
  misc_feature (297)..(299): n is a, c, g, or t
  misc_feature (302)..(303): n is a, c, g, or t
  misc_feature (306)..(306): n is a, c, g, or t
  misc_feature (308)..(308): n is a, c, g, or t
  misc_feature (314)..(314): n is a, c, g, or t
  misc_feature (318)..(318): n is a, c, g, or t
  misc_feature (320)..(320): n is a, c, g, or t
  misc_feature (327)..(330): n is a, c, g, or t
  misc_feature (341)..(342): n is a, c, g, or t
  misc_feature (344)..(344): n is a, c, g, or t
  misc_feature (347)..(347): n is a, c, g, or t
  misc_feature (354)..(354): n is a, c, g, or t
  misc_feature (366)..(366): n is a, c, g, or t
  misc_feature (382)..(382): n is a, c, g, or t
  misc_feature (385)..(385): n is a, c, g, or t
  misc_feature (389)..(389): n is a, c, g, or t
  misc_feature (392)..(392): n is a, c, g, or t
  misc_feature (396)..(396): n is a, c, g, or t
  misc_feature (399)..(399): n is a, c, g, or t
  misc_feature (410)..(410): n is a, c, g, or t
  misc_feature (416)..(416): n is a, c, g, or t
  misc_feature (418)..(418): n is a, c, g, or t
  misc_feature (430)..(430): n is a, c, g, or t
  misc_feature (442)..(442): n is a, c, g, or t
  misc_feature (455)..(455): n is a, c, g, or t
  misc_feature (469)..(469): n is a, c, g, or t
  misc_feature (473)..(473): n is a, c, g, or t
  misc_feature (502)..(502): n is a, c, g, or t
  misc_feature (504)..(504): n is a, c, g, or t
  misc_feature (612)..(612): n is a, c, g, or t
  misc_feature (640)..(640): n is a, c, g, or t
  misc_feature (668)..(668): n is a, c, g, or t
  misc_feature (679)..(679): n is a, c, g, or t
  misc_feature (706)..(706): n is a, c, g, or t
  misc_feature (713)..(713): n is a, c, g, or t
  misc_feature (914)..(914): n is a, c, g, or t
atatacttggcatacgtgaatattaatctacnccttttcctatcacttttaaaattttatactatgtactttgtattaaatagtacagtagtttcagtaagagnngngnnnttngccattttaaccaccttaaagtgtacaattcagtgacatttattatatttacaatgttgtgcaaccatcaccactaattcatcaaattttaataatcttttaatttttgaaccagatttagcagtgaggagctatatnnnaactttnnngnnactaatgtnaatnagtgcnganangncagtnnnatnngancngcagtnattnanccaattnnnntcatcctaganngngtncccatgngggttggggggngggtggggtggggggnccngggnggnggcnganagctgctaatngggttngngaccatgggttngggtattttggntatttcatataantgggatcatgtggntggnttcttccacttagcatgctttcttagggntnactcacatctattcattatgtatcagtgcctcattccttttcatggctgaatattccattatatggatgtattttacttatccattcatcagctgatagacatttggntgtttctacctttcggctattgtaagtngtgcttctatgaatacttgtatacaggnttttgtttgantacctatttccaattcttttgggtganatagacnagatgatgaatcaactaaaaacgaggtagcagctctacctctttagctttttggggcctcatttcactttacagaaggtaggatatatatataacttagtgactctcaaacagtatgcacaaaaaccacctgggaagcctttttaaagatgtagattgctgagtctcatgtccaaagagtccaattcagtaggtctggganctagggatttttat

SEQ ID NO: 543040 - DNA, 677 bp, Homo sapiens
agcggatgcttggtcttactcttcacaagtggtatacctctactttggagctgtgctgtatgaacaagagtagcatttcgatattacaagtgtaagtaaagtgaccactttgaagagagtttcgtgcaaggacatgacacaaagctgctagcggaaaatcaaaacgctgattacaagaagcacggtatgatgaccagagcataaagaagtgtcttataataagtggtgtttcagataacaactaatattattactctgagtagttaaactaactcgaggattctcagagtccatgccgccgtatgattggattggtatccgaaacaaatgctattgatgtctctaaagaagacggagatggaagttcaagtaaatacaacggtgccactcaagaatgccgacactaacgtatacacttgagcaagcatagaagcacaatgacatcttcttaggcgggcatcccatgcagttctgagtcactggccttggcactgaacgatggccaaaaaatcgaaccaggacaatgggtagatggagctacatttaccaaatcgtttggccatgagagggagtgaacggatgtgcctacgctcagggatgatggtgcagaaacagatagatgttacaccgaacgaaaatgcattggaggaaaggaatacctaagtaatgtctaagaa

SEQ ID NO: 543041 - DNA, 235 bp, Homo sapiens
ctctctcttcagggattgtccctgcgtccggcggccacataggcccctccgcttggctccttggggaaatggcccaggcgggttgcggttcctcttgagggccttctaccggacaaggagtccgacggggcggatgctgtatcctttgcctccctgctggatgggtttcaccccacctgggaagggcagtgtgctttgtgggggttgcaatcagtaaatgccgtgagttgcccca

SEQ ID NO: 543042 - DNA, 256 bp, Homo sapiens
ccgggcgtttaggcagacgggatctttctgacccctgattttgccaaatataaagccatttctaagcaaattcatgccgtttttcggacaattacgccaaaaattgagccggtggtgattgatgaggcttacttagatgtgaccgccaatgcgttgtcaggcgcactgctggccgcacagttacggcatgacatttatatacacacacgattactctagttcggtgggtgtatcgtataccatactattagcgatg

SEQ ID NO: 543043 - DNA, 318 bp, Homo sapiens
gacaccactttgttaaattgcaaaaaaaaaaccaaaagcatgccaggcacagtggctcatcctgtaatcttagcattttgagaggccaaggtgggaagatcccttgagctcaggagttttgagagcagcctgggcaacatagtgagacctaatctctacagaaaaattttaaaaattagctgtgcgtggtgcacatgcctgtccctagcaacttgggaggctgaggtgggaggatgacttgagtccagcaggtcaaggctgcagtgaattgtgattgtgtcactgtactccagcctgggcaacagagtgacactgtct

SEQ ID NO: 543044 - DNA, 441 bp, Homo sapiens
  misc_feature (176)..(176): n is a, c, g, or t
  misc_feature (181)..(181): n is a, c, g, or t
tttagataaacataagatgaacaacacgttttacatgtgtgtattagtagaacattttttgtgcctcatattgcatagatgggtcaatgaaaacagaaaaaaaagaaacataaagaaagtgagagagagggagaaggaaagggagagggagagggaatgggaatgggagtgggagnaaggnagggagggagagagaaaaagagggaggaagaaagggaggaaaatagttaaacaagcaagatgaacagaaacaaatatctgctatactctgaatgtcaaaatggaaatagcctgtgtaaagttctgcaaaaccataaatgtaatagatttattttaacaaggtaccaaagtactgtatgtttaagaaatttatcatttttcaacttcctaatttatttctggatggtgacattttaatttaaataaacagcagctgacagt

SEQ ID NO: 543045 - DNA, 1058 bp, Homo sapiens
ggtcgtccttggactaatgttttccacgtcagttgatgtttcgagtgaacatgtttgtcctaggtatatgatttgtgttcttaatcctctctggtgtatatgcgaagtccttgtgtgctgaggggttttctggtgccggtggatgctttctgcaaaggttcttgttacaatgtgaaccctttttggttaggggttcgtgtatgtaatgcgtggtttctatgctggttttcaattctttggacacgctccttacgtaactgtgatttttgttctgatgtatgtgggctggctatggttaactccccaagtctggccgtatgtacatacccgcgtgaagtcctcgtgtttactcgcctgttgcatctctgtggaggcttgcatggagtcgaattctgtactaggtatcttgtatccgcctatgtgtacctacgtccctttcttgtgctgtcatggttctctataggtagctccactgacaactccgctggtcttaatcacatggcctctcagcttggtgtaacgcgttccaactggtgtcccgtagaggcgccagcaacatccaagtctctaaccggtatgacatctagctttcatgatgcttcaggatgccgtctcgtcaagtctgaagtcacatgctctcgagactgcaggacatcccagtcgcctgcggatgatggtgcatcgctgcggacgagtgagcctctaggggtctcacatcggaagctcagagcacaaatctaatggctccactatgcgagcgaatgcaccaggacttcatacgcatgcactagtgtgttgacctcatgcgtggcttcacatgggttatcttcccatcctagttctccactatgcctgaatatcgctgtcttttcttctattctataagcaaccacatctgtattaggatcgaccctagatcttctatatgagacaaggacaggctgctggcggccaatagtagccctcaatcactacatgtgctttgttgattgtctgtgtgtctgtcttcccccaccagactagtgagctccatgagggcagggaccgtgtctggccga

SEQ ID NO: 543046 - DNA, 118 bp, Homo sapiens
gatctcgaggatccccgtaaaccctatcgctcatccttcctaggaacacatatgacgcactctcccctgatagctctacacaacatattttgtcaccaagacctgagcaagccatggt

SEQ ID NO: 543047 - DNA, 1486 bp, Homo sapiens
agacagtacattcattgtgttgctgttaatcgtgtgtaggaggtggagtgatgtgggatgtcttggttagataaatatggagtggttagaagagtatgtagtattagctggtagtgattgctttgtgtgatatgatcggcgggggattgggatagattagttagtgatactagagggtgtgatattatcttcggcagagttggggatagtagcgtcgtccctattggagtcctttgtcgtgtcatggtagactgtgaggcatcttactggttttggtggtgatatgtggtgtatattgttggtttatagggggtgttgagtttgtggggagaaattgtgttataagagtaacgtggggtgtgtttgttagtgagggtttgtttgggtgtgattgtgctagggttgttgtagagtttagattttgttgatggttgttgtaggaagttttttgtttgaggttttgggtatgtgtagggtgtctgtatgtgtgtgcttgaagtatagatgttgttctgtggcttaggttatgttgtagaggggatatggtttttgtaaaaatttgagggtaagttttgagggctattgttggcagtgttgagaacatggactgattggacaatagtggtgaaaatgaacgatagttaaggattgtagagtttgctgggttgtttaaattactgttggaaaattaggttggatctaccaaatggccattgggtaatataatttgcagagaagattagggaaagggagagaactccggattacggcgtttgttgagaaccttgtgtgccattttaagaggttacttgaatgtttggtaagctggtgatgcctgtgcaacgtgttacgagattgcaagccttagaatatagacagaacgcgaggcaaggttttctggcttgagaacagtccgttgaattgttaggcgagctacttttagcattagcaggccataacttgttactaaagtactttggtgaatggggaccgtttatgaggttgaatttatctttattatttttagttttgtttaagtgtctggtgcttttctaatcactctggttcgtaatcttttaagtgtaattgtgtgttgcaattttggggtaagacttttttatgagtactttttgtttgaagttcttagcggtcaatttgcctgttgaatgaacatcgtgaagttataactgtggctatgcgaacagctgcctcaacctgacgcgagtcattactagtgagttagtgccatatacagaccactgtatggtttacttctcaccatttgagttgcccatcttggttcacactagtcagcaattctgtgttttaagtgcctattaagtgtgtgaaacagttcacggtgtacagtgcaaatttaacgggaagttatttagtgcaaaatatgcctaaaatacattaaagtcggatgtctgtgactgctgatgatttacatcaggtcgttacacgggttatagtaatgcctgag

SEQ ID NO: 543048 - DNA, 602 bp, Homo sapiens
acatgaagtcaatggattacataacgacatgactcaggatatgaagttcatcatcaaacattggtgttctctatgcagaagatgtggtgctacaaacaaaggtgcaatcatcggactcatggtgggcggtgttgtcatagctatagatcatcgtcatcaccttggtgatgctgaagaagaaacagtacacatccattcatcatggtgtggtggaggtagacgccgctgtcaccccagaggagcgccaactgtccaagatgcagcagaacggctacgaaaatccaacctacaagttcttagagcagatgcagaactagacccccgccacagcagcctctgaagttggacagcaaaaccattgcttcactacccatcggtgtccatttatagaataatgtgggaagaaacaaacccgttttatgatttacatcattatcgccttttgacagctgtgctgtaacacaagtagatgcctgaacttgaattaatccacacatcagtaactgtattctatctctctttacattgtggtctctatactacattattaaagggtaacgtgtacagtaaagaatttagctgtatcaacctagtgcatgaat

SEQ ID NO: 543049 - DNA, 312 bp, Homo sapiens
gaccaaggaaggagcatatatcctcccctaccccatttctaagggcacactctaagaaccccaggcaggctccgtctatcctgcgagcccacacagcctccagctcttcctgcacagtgccgtcggtctcacctgcttgtaagcgacaggctcatcgcaggagccgttcttcacaatctcgcggtaggacagctcagagttcctctacttctgcagggccctagagagccgcatccacagctgaggtaagagagccgcaagggcactcaggctttctcgcgacacctgatcacggagccaggaccctctcaa

SEQ ID NO: 543050 - DNA, 1240 bp, Homo sapiens
  misc_feature (788)..(788): n is a, c, g, or t
  misc_feature (1020)..(1021): n is a, c, g, or t
gcacgagcacatgcctatcatatagtaaaacccagcccatgacccctaacaggggccctctcagccctcctaatgacctccggcctagccatgtgatttcacttccactccataacgctcctcatactaggcctactaaccaacacactaaccatataccaatgatggcgcgatgtaacacgagaaagcacataccaaggccaccacacaccacctgtccaaaaaggccttcgatacgggataatcctatttattacctcagaagtttttttcttcgcaggatttttctgagccttttaccactccagcctagcccctaccccccaattaggagggcactggcccccaacaggcatcaccccgctaaatcccctagaagtcccactcctaaacacatccgtattactcgcatcaggagtatcaatcacctgagctcaccatagtttaatagaaaacaaccgaaaccaaataattcaagcactgcttattacaattttactgggtctctattttaccctcctacaagcctcagagtacttcgagtctcccttcaccatttccgacggcatctacggctcaacattttttgtagccacaggcttccacggacttcacgtcattattggctcaactttcctcactatttgcttcatccgccaactaatatttccctttacatccaaacatccctttggctttgaagcccccccctgatactggcattttgtaaatgtggtttgactatttctgtatgtctccatctattgatgagggtcttaaaaaaacanatacaccaaccccaggggggcgcggtccaaatcggccaaagtgagtgataaatacatggcgcggtacaccgttggttggaaacctggggtccccatatacttaagatccatttccaagggaaagaagccgcgatgctcaaattcgcatgatggatgcgacttggaccacattgcacctgtactgacgactacaaagggggtggaccaagcagaaggtcctgtcctgctagcnnccacacaaaaaacaaaaataaataaaaaaagaactaataaaattatctgacccacagcacaactagatgcagcacaacaagaccacgctcaacattgacacccaccctgaccccgccccatatgtgtcttgcacagacacgacctcacgaccaagcaaccacaacaccgatacaagaagtagcccagttcaacaccacagataccgagcaacacccccg

SEQ ID NO: 543051 - DNA, 267 bp, Homo sapiens
tctctagctcagctgggcttgtacttgcagtcctcactcccagcaggctccggtacatgttgatctcgccctccagccgggcccggactgtctgcagcacctggtactcctggttcttgcgctccacggtcagcccggatctcagcacgctgggcctcaacatttggtgatcatgcactgcatctggtgcagctgggagctgtagctggtgctcactctccggacagcgtgttttccagggcagtccctctaaaggaaaggaagaca

SEQ ID NO: 543052 - DNA, 1208 bp, Homo sapiens
  misc_feature (111)..(111): n is a, c, g, or t
  misc_feature (123)..(123): n is a, c, g, or t
  misc_feature (143)..(143): n is a, c, g, or t
  misc_feature (200)..(200): n is a, c, g, or t
  misc_feature (756)..(756): n is a, c, g, or t
  misc_feature (988)..(989): n is a, c, g, or t
ggggtttaattaaaacccggccattcccccttaaaggggcctttaaccttctaataaccccggccaaaccaatggttttccttcccccccaaaaggctcttaaattgggcnttttaccacccnctaccatatccaatatgggncgttttaccaagaaagccattccaaggcccccccccccccctgtccaaaaaggcttntccacgggataatcctatttattacctcagaagtttttttcttcgcaggatttttctgagccttttaccactccagcctagcccctaccccccaattaggagggcactggcccccaacaggcatcaccccgctaaatcccctagaagtcccactcctaaacacatccgtattactcgcatcaggagtatcaatcacctgagctcaccatagtttaatagaaaacaaccgaaaccaaataattcaagcactgcttattacaattttactgggtctctattttaccctcctacaagcctcagagtacttcgagtctcccttcaccatttccgacggcatctacggctcaacattttttgtagccacaggcttccacggacttcacgtcattattggctcaactttcctcactatttgcttcatccgccaactaatatttccctttacatccaaacatccctttggctttgaagcccccccctgatactggcattttgtaaatgtggtttgactatttctgtatgtctccatctattgatgagggtcttaaaaaaacanatacaccaaccccaggggggcgcggtccaaatcggccaaagtgagtgataaatacatggcgcggtacaccgttggttggaaacctggggtccccatatacttaagatccatttccaagggaaagaagccgcgatgctcaaattcgcatgatggatgcgacttggaccacattgcacctgtactgacgactacaaagggggtggaccaagcagaaggtcctgtcctgctagcnnccacacaaaaaacaaaaataaataaaaaaagaactaataaaattatctgacccacagcacaactagatgcagcacaacaagaccacgctcaacattgacacccaccctgaccccgccccatatgtgtcttgcacagacacgacctcacgaccaagcaaccacaacaccgatacaagaagtagcccagttcaacaccacagataccgagcaacacccccg

SEQ ID NO: 543053 - DNA, 1079 bp, Homo sapiens
  misc_feature (627)..(627): n is a, c, g, or t
  misc_feature (859)..(860): n is a, c, g, or t
cgcggctggggaatcctgccgaagataaaaggccttccaaggcgaccaacaccatctgttcaaaaggcttcgatacgggataatcctatttattacctcagaagtttttttcttcgcaggatttttctgagccttttaccactccagcctagcccctaccccccaattaggagggcactggcccccaacaggcatcaccccgctaaatcccctagaagtcccactcctaaacacatccgtattactcgcatcaggagtatcaatcacctgagctcaccatagtttaatagaaaacaaccgaaaccaaataattcaagcactgcttattacaattttactgggtctctattttaccctcctacaagcctcagagtacttcgagtctcccttcaccatttccgacggcatctacggctcaacattttttgtagccacaggcttccacggacttcacgtcattattggctcaactttcctcactatttgcttcatccgccaactaatatttccctttacatccaaacatccctttggctttgaagcccccccctgatactggcattttgtaaatgtggtttgactatttctgtatgtctccatctattgatgagggtcttaaaaaaacanatacaccaaccccaggggggcgcggtccaaatcggccaaagtgagtgataaatacatggcgcggtacaccgttggttggaaacctggggtccccatatacttaagatccatttccaagggaaagaagccgcgatgctcaaattcgcatgatggatgcgacttggaccacattgcacctgtactgacgactacaaagggggtggaccaagcagaaggtcctgtcctgctagcnnccacacaaaaaacaaaaataaataaaaaaagaactaataaaattatctgacccacagcacaactagatgcagcacaacaagaccacgctcaacattgacacccaccctgaccccgccccatatgtgtcttgcacagacacgacctcacgaccaagcaaccacaacaccgatacaagaagtagcccagttcaacaccacagataccgagcaacacccccg

SEQ ID NO: 543054 - DNA, 234 bp, Homo sapiens
ttttttccccccaaaaaaaacccggggggggttccccccccgggttttttctttgggggggggggggggaacctttttcccccggggaaccctttttccctttgggcctttttgggggcccctttaaaccaggttgggccaaaaaaccgggggggggcggggcgggatttcccgggattttttccccccccgggccccgggggggggggggttttaagggaattttccctttta

SEQ ID NO: 543055 - DNA, 742 bp, Homo sapiens
  misc_feature (704)..(704): n is a, c, g, or t
  misc_feature (706)..(706): n is a, c, g, or t
gcacgagcacatgcctatcatatagtaaaacccagcccatgacccctaacaggggccctctcagccctcctaatgacctccggcctagccatgtgatttcacttccactccataacgctcctcatactaggcctactaaccaacacactaaccatataccaatgatggcgcgatgtaacacgagaaagcacataccaaggccaccacacaccacctgtccaaaaaggccttcgatacgggataatcctatttattacctcagaagtttttttcttcgcaggatttttctgagccttttaccactccagcctagcccctaccccccaattaggagggcactggcccccaacaggcatcaccccgctaaatcccctagaagtcccactcctaaacacatccgtattactcgcatcaggagtatcaatcacctgagctcaccatagtttaatagaaaacaaccgaaaccaaataattcaagcactgcttattacaattttactgggtctctattttaccctcctacaagcctcagagtacttcgagtctcccttcaccatttccgacggcatctacggctcaacattttttgtagccacaggcttccacggacttcacgtcattattggctcaacttctactatctgctcaatcgcaactatatcacttacatcaacatacttggctcaagcgcgctgaactgattngnatgggttgctatctgatgctcatcattgtaaggctt

SEQ ID NO: 543056 - DNA, 678 bp, Homo sapiens
  misc_feature (17)..(17): n is a, c, g, or t
  misc_feature (27)..(27): n is a, c, g, or t
  misc_feature (50)..(50): n is a, c, g, or t
  misc_feature (84)..(84): n is a, c, g, or t
  misc_feature (127)..(127): n is a, c, g, or t
tcctcctcccggccccncccccccccnccccctccccccgctggcgcgcngtcccccgcgcccgcccctcccccggcccccccnccccccccgccccccaaggccccgctccgggctcccccatttntccccccgccgtttttcccccgccggattcccccgagccccttcccccccccgccccgcccctccccccccattcggcggcccccggcccccccccggcccccccccgctaaatcccctagaagtcccactcctaaacacatccgtattactcgcatcaggagtatcaatcacctgagctcaccatagtttaatagaaaacaaccgaaaccaaataattcaagcactgcttattacaattttactgggtctctattttaccctcctacaagcctcagagtacttcgagtctcccttcaccatttccgacggcatctacggctcaacattttttgtagccacaggcttccacggacttcacgtcattattggctcaactttcctcactatttgcttcatccgccaactaatatttccctttacatccaaacatccctttggcttcgaagccgccgcctgaatacgggcatatggtaagatggggttggacttcccgtagggatgcaaaaacaaaaacaacaaggggggcccccaaaaagtcgcccggcaggc

SEQ ID NO: 543057 - DNA, 142 bp, Homo sapiens
tggcggtcgttaaatttatctaaaaactgaaaatacgtaagaggtcatataaggaaaatcagaaaatacaatcaaaaatctacccacatatagtcattcttaagcttagatgcatgcacttctaagttcttcaagcatatac

SEQ ID NO: 543058 - DNA, 300 bp, Homo sapiens
tctgccacttttcgaagctgatgctcgaagataacatgacccttctcatgagctccttggagccatcttctttcatcataagcattttgagtagaacaatcttggaatgtgtataagagtagctggcatgtcagatgaaggacatctcctttgtttggttttaatataaatggtagaacttgaaatatacttgacccagtgctacagtgaattctctgtgaatattttacctgtgcttgctcagagcaatgaggtatgcaccatataaggtggaatcccaaatgttgaagtttctgccaa

SEQ ID NO: 543059 - DNA, 806 bp, Homo sapiens
gcacgagcacatgcctatcatatagtaaaacccagcccatgacccctaacaggggccctctcagccctcctaatgacctccggcctagccatgtgatttcacttccactccataacgctcctcatactaggcctactaaccaacacactaaccatataccaatgatggcgcgatgtaacacgagaaagcacataccaaggccaccacacaccacctgtccaaaaaggccttcgatacgggataatcctatttattacctcagaagtttttttcttcgcaggatttttctgagccttttaccactccagcctagcccctaccccccaattaggagggcactggcccccaacaggcatcaccccgctaaatcccctagaagtcccactcctaaacacatccgtattactcgcatcaggagtatcaatcacctgagctcaccatagtttaatagaaaacaaccgaaaccaaataattcaagcactgcttattacaattttactgggtctctattttaccctcctacaagcctcagagtacttcgagtctcccttcaccatttccgacggcatctacggctcaacattttttgtagccacaggcttccacggacttcacgtcattattggctcaactttcctcactatttgcttcatccgccaactaatatttccctttacatccaaacatccctttggcttcgaagccgccgcctgaatacgggcatatggtaagatggggttggacttcccgtagggatgcaaaaacaaaaacaacaaggggggcccccaaaaagtcgcccggcaggc

SEQ ID NO: 543060 - DNA, 1332 bp, Homo sapiens
gcccgcaggcttctcaataggtttggcatggaccaagcatctcatgcaaggccaagatggcaggtgcactggtgcatgcacatcacacatgtggcacacagcattgcatggtctagcccaggtgccgttcaccctgctcatttaggcatgcaggcacttgcctagcaactcaccactggcacatcacacagtttattaggtgcccatgacagggcagctgtgagcatggcaggcttgtctcatccctccacagtcaccacaacgcattcccatgcgttcatgcattcatgcacacagcaaaggacatttcacatgccagcaagatacatcggcacagccaccatccatcgggcccagcacatgcttcgccagcattcaccatgctgcctcagtctcacatggccacagcaagccatcgcaacagcatcgcttcaccagtatgcacacaccagcttctcttccacatcacgcatcaacagcaaccagccgctcacactcacccagcaccatgcatcgcgatggcagcatgtcatcacagcaacagctccatgcttcgctcatcacgcagcagcaatcccagtctcatgcacaccagcacagccccacacgcacaagcacagttcccaccacagcacagcaggctggcacccccgtcccctaacccttgtccccttgtctccacgccagcaccggatccgcggttcgctccctcccgtcaaggcccgccttccttccagcagcttccaggcagcgtgggctgcttgacgcaggcttcaacacccagccaagttctccttcatccctccccctcccgcactactccgagtttctctcacccttcactgcaccacgcaaacacactgacctacacaccaaggtgctgcaccacccccacagcagatactccccaccaagagcgcccgcaggacacacacggtgcacccagacctcgtcgtgatcccacgaggtgcaccacacgcgcgcgccgcaatcccacccaacaccactgggctccgaccagaaaccacagccacccgacctggcaagacggtaaggccccccccctgcgaacggccactcacccgcacagggaccatcgcacagcacgcacacactccaccccacgcaccatccacttcgggggctaagggataacgccacaggtagaccacacacgtcgcgacacccaccttcacgggcccgcatccccgggggagcgaccacccaacgccgggcccgcgacgcggacgcgaaccccaccgggcgcagcccacgctacacgaaccacgcagcgagcacgacacgcaccgacgccaccaccgcgccgacacc

SEQ ID NO: 543061 - DNA, 985 bp, Homo sapiens
  misc_feature (533)..(533): n is a, c, g, or t
  misc_feature (765)..(766): n is a, c, g, or t
atttgttactatcgcgtgatgaggctgagcctatttaccactcgaggctagcccgcataacccccgaatgtaggatgggcatatgtgcgcccgtgaggcttcaccccgctaaatcccctagaagtcccactcctaaacacatccgtattactcgcatcaggagtatcaatcacctgagctcaccatagtttaatagaaaacaaccgaaaccaaataattcaagcactgcttattacaattttactgggtctctattttaccctcctacaagcctcagagtacttcgagtctcccttcaccatttccgacggcatctacggctcaacattttttgtagccacaggcttccacggacttcacgtcattattggctcaactttcctcactatttgcttcatccgccaactaatatttccctttacatccaaacatccctttggctttgaagcccccccctgatactggcattttgtaaatgtggtttgactatttctgtatgtctccatctattgatgagggtcttaaaaaaacanatacaccaaccccaggggggcgcggtccaaatcggccaaagtgagtgataaatacatggcgcggtacaccgttggttggaaacctggggtccccatatacttaagatccatttccaagggaaagaagccgcgatgctcaaattcgcatgatggatgcgacttggaccacattgcacctgtactgacgactacaaagggggtggaccaagcagaaggtcctgtcctgctagcnnccacacaaaaaacaaaaataaataaaaaaagaactaataaaattatctgacccacagcacaactagatgcagcacaacaagaccacgctcaacattgacacccaccctgaccccgccccatatgtgtcttgcacagacacgacctcacgaccaagcaaccacaacaccgatacaagaagtagcccagttcaacaccacagataccgagcaacacccccg

SEQ ID NO: 543062 - DNA, 103 bp, Homo sapiens
ccaccttaggctcccaaagttctgtgattacaggcgtgagcccccaaggccagggtaaggtaggatgttttcttactccagcaactacgtggaacttccagtc

SEQ ID NO: 543063 - DNA, 819 bp, Homo sapiens
  misc_feature (74)..(74): n is a, c, g, or t
  misc_feature (102)..(102): n is a, c, g, or t
  misc_feature (111)..(111): n is a, c, g, or t
ctagagacagaacctcgcctgttgcctcacaaccacctgtgggagccttgttaatgcagatggccatggtgaantgtgggagaggggggtaatatatccaantttttccantatggatggggatgcaccactaatgagaatacctattcaaaccgtaccctgatgggcaactggaaccaggaaagatatgacctgaggagtatcgtgcagcccaaacccttgccttcccaggtggggggggactttgaaacaacatatgatacaagctacaacaacaaaatgccactttcaacacatagatttaagcgagagcctcactgggtcccaggacatcaacctgaactggatcctccccgatacaaatgcgcagagaagtcaacttacatgaataggtattcaagggcttaaattggggatcactgaggagtggggtgagatcttaatattgagctaggtcacatcgcaggttctaaggaaggggaggatacttcacttttccaggggggaaggggcgggggggcacattctaagggcgggtgaaatggagggggactggacacaggttcggtctgtggggtagtggggggggagaccccgggagagagaatggggcctcggttgggctccaaggggggagagctgtggggcgcgcgtacccgttgaggggagggggagttgggggcgcgcggcttacgaggctgccgtccggtgcgggggcggcgcgcgccagggggccgcgccccggtgggtgcggagggggcggttccgggtgcccggggagtggggggttccgggggggccagccggtgagccaggggg

SEQ ID NO: 543064 - DNA, 1174 bp, Homo sapiens
  misc_feature (722)..(722): n is a, c, g, or t
  misc_feature (954)..(955): n is a, c, g, or t
gcacgagcacatgcctatcatatagtaaaacccagcccatgacccctaacaggggccctctcagccctcctaatgacctccggcctagccatgtgatttcacttccactccataacgctcctcatactaggcctactaaccaacacactaaccatataccaatgatggcgcgatgtaacacgagaaagcacataccaaggccaccacacaccacctgtccaaaaaggccttcgatacgggataatcctatttattacctcagaagtttttttcttcgcaggatttttctgagccttttaccactccagcctagcccctaccccccaattaggagggcactggcccccaacaggcatcaccccgctaaatcccctagaagtcccactcctaaacacatccgtattactcgcatcaggagtatcaatcacctgagctcaccatagtttaatagaaaacaaccgaaaccagtacttcgagtctcccttcaccatttccgacggcatctacggctcaacattttttgtagccacaggcttccacggacttcacgtcattattggctcaactttcctcactatttgcttcatccgccaactaatatttccctttacatccaaacatccctttggctttgaagcccccccctgatactggcattttgtaaatgtggtttgactatttctgtatgtctccatctattgatgagggtcttaaaaaaacanatacaccaaccccaggggggcgcggtccaaatcggccaaagtgagtgataaatacatggcgcggtacaccgttggttggaaacctggggtccccatatacttaagatccatttccaagggaaagaagccgcgatgctcaaattcgcatgatggatgcgacttggaccacattgcacctgtactgacgactacaaagggggtggaccaagcagaaggtcctgtcctgctagcnnccacacaaaaaacaaaaataaataaaaaaagaactaataaaattatctgacccacagcacaactagatgcagcacaacaagaccacgctcaacattgacacccaccctgaccccgccccatatgtgtcttgcacagacacgacctcacgaccaagcaaccacaacaccgatacaagaagtagcccagttcaacaccacagataccgagcaacacccccg

SEQ ID NO: 543065 - DNA, 238 bp, Homo sapiens
gttcgtcgtgtaccatccgcggatgagcatgattaccagttgactctggatggaacagtagacataggagactccattttgttctgtactaagaaaaattcttctggcttgagattctgttaatctatgacttacccccaaccccgtgctctctgaaacatgtgctgtgtccactcagggttaaatggattaagggcggtgcaagatgtgctttgtttaaacagatgcttgaaggcag

SEQ ID NO: 543066 - DNA, 436 bp, Homo sapiens
tggcccccagtttctttcttttgggtctatacccggcagtgggattgctggatcctatggtagctcaatttttagtttttcgaggaaacgccaaactgttctccacagcggctgtattaatttacattcccaccaacggggtacgagggttcccttttccccacatcctcgcgagcaattgtgattgtctgtcttttggataaaggccattttaaccggggtgaagtgatgtctcatggtagttttgaattgcatttctctgacgatcaatgatgttgagctcctcttcagatgcctgttggcagtttgtgtgtctcctttgagaaacgtctattcagatcttttgcgcgtttttttgatgggattattagattttttcatatcgagttaattgcatgccttctatgttctggttgtgatctgtgtgacaggagcg

SEQ ID NO: 543067 - DNA, 437 bp, Homo sapiens
  misc_feature (8)..(8): n is a, c, g, or t
  misc_feature (67)..(67): n is a, c, g, or t
ctctaagngacgattatgatggtttattttcattgtatacacttatacatatactattcaaagccgntggagtcgggaatggtgaatggaaactttctccaccctagacaattgataaactctaggagtaccctttttcatattcatctttccatatttgcatcttttgaggtacttggaatactgttaagtgatttttcttcccacttactagggatttgctgtcttttgaagaatttctgaaacaaacatgtggtccataagtccaagtaaaatattttaaaaacaacgacaaaccaataaacagcaaataataatggccacaaatccatgaataatcaaatttaataaaatattgacatacaaggatttttattgcttattacaatcactaacatgcaacccagcttatggataccacggagttccaatattgg

SEQ ID NO: 543068 - DNA, 183 bp, Homo sapiens
aagtagcacgttcttgcagtccatatgccagcagctcaagacccaagaagagccattttgcagttggcgtctgaaagcagaaaaacttatgtcccagcccaagagcaggagttcccccgttacttgagagaagaataagccctttttgttacattcagggctttcaagcagactgagatgggg

SEQ ID NO: 543069 - DNA, 124 bp, Homo sapiens
  misc_feature (25)..(25): n is a, c, g, or t
tataaacaaatacaaaatacaccanaataaaataacacattcacctaacattaaagtataggagatagaaattgttatcctagacgctatagcgatagtaccgtcaggcaaagatgaaagacgg

SEQ ID NO: 543070 - DNA, 426 bp, Homo sapiens
cactccagcctgagtgacagagcaagaacctgtctcaaaaaaaaaaaaaaaaagaagaacttgccctgggtgagtgattttttgtttgtttgtttggttttttgtttgtttttaaccgaactagtcttatcagtgaagcaaccgggccagtggctcacgcctgtaatcccagcactttgggaggccgaggcgggtggatcgcagggtcaggaaatcgagaccatcttgttgaacacggtgaagaccctgtctctactaaaaatacaaaaaattaatcggacatggtggcacgcgcttgtgatcccagctatttggaagcctgaggcggaagaattgtttgaacccggaaggcggaagttgcagtgagccaagattgcaccactgcactccagcctggtcaacagagcaagactccatcaaaaaaaa

SEQ ID NO: 543071 - DNA, 211 bp, Homo sapiens
ggacataacctgccagcagggagccgcctctgatggagtgctccaaggccgcgcaaacagctgggaaacccatgtaattgcagaaggaatggcagacgaaccgtgcccagatcacggtgtcctgtgacggatgaagaggaaagcagtgtatggaccgacaacagctgtgtaggagaactggaacgcagcagacaagaagatataccccacg

SEQ ID NO: 543072 - DNA, 483 bp, Homo sapiens
  misc_feature (14)..(14): n is a, c, g, or t
  misc_feature (37)..(37): n is a, c, g, or t
  misc_feature (43)..(43): n is a, c, g, or t
  misc_feature (71)..(71): n is a, c, g, or t
  misc_feature (114)..(114): n is a, c, g, or t
  misc_feature (145)..(145): n is a, c, g, or t
  misc_feature (163)..(163): n is a, c, g, or t
  misc_feature (183)..(183): n is a, c, g, or t
  misc_feature (321)..(321): n is a, c, g, or t
cttttgcccccccnttaattaacaaccaccaaccagnttttantcccaagcgaccggggcgcgaagcttgnagtgcccgttgttcgccccccaaatcccgaaccaccaaccacnggggatgaggtcccacgcgaccggggcggcnaagcttcgcagtgcccgntgtctcgccccccaaatccncgaaccaccaccacgggagctcgcggatgaggtcccacgcaaccggggcagagaaccccacagagcccgcagactcgccccccaaatcccgaaccaccaccacggggatgaggtcccaagcgaccggggcgcgaagcnccgcgtacccgctgtctcgcccacgtaaacggggtacaggtccgaacgcaggaccaacccggaggcgtccgggtccgcagtgaaggagcccagcgcctcaaactgatagggcaagccaccgcctggtccaggtaggcgggcccgggcaggggcacctcgcga

SEQ ID NO: 543073 - DNA, 302 bp, Homo sapiens
cagagataacagagaacaccatggagaggctacggtgggtgacagtctcaggaggagaggaactagtacaccactcgcaggcaggacaagtcacctcaaccacatccctatgtctcggcagaaaaacactctcgcactaaccgttttttttttcaacgcacataaacattagtgatgtaggttcttagtagagagttaaggccacagctaaatcagactttactttccggaaagaatcgtgtttttaacaacaacacaccctgataatttacgtgataacctcatcacgaggcactacgtgc

SEQ ID NO: 543074 - DNA, 127 bp, Homo sapiens
gacggcagctttgttgactgcgatgtttccaaatcacttgctcaacctgcagcgttcccatggagcttggagcgcccagcatagggctttattgttgttttgaggcaagaaagaagttttcagaagc

SEQ ID NO: 543075 - DNA, 211 bp, Homo sapiens
cggccgagtcgacatagcgcgccagcgcctcctcgagcgtcgggatgcccagcgccttggtgtcgacaccgagcaggccgttgcggccctcggcgggctgcacccagctcatcaggaaatagctgaggtccgcgatcggatcgcccagcgtcgagagctcccagtctatcagcgcgatgaccctgggctcgtcatgcgcgaagatccggtt

SEQ ID NO: 543076 - DNA, 159 bp, Homo sapiens
tatcgatgcctttacactagaattattttagtaaatattcaatatttctctacatttgcaccaaaattatttttactaataattggaatattgtagatttgaataaaatctaaattctttttatattctttcttgactctattccttctacattttcct

SEQ ID NO: 543077 - DNA, 147 bp, Homo sapiens
cctagacgactcacactggtcgagtcaggacagtgtattcgtgtgtgcacgtatgtgagcacaagcagtcgggcacatccataggtcaggacttgagaaaccacggttgcaggctagaatcccaggctgtacagccatgcgactgaa

SEQ ID NO: 543078 - DNA, 233 bp, Homo sapiens
aggatccgaaaaaatcgtcccagcacctccccctgaaccgtgacacacgataaaagtgaagtgcaagtgtgatagttggtctaacatctgtcttattgcatggcttactaatggttacgaattaacagacaaatagcagtcgacaaattctcacataataaaggcattgtgatccagcgtgcattcctagttggtggttatgtccaaacatcgatcaactgtatcgttatcat

SEQ ID NO: 543079 - DNA, 1192 bp, Homo sapiens
gcgatgacctgcctgcctgaggatgcctcggttggatcgcgcaacgagctgcaggcatccagcgggacaagcatgccaatcgtggcacatgcatgctagctgacattgtgctataatgaccttcttctacctccgatgatgcttcatcactgtgtatggggggtacctctgcagtgtgcgagtctaccagtatttccagtggcagcaggaccagcgccaggccgtcgagagagaagcatggaagatcgctcaggaagtcatgtatgaacgtgaggagggctttgttcgtcctgtaggcacgagagtgcccaattggcatgcctgctggaggaagacttcagacatgtccacgcattttcacaggctcagacaggactagagccgttgatgagttattgcaagaccctgttcggtaagaaagcttgctccaatggttatctctggttctagccaggtttgacagtcttatggaggcttattgaatcgtaatagccaatgtcgaggggtgagggtacaccgtactagcacagttagaattaatttcgctcgtggacctgaaagaacacagagaacaatcggagacacaacctgaatcgcccctagagaaggaagggggggaaaaagaaggctgaaaagacacaagcggcccgagaagacaccaaaacgtcgggagtgaactgcggaccgcatagcatcgaggccaaaacagcggggccacaagccaacagaggggaccccataggagggggacaccacgaagaaatcgcacaagaggcccagaagaaacaccaggcaaacaagtgagctcagacaatacagagacacgccatcgacaacacaatgacaaggcgaactgaaccgatcgcgagcgtcagagccagggcctgacgagatcacagccgtagccaagcaacacaaccccgctatacccacgcccaaagatcagcgtgcacgcgagacaacacgcagcgcaccgccccgcgccactcagacccgcaccacaccaggcgcccccgcacgagaaacacaacagaggacgcgcgacccacacagaggagaagggactagggacactaaatatcctcccgacacagccaaacgatacgcacgacagaaagctgacaatagggagcgggacacgagcaacacaccaccacgagtaagaagacaaaaggtagaacaaaagacgagc

SEQ ID NO: 543080 - DNA, 149 bp, Homo sapiens
  misc_feature (73)..(73): n is a, c, g, or t
cgatcctctaatggctgtgctattgaactgttcacgggtgtggatcacaccaacatgctactctatcacagantggtgctgctacaggcaaagtagacaatgcgatacaggagatctgagctagtggaataaagagatgattgagccct

SEQ ID NO: 543081 - DNA, 401 bp, Homo sapiens
actcctatgatgttccagatggggccttgtgtaatgtggatgcctatggcacattccaattgagatcccttcaccgccttaccaatccagactgtgctttctactatactaggctccaaggaaagagcaagtacagatatggtggtttggctccaccgtccccgggccaccgtgactggctatttctctccccacgaccataatgtagtcagcatgcctaaggctgcttgtgtgaagcagacctacacctcatgggatcttgagtgacatggaaaaataccgcatgcagtccatccggagagagagccgtgctcggcagaaggtgacagggcctgtcatgtcccaatatgataacatgaccccggcggtgcaggacgacttgggtgggatctatgtcatcc

SEQ ID NO: 543082 - DNA, 786 bp, Homo sapiens
  misc_feature (29)..(29): n is a, c, g, or t
  misc_feature (115)..(115): n is a, c, g, or t
  misc_feature (174)..(174): n is a, c, g, or t
  misc_feature (178)..(178): n is a, c, g, or t
  misc_feature (215)..(215): n is a, c, g, or t
  misc_feature (518)..(518): n is a, c, g, or t
  misc_feature (535)..(535): n is a, c, g, or t
  misc_feature (539)..(539): n is a, c, g, or t
  misc_feature (557)..(557): n is a, c, g, or t
  misc_feature (571)..(571): n is a, c, g, or t
  misc_feature (613)..(613): n is a, c, g, or t
  misc_feature (627)..(627): n is a, c, g, or t
  misc_feature (658)..(658): n is a, c, g, or t
  misc_feature (690)..(690): n is a, c, g, or t
agtggggcgtagggttgtggtgtgccgtngggccgggggtcgtccgggccgtcacgtgtggccggccgcggtgaggaagcgcggtggagaaggtcgaacagggtcccgaattganctttgcgcaggtttgcgcaccgtcggtctcttccagccccggtcacacggacgcgcacntggntccttggccgccgagcacgccctttcttctcaatggntgcgtgcacaggacggctctgcagctgccccgtgcggtccaggtagctgggctccgagccctgctggtggaggcccaggcgcagagtgaggcccccgtggcgcggctcgtccccgtgctcggcgcccagcaggtgcttgttgaagtggggcagcggcaggctgggcctgaagtctgagcccagcatgctgacgggcgccaccggatggcggcattggtgactgggcctttgagggccaccgtccggatgcactgcttgcactgcacgtcccagaggcgcacggtctcgtcgtgggagcctganagcagcacgctgccgtnagtngacactgacaggcaagtnacctggttcctgtnccctttgaagaccttcccggcgtcctgctctgggtggaagcncctctccctctgtncgggccaggtgaagaggtcgacctggaaganggagccctcactgcccccgcagaacaaatggngctcagccagggccatgggcactgccatgatggacacgtcaaagaggacggagagcagcagcccccccgaggagacctcccatagcttcaccgtct

SEQ ID NO: 543083 - DNA, 593 bp, Homo sapiens
  misc_feature (162)..(162): n is a, c, g, or t
  misc_feature (171)..(171): n is a, c, g, or t
  misc_feature (178)..(178): n is a, c, g, or t
  misc_feature (190)..(190): n is a, c, g, or t
  misc_feature (201)..(202): n is a, c, g, or t
  misc_feature (209)..(209): n is a, c, g, or t
  misc_feature (229)..(229): n is a, c, g, or t
  misc_feature (242)..(242): n is a, c, g, or t
  misc_feature (255)..(255): n is a, c, g, or t
  misc_feature (269)..(269): n is a, c, g, or t
  misc_feature (305)..(305): n is a, c, g, or t
  misc_feature (311)..(311): n is a, c, g, or t
  misc_feature (322)..(322): n is a, c, g, or t
  misc_feature (346)..(346): n is a, c, g, or t
  misc_feature (348)..(348): n is a, c, g, or t
  misc_feature (351)..(351): n is a, c, g, or t
  misc_feature (358)..(358): n is a, c, g, or t
  misc_feature (361)..(362): n is a, c, g, or t
  misc_feature (536)..(536): n is a, c, g, or t
gggttccaggggagttaaatccagtcttatgaagtatgttattaaatgtctttttaaaaagagaaatataaacatatatttttactattaaaatattcagttttttaaatgaagtagaactgagttcatgtttatatgaaatatttaccaaaaaaaaaaatngaggtaacnggttttnaaaaccttgganttgagtctgcnnggtaaancttctgaatatggagttggnggagaaataaaantcaaaatttcttnaagctggtaaagtngaggggcccaccagcagtgatctcctgatgccttantggaancttggttactngtctgtaccctctgattggttttnangtnagttttnatnngtgagcacacatagtacctagttacatcttaagatcaggtttataaacactgtggagtgcagcggtatggtatggaatgactgtgaatgtaagctgtcagggagcaacactgttgtcaccttttgctaagatctgggggttccttcatatcctgctgtggaacgcagttgaccnaaattgcttgccagtattgccaaagcctgctgctgacatgtgacctcctgggtctaa

SEQ ID NO: 543084 - DNA, 247 bp, Homo sapiens
attccccgccctttcccctgcgcgtcccgagtcgcagcttcggtgctttgcaggacggcagttaggcctatctggttggcctttttgaagacaccaacctgtgtgctatccagtgccaaacgtgtaacaagttatgccatatagacatccgagctagcacagccgcatacgttgagcaacgtggcttgagacatcctactatgatcgggagaacattttcgcggtaccagtagctgcgaaattctgt

SEQ ID NO: 543085 - DNA, 277 bp, Homo sapiens
gcgcacaggtgagctggatcttctgtttagggtcgcacaaggatgacatcaggatgtcaccagggttgggttcttatgtggaggctaaattagggaaataatgtgcttccaagctcactcaggcttctagcagaattcatttccttgaggttataggactgaggggccctggtttcttcctggctgttggtggaaacatcatagaggctgttagtagctccttgccacataggcttccctaacagggctgcttatcttataatgccagcaaggagtc

SEQ ID NO: 543086 - DNA, 128 bp, Homo sapiens
  misc_feature (84)..(84): n is a, c, g, or t
ggcattgggggttacagatctagatcccatgctaggattgtctgtaatgccccagcccaccttccctttcagcccccagagcanggccctccagcctctcgtctctcctttccaaactctggaggagt

SEQ ID NO: 543087 - DNA, 88 bp, Homo sapiens
catggatttgctggtgcagtacaactaggcttaatagggacatgtcacggcaccccagcctgggtgaaagagcgaaactccatctcaa

SEQ ID NO: 543088 - DNA, 872 bp, Homo sapiens
ttcaacagagtatccccgagtgctctccgcagcaacccatttccatttgagggtgatgatggattctagtgtgtttgagagcaacgccattgcctactatgtgagcaatgaggagctgcgggaagtactccagcaggcagacagacaggtggtgcaggggtgagcttagtagattccgatatattgcccccagccagtacctgggtgtgccccaccttgggcatcatgcgaccacacactgagacatggccactgagaatgcaaaggagagaccgtgaaggcgacttctggggctgctggatgcttactctgaagacgaggacttttctggtggggtgaacggagtgagcattggctgacatcaccagtatgtctgcaccctgtatgccggctctataaagcaggttctagagccttctttccgccatggcctttccccaataccaaccgacttggttccttcacctagacattaaccaagtcccagtttcccgggctggctatgggcgcaagtgcacactgtgtgagaagatggccccagtttgatggcttaaccagtattgggaggagacgcaaactaatcaaggacacaccaccggacaaagagcagggtcatgtgaaagagaagcagaagcccaaggatgaactggaacgcagcagcacaagggcggttgcccctgggtctgaggcagcgaatgctgagtgtgacacgaggcaggttgcagaacccagggtacgaccctagtcactgcccagagttctttggttggatgcataaggacgttcacgacgcaaccttgggcggccaattgggcattaatggggcaccggcacaaaaagtcctaaaataaccagcgtactcgaaccatcaa

SEQ ID NO: 543089 - DNA, 403 bp, Homo sapiens
tgaaacagcctccagttacaacagctccattacaacagtaatgaacatatgccacccctaaagtttccttatgtccctttgtaatctcttctggcccctcgttcctcagacaaccacggatctgtttctgtcactctagactagcttgcatttgcctagaagtttatgtaaatagaatcctacagtatgcattcttttttgcctgccttcttttactcagaataagctattttgagattcattcatgatattgtatgtatcatcagtattcatccccttttagtgccgagtagtattccattgtatggatgtatcataatttgtttatacattcacctgttgataaacatttgggttgtttctagttttcgcccattatgaataaagctgaactgttgtaact

SEQ ID NO: 543090 - DNA, 158 bp, Homo sapiens
atctatgcgggagatgaaaaagtcctaaagttatgtatctaatgtgtcacagaataggacgatatgattccaacataatcaactccctattaaattctttaatgaagatttttttttttttttttatttttttttttttttttttttttttttggggg

SEQ ID NO: 543091 - DNA, 1007 bp, Homo sapiens
agctataggccgactgcttaggtctgcaaactgggcagctgttcccctggaggggctactgctcccagaaggcaaagggagagctctgcaggaactatcgtagaggctctaaaaggccgtggtgggcggcacccacatgaccacaagccagcaagaaagggaccaaaaagcaagcacagggcgcgagaaaacagaaagcacaaagagcaaagccgaccagatgcattaaaagaattgcccagagagcaaaagtcagaagattgcttgcagatgtctcgcagatcgaatgatgaaggtgggaggcctggcagacgtaagtcggggactgaacgggcgaattctaagggggtaaagacttgacgaaagggaatgggttggaatcgtttaacaattgttggaacgcgaatggagcaaaaaaggtagccagaaaatccaaggggacatatattgccattgttagcgaactacaatttgtgaaatattaaattccgagataaaatcagttctttgcaatgttcgcgagcgagatggctcaacccggattggagagacaacgaagcggggggcctaccttggggaggatccccagttagtatccccaatttactaccaagatcttcggttcgactactataaagctatagagccaatatctatcgcgaggggggttgtagcgtttattactcgaagcacggatttacccactttagcatgagcgatcctataaatcatatttatcgggactctgatttactgacttctaaattcagatagatggggggaccattgctcccagatcgagttcatggtggatctgaattcaatctcattggaggggtcgaggggggccaaaagattgtgacttggtggagaagaatgagaaacaagtctctgggcgaagaagagttgggacttctttgtgtgacttcgagtgggggagatggggagccgagattattgaacttctgaaatttttctccttctttactatctttctttgcaactta

SEQ ID NO: 543092 - DNA, 438 bp, Homo sapiens
ccccccgggaaaaaagggggggttttttttttgggcccctttttcccccccttttccccgggggttgtttttgggtttttgggggaatttttcccccccccggttttttccccccccccggggggggccttttttttggggggcccttttttttccgggggttttttcgccttttccctttgggggggccccgggccccccccttttcggggcccggggggggttttttccccggggggttcccccctttttcccccttttttttgaaggtttttccccgggggggggggggcctttttttttttgaaaaatttttttccccaattttgggggggggaaaaaaaaggggtttccccggggggtttttaatttttttccccccttaaaggggggggttttttggggtttttttttttaaaggattttttccccccccca

SEQ ID NO: 543093 - DNA, 385 bp, Homo sapiens
  misc_feature (17)..(17): n is a, c, g, or t
  misc_feature (154)..(154): n is a, c, g, or t
  misc_feature (189)..(189): n is a, c, g, or t
cagtatttggatttgtnaatatttataatatttgtaaatataaatatttttaagttaaaaatccttgaattttcaataaggtaaatatcaataaaggtaacctttggccgggcccagtggctcacacctgtaatcccagccctttgggaggccnaggtgggcggatcccctgaggtcaggaattcgagnccagcctggccaacatggcgaaaccccatctctactaaaaatccaaaaattaggcaggcatggtggtgggtgcctgtaatcccagctactcaggaggctgaggttggagaatggcatgaacccgggaggcagaggctgcagtgacctacaattgtgccactgcactccagcctgagtgacagagcaagactgtctc

SEQ ID NO: 543094 - DNA, 945 bp, Homo sapiens
  misc_feature (719)..(719): n is a, c, g, or t
ggtggaggttgcagtgccctgtgatcacaccactgcactccagcctgggtgacagagccagaccctgtctcaaaaaaacaacaaaaactcaacagaagtccaacatctaaataaattgtccagaaaataaggaaatgagagaaatcagcagagataaatcaagaaaatttcctagaaccaaacagtcatgttttctgaacaatgggtgaaagggaagttgtatatcaagacacatcattgagaattacccaagtaatggggcaaagaaaaagaagagatcataggtaaagagtcagaattcaggaaggcacaagagttcttggaactagaagaaaatgacacaatacccttgaaatcctgggaataaatgattttcaaccaagccaagctttttgtagctagtcgcactgttaagcatatgtgaggttagcataaagactgtggggaaaagcaagagagatcagattgttactgtgtctgtgtagaaagtagtagacataggagactccattttgttttgtactaaggaaaattcttctgccttgagactctgttaatctatgaccttacccccaaccccgtgctctctgaaacatgtgctgtgtcaactcagagttgaatggattaaagggcgggtgcaagatgtgctttgttaaccagatgcttgaagggcagcatgctcccttatagagtcatcaccatccctaatcttcaagtanccaggtaccccaaaacttggggaaggcgcgaggaactctgctaggaaagccaaggttgtgccaggtttctcccctgtgtaagtttgaaaatggccctggggggaagacacagacgtccccacgaaacctaagggtcgtgtggggatataaaagaagagcgctccctacacaaaaggttttctccgcccgaagagttccaaaagggccctgaagagaccccgggggg

SEQ ID NO: 543095 - DNA, 198 bp, Homo sapiens
ggtcccaagctccaacaagagcagatattggtgagcacatatgtagttgagattgatgccaagacaggattggatgctaagagagaggacttgggcttgaacttggccaaataagtgcgtaaggggcttaaggtctcgataagtgggcaggagagcagcaggggagactggcagtggagaaccccggttgtgctatta

SEQ ID NO: 543096 - DNA, 520 bp, Homo sapiens
  misc_feature (102)..(102): n is a, c, g, or t
  misc_feature (147)..(147): n is a, c, g, or t
tttgaagagaggagagctgatacctgcgtgctggcatggaggtagatgcataggggtacgagagaatgtcgcgaagccgcgaacgtatttacacgcgaaatntatagccctaacggtataaaggcaatattgcaagacctaacgagngtggcctgtcgaaggaaacaattaaagggtctaacaacacgcgagcttgagagtagctttctccggggatagaatgtaagtgaaggaactgtggaagaacagatcccgcagccccgcatgtaatccccatgagggccactcctttatgattagaaggaggggacctcaccgccttaagatacatttaaaactgtatgtggaataaaaaatctgaaaccgtcttttaaaaaagcattaaccagcctgcttcagatcctcgtatcacacacaggaaaattctcttttaaactcatttaccccttctcaaccccacgcattgaaaatgggaggaaaccatttaaaaaaaaattaagaaagaacccaaccggagcca

SEQ ID NO: 543097 - DNA, 150 bp, Homo sapiens
cttggcactgatttcttcgaaaagatatcctggaaagtctactattagtgtaagtttggctgtagcagcaattcctgagggtctccccattgtggtcacagtgacgctagctcttggtgttatagaatggggtctcctcctccggcgggg

SEQ ID NO: 543098 - DNA, 228 bp, Homo sapiens
  misc_feature (1)..(1): n is a, c, g, or t
ntatctcacattattcacagagcaggactccatctcaaaaaaaaagaaacaaaggtaatccatatgtataattgttctaattttggaccagtccagaagttgtccttcaattatttaagtgttatctataattgattcccaacctagcttttttgggtaaatttctttttgtgtgcacagtcctatttttaagggggtcattcattgaggttttcgggccccgtgtcc

SEQ ID NO: 543099 - DNA, 370 bp, Homo sapiens
ttaagacacagcttccatgaaagatgacaggtcacccacgcaaaagacctggaggtggcagctccctgtatgctccgtagtttgtgctgcctcccaggtttacatggagagcatactggcacacagaaaagaatactgatcatagacctgacggggtgaaggggcatgagctataaaatcagtgtcggtgtctagagtgtccccatacctcccccacgggggtcggcgattctgagcattttgtattaatacttcaactcccgagggcccatataacagcaagacaggagccttctgaagagacagaccccatgctgtgccctctcacggtgcctgtactgcgccaggtagaaaccttatcaagaattat

SEQ ID NO: 543100 - DNA, 129 bp, Homo sapiens
acggatgatagaatggtttcctcctcattcaggtccaccttttccccgtgtcatggctaatgggtgcgtcacaccacgtgctctgaagggtgctgcacgctctatgaagactggctgggcagcacggaa

SEQ ID NO: 543101 - DNA, 408 bp, Homo sapiens
ccgattcatgggaacccggagacaaattttgcagtgagccgagatcacgccattgcattccagcctgggcgacagaacaatgactctgtctcaaaaaaacaaaaagcaaaactgcatactataaaccatatatgtatatgtccatatgtacatagaacattgtcttgaaaggtccacagcagcggtgatagagatgaagggacagccttcctccattgcttgggtgtattttccaatttttctaaactgactctacgaaatgtttcagttgacagatagcacaaacctctcaatgattccaatacgctgcccaaaccatgctaggggagaaacagactgtgataagcaaatctccctcagcacacgcctccactgcagggagaccgccatggtcctcccacctgcacc

SEQ ID NO: 543102 - DNA, 232 bp, Homo sapiens
atccttgttatttgactcctcataactgaacatctcagtcacttctcccttgggcagcgccaccaggacaggaaaaccgatgcaggcggggaccaggtataggagggcaggctgagcatgcttgacagatgtgcagtgatgaacgatggtacaggcccagtgccagaagagtgtagtgctgcaaaggcgtggtgtacgaagtacggtgtgaggtattctatcttcaagcgtg

SEQ ID NO: 543103 - DNA, 309 bp, Homo sapiens
  misc_feature (309)..(309): n is a, c, g, or t
attgatccagaagatgatgtaagagataatattttaaaatatgatgaagaaggtggaggagaagaagacccggactttgacttgagccagctgcagcagcctgacactgtggggcctgcatgccatcaagcctgtgggcatccgccgaatggatgtacagcccatacccgctgagcccagtatccggtccgacatacggtccacaccatggaggacattgggtctccattcatgagggaccttatgagacgacctctgccacatgataccaccactgatctcacagatcagtgtctagcatatagagcn

SEQ ID NO: 543104 - DNA, 173 bp, Homo sapiens
taagcccaggaacgatagggagaaggctagcacgggatataggttacaggaagatactactgggaaagggctcccagagttggaggaggtagaaggggtagactaactagagggaggatagactaacaacaaatctataaagacatacaaatagcacacggcacatagagcac

SEQ ID NO: 543105 - DNA, 146 bp, Homo sapiens
ggtgactaaggacccgctgagtgcatataactcagatattgctgtgctttggattcaggttgatgcggccaggatgatcagacctgtgaactacccagaagaaattgtctgctgccctcttccaatccagtgaatgttatatgcca

SEQ ID NO: 543106 - DNA, 188 bp, Homo sapiens
taggtggtcaattgtaatcccagcatttgcgggaagatggcttgggctcaggacttggagacttgtgtctgtgagaaattaaaaaataggctgggtgcgatggctcacgcctgtaatcccagcactttgggaggccgaggcaggcggatcacaaggtcacgagtttgagaccagggtgaccaacaggg

SEQ ID NO: 543107 - DNA, 554 bp, Homo sapiens
  misc_feature (554)..(554): n is a, c, g, or t
aaattttcatgcttagccgggaccattaccgaacagacgactggggataccgatgacgagcacattgacgtgtttagtgtcattttacagggaaacatgcatattcagggtcccatgagacatgacctctaaatgactgccctgcccctaatatttctcccgagaatgactccggggtagggaccccatgtgctttcagtaacaatgtataaccagaacatttttatgactaaggcttacctggagcaagccgtgtaaactagaatggacttttgcaaatagtattcggggactggatagagacgtgtggacttcttgcggttctttgagcgaccaccagggagtgcacagctacctaacatcggaacgggtgcagggcagtacatggcttaagctgctccaggggggctgattttatgcatagtactcagttgtctttacacgttggaatattaccccaggtaacagcatatgccccactcggggccgctgacacacgaggcctatatcttaaaagtggaactggcccttggggtcacttcaagttatggacn

SEQ ID NO: 543108 - DNA, 117 bp, Homo sapiens
tcaggtgcacaccaccacgcccagctatttttgctatttggtagaggcagggtttccactaaaaataaaattgtgccactgcactccagcctgggcaaaagagcgagactccgtctc

SEQ ID NO: 543109 - DNA, 200 bp, Homo sapiens
aaagataaattgtgtaatttttgcctgacaatgctggccacattctgatctgtttcattaaatttgtggtgatgttactctaaacaatttgactatttgaatgtacttgggagtcaagaaaccaaaccagggagggaaataatgttaaataaaatggttcctctctgcaagggaactctcacactctggaggacagggat

SEQ ID NO: 543110 - DNA, 356 bp, Homo sapiens
cggggccttcctttggaaacttgccctgcttgggggcccttttgcccagtttgggcccaattgggttttccccccccccttttttagtttcccgggcccttttggaattgggcccttaagggcctggggtttggttggaaggggttagggggggcaaaccccccctttttggggcctgcgggggggggttggggttgggcccttccccgggggattttttggcctggagggggggttgggatttggggggggggccacccttttttttggaggtgccctttttttttttccccttgggggggtgggggcccccgtttaaatggaaaaacggtttttggccccgggcctccccccca

SEQ ID NO: 543111 - DNA, 1300 bp, Homo sapiens
tttccttgggggcgttgtctgtggctctgtgttttcttgctctgtgccgcgtggtggccgggttgctcttgaatgtctctggctctttttgcgggttttcgcggggcttggcctcctgttgtgcgtgactccctcttggcgttgcccgcgcgcttgggtggtgtcctgtgtgcgtgttcgtttcacgtgttctgactcgcggggcgccttagtgttggctcctttgtcccctgttttcggaatgggtttgcgtggcactcattgtgttggccctgtgtttctccggctcatgtgtgtccgccgcttcgtgtgtgtctggtggctctctggggttcgccccttgtctgtgcttcggttcagggccccaatcgtgttttcccgttggccttttgtttccccttgctgcctgggtcgctgcgggattcccaggttcccttgtgtttggcgccctttgaggctttgtattgaattcgtcggaacccttttccctgggtgcagatcgttaggccatgaatggtttgtcaaagcgcccgaggacgttccttccagacgaaaggtgacgactctgtggtacagtcgttgcttgacgcgggactgggctgtcccgtggctcctggctttcatcgctagcacccatgctgttgtctggtttccctgggtgccgtgatgtgggacgcccaagagctccgcttcctccgagtccccctgtccgtaccccgccgttcgcccgcagcccagtccagttaaggccaggcaacgccttgtacgaactcactctgggctgtaaccgtgcgcatctggtatggttgtggacaccagtggttacgaagatcaacgtcctcactgaaaccatgcgctgtcgatctatgcagcctgcttctagtgtggatcagcccagagcctgttctgcccatcatgtggccccacccaagtcaacgggaagatagcgaggaatgctggactgtgaggcccctggagctcagatgtgcaagagggctgacagcgttcctttcctgtgtgtattctgtccagttcctttagaataaaattggatgcccagaggactcccaatcctggacttggggtcaagaaacagccagcaagagttacggggccttagggcatctgggctgttgttccaattgaagccgactctggacctggcccttacttgcttctctagctctctaggcctctccagtttgcacctgtccccaccctccactcagcaatgtcctgcacgcaaacacttccaccctccaccttccattttccaccactactgcagcaccttccaggc

SEQ ID NO: 543112 - DNA, 369 bp, Homo sapiens
gaagactctcgaggatccccctgtatggggtgcgtgcatgttatgcgcatgtgtgtcctctgactatgagtgcccctgctctgggttagagcgcgtctctctggccacatggaagcctccgctagctgattctacactgtcctggggtcccccagcatcctgcccttacctggatggtgacctcggctgagcttgtcttgcagtctctgcccaggtcctggactctggcgaagaatcgggaaagcgtctggctgaggactccagggggcggtgtccaggtggagaaagtcatatcttcacagacagtgtccttttggctattcgggtgtccatgtctgggcttccagcctgggcggcagcggcagctgc

SEQ ID NO: 543113 - DNA, 338 bp, Homo sapiens
cagagcaagactctgtctcaaaaaaaaaaaaaaaagtaaaataaaaataaaagaaaataagtgactatgactgggtacagtggctcacacctgtaatcccagcactttgggaggctgaggcaggtggatcacaaggtcaggagttcgagaccagcctggccaacatggtgaaaccccatttctactaaaaatacaaaaattagccgggcatggtggcaggcacctgtaatcccagctactcgggaggctgaggcaggagaattgtttgaatccgggaggcggaggttgcagtgagccaagatcacaccagtctgggctacagagtgagactctgactc

SEQ ID NO: 543114 - DNA, 848 bp, Homo sapiens
  misc_feature (196)..(196): n is a, c, g, or t
taaaaaaaaaaaaagtgtttattataggcaacaacaccaaggggaacgggtattggtctacaccaagggagtgcaatttttcatcttccaatgggcgggcctcaaccttgaggcagaatccactgggcagaaagatgcctttctagagaagcagagctccctgactggggctaaagatagtctcagatggatcttnaggtcaatgggtaaagaccttatgtagtccatagaatgtctagggcttttacgggcgctgggtgtcagccacaaagcaagaatgggaagacgggataagatgtgggtgggctccacaaaatccgcgaaagaactataacgcagtggaagaacgagagccctggagggcatacacttgtatccagggaaaccatcagcaacaaacacatctggcgaaaaagacctgggaccatcgggtacacaaaggatccattctcagggacacatttctggggtccccagggttattggcaaagggtcctttggcccttaacagacttgggatggtcatatattaagagggtgactagtatcccaggcattaaatctccatcgacaggacagtgtgacatgttggtggcagtatcaaagtcgtggaagctgagttaaagccagggaacggtgcttggccaaggtcaccccttaagagggggatagagatatgaagagactatgaaataaacacgaggagaaatgatgccctagatgcaacaggtgtgggacccaggggatccccccgcaaagaaaacaggttcagggaaaactcagagcccaaagaaggcatacccatgcgggagctcaaagccgaggaggagaaacaaagaggacagcaa

SEQ ID NO: 543115 - DNA, 107 bp, Homo sapiens
ctgtttggtggtgtcacggatggatgtcccagaacgcaagacggttgtcgttttaagccctcaattccagcttctagtggtctcttcgttccttggtcccgcgcgga

SEQ ID NO: 543116 - DNA, 415 bp, Homo sapiens
  misc_feature (79)..(79): n is a, c, g, or t
ggttttctttcccaagaaaggaataagcggtagaacttaagaacctttttatgtgtgtttaagataccagtccacagtnttatgtttaagaatggcttctcatgctaaataagttagttccccgtatacctttctccttgaggcatgggccagatggattatgtcccattttacaatgactgatggagaattaccacactcttttattgctaaaagtatctcagtgactcagtactttagagcttatgcatagataatgtgataaaataaaggcatggtagatgaaagggtttggctttctttgaggtctgattttcagattttccaattggttactttcccattatttgaaatcctgaacctaatccacatttttaaagtatctatctctacagtcttctttaaaaaggcaaaa

SEQ ID NO: 543117 - DNA, 334 bp, Homo sapiens
tgaggcaccgaacatatcaagactgtcttggctgagcacatcagtgatagaatgcaagaggcgatactctacacatgggcataaatctcagaagaaggcctttaccaagtactgcacgacatggcaggatgaggatggcaagaagcagctggagaaggacttccgcagcatgaagaattactgccaagtcatccgagtcattgcccacacccagaatgcgcctgataccatctgcgccaaaagaaggcccacctgagtgaaaatccaggtgaccggaggcactgtggccgaaaagctggactgggcccgagaaaggattataagcagcagggta

SEQ ID NO: 543118 - DNA, 318 bp, Homo sapiens
cgtttaggcagataactgatattaggcagaagtatatatattgggaaaaaaagatgaattactattaagtggtagtggggaaggaggaggaagctagttatcttaatagaagggcttatacctttttgtattagagacagggtttcaccatgttggccaggctggtctcaaactcccgatcccaggggatccagccgcctcggccccccaaagcgccgggaccacagatgtgagccaccacgcccagcccggaaaagaaattgtttaacctagtatagttatgcatactaattattactttttaaaaaaataagtttg

SEQ ID NO: 543119 - DNA, 323 bp, Homo sapiens
  misc_feature (109)..(109): n is a, c, g, or t
  misc_feature (120)..(120): n is a, c, g, or t
  misc_feature (169)..(169): n is a, c, g, or t
  misc_feature (183)..(183): n is a, c, g, or t
  misc_feature (191)..(191): n is a, c, g, or t
  misc_feature (240)..(241): n is a, c, g, or t
  misc_feature (266)..(266): n is a, c, g, or t
  misc_feature (284)..(284): n is a, c, g, or t
  misc_feature (302)..(302): n is a, c, g, or t
cccaggtgctgtgaaggtgcaaatccctttcttcccttcctcatctcaggctctcctgttttgccctcagcgctccacgtatgcctttgacgctttagtctgttagaanaggaacccccngtgacttgacacagcgtttcacagtctggctgctagcgaccgtgcgggnctgtggtgctcacngtgtgtcntgtgtcatgcgatgcacatgcacggccctggtatggactgtgcgtcacnnccgtcaaccagagcgtgcctccggngccagcttccctccaagngaatgagtggatttcatnacaggatctctttattgcaca

SEQ ID NO: 543120 - DNA, 399 bp, Homo sapiens
  misc_feature (390)..(390): n is a, c, g, or t
tgacaaagaaaagggaagatggagcctccatgctgaacatgcctggtccccaggtagccttttcctattggcatagctgccagcattcatccatgcaagcttccagtttgcttatctatgtttgcagctcaacttttcaggccactctttgttagaaaagaaatgattcgggggctgctttttattaaaagggtaaccttgctgaggactctctttaccctcactaactgcctaatttctttctaggctcctgtatcaaaagggtccccattccaccttgcacaaggcatgagaggggaaggtcccctgtggtaataaaaccctttttaaagggaaaaggtaacttttggaaaatggacccaagccaactttcaatggttttccttggantcttggcta

SEQ ID NO: 543121 - DNA, 293 bp, Homo sapiens
ggtcgacgagcttttgacctcaagtttgaagctgcctttgctcgctggcaaagaacaggacaatcttttgtactggcattgattgatattgatcactttaagagttttaacgacagctatggtcatgccgcaggagatgaggcactgagtcaagtcgcggctctgtttcagcgccatagcaggaactatgactttttcgcccgttatggtggtgaagagtttgtgctgatcctgccaggcacagacacagcgtccgcaaataaaacactggaaaagttaaggctggtagtggc

SEQ ID NO: 543122 - DNA, 179 bp, Homo sapiens
  misc_feature (1)..(1): n is a, c, g, or t
  misc_feature (26)..(26): n is a, c, g, or t
  misc_feature (93)..(93): n is a, c, g, or t
  misc_feature (132)..(132): n is a, c, g, or t
  misc_feature (154)..(154): n is a, c, g, or t
  misc_feature (161)..(161): n is a, c, g, or t
  misc_feature (172)..(172): n is a, c, g, or t
  misc_feature (175)..(175): n is a, c, g, or t
  misc_feature (179)..(179): n is a, c, g, or t
nttatgcagcagcgcgcatggccatngcggatctcaccgcttccaaggcagaccgtgtggtccttggcccatccctgcccgtgctgtaccaanccctgtcgcgtgcggcacgcccactattgggcagcaatncctcggtggtgctgtccaagcnggatccncccacgcaggncgnggcn

SEQ ID NO: 543123 - DNA, 803 bp, Homo sapiens
ctgctcctccatgaggggcatattatttcaagggtattgcttcttaaaaatcttggaaagcctacgagagttgaaggcagcctcgttttagtttcattatgctctgttataaatacatatgcgcataaaactgcttctctcttacactgtttgaactagaaaatcagctctttaatgtaggtgaccacttataagcacaaaagaaacatgtatagaaaaccacatctaagggtgttaaataaaatgtaaacagctcctatttggtagagatgactcatggaaaaatagtgtaggctgggcctgcacgtgtaatgatgagatcgtatatcgcatacatgtgtcacttttaaatactaagtccacacaagcgagccgaatttttagatgacgacgtgcatatataactcgagaatttttgttatctgttgttaagctgaaatgtgtattcatctatcactaaatagcacatagcctttatttatacgtgctctgtatttgggtcacagagtaataatacctcatctaaaaaataaaaaccactactgtgacatgttattaattttaaaagctcgaaaattcatgtagttactctgtgtacatatataatctgggaaagaataattgatgtgtgtatctgccacagttgattaaagcattacacaccatttatcaggatttggtaaacatcccgggcttcttttatctgcttaatcagacatatttttgactgtatgacaagaaagttttacgcccttcctgttttgactctgttgtggattaatagctggatgcaatttttcatg

SEQ ID NO: 543124 - DNA, 929 bp, Homo sapiens
  misc_feature (3)..(3): n is a, c, g, or t
  misc_feature (87)..(87): n is a, c, g, or t
  misc_feature (90)..(90): n is a, c, g, or t
  misc_feature (93)..(93): n is a, c, g, or t
  misc_feature (292)..(292): n is a, c, g, or t
  misc_feature (318)..(319): n is a, c, g, or t
  misc_feature (360)..(360): n is a, c, g, or t
  misc_feature (396)..(396): n is a, c, g, or t
  misc_feature (400)..(400): n is a, c, g, or t
  misc_feature (519)..(519): n is a, c, g, or t
  misc_feature (522)..(522): n is a, c, g, or t
  misc_feature (540)..(540): n is a, c, g, or t
  misc_feature (628)..(628): n is a, c, g, or t
  misc_feature (630)..(630): n is a, c, g, or t
  misc_feature (639)..(639): n is a, c, g, or t
  misc_feature (660)..(660): n is a, c, g, or t
  misc_feature (664)..(664): n is a, c, g, or t
  misc_feature (672)..(672): n is a, c, g, or t
  misc_feature (711)..(711): n is a, c, g, or t
  misc_feature (725)..(725): n is a, c, g, or t
  misc_feature (737)..(737): n is a, c, g, or t
  misc_feature (740)..(740): n is a, c, g, or t
  misc_feature (755)..(755): n is a, c, g, or t
  misc_feature (760)..(760): n is a, c, g, or t
  misc_feature (768)..(768): n is a, c, g, or t
  misc_feature (773)..(773): n is a, c, g, or t
  misc_feature (788)..(788): n is a, c, g, or t
  misc_feature (793)..(793): n is a, c, g, or t
  misc_feature (811)..(811): n is a, c, g, or t
  misc_feature (820)..(820): n is a, c, g, or t
  misc_feature (833)..(833): n is a, c, g, or t
  misc_feature (855)..(855): n is a, c, g, or t
  misc_feature (861)..(861): n is a, c, g, or t
  misc_feature (912)..(912): n is a, c, g, or t
ccnttgtcacccagcagggtcctggaacttcttggctggaatacagaaatccagagtcctggttacctacaacatctattctttacntantancttacaatcatcaaattccaccctcaccttattcttttccttatctattccctccaaaatattcttcatttcctccttcttttctaaatcatccccttctttaattaaaacatcttcaacatccttattttcattttcacaatcatattttaattctttttctcctttttcttttttatcattcacattatctccatantccatctaatatttaaccaattccanntttccctccttatattcctccatcatatttttttatcatcnaatttctatatcatccccttccttaataataaattnttcnacttcataaaatcctccacatcaatctaaattaatatcattttctttattttcttcttttttttcatttatattttctcctttttctaatattatttccaccatttcttcattttcttnccnttcatcttccatcaattnattttattcttcatcattaacttcttcaatattttctcccctttcaataattatatcttccaattcaacattttctccacattcatcnancttcaattnatattcaaattaatcttcatncatnttcacttnatcaccactatccaaaatcaaacttgccatctctacatntccatccatgcatncctccattaatncantttgcatctcatctnttttntgctcttnatctncaccatcttcaattntaaanctaaccatatccaaattncctttgtancatcaagtgtganatcactttctttgaatcattanaatgantgttgatgcctgcccatgatctaaatgactcttgcacttccacatgacctnacttgctgctccataat

SEQ ID NO: 543125 - DNA, 171 bp, Homo sapiens
gaggatcccccgccatttacaactatctgggggtggccatggctaggtttatagatagctgcgtggttggagtaaatgagtgaggcaggagtgcggggaggttgttgtggaataaaaatgataaggatactagtataagagacaggtcccctttaggtggatgcttcattt

SEQ ID NO: 543126 - DNA, 266 bp, Homo sapiens
tggggacccctatcctacttaaaacaatataagtcatagtgttactaagatcttgcttagcgttaagtttttaacgtaattttcatagcttaagattattaagagaaaatataaagacttataagagtcgcattaggtaggctgatcagagatcaggcctcatttaagggaaagcaaagaacaagtcagtaagagagaaactggagatcgaagtttagacagtacctttgaggaattcttgttgtaaaatataggggtttccccag

SEQ ID NO: 543127 - DNA, 273 bp, Homo sapiens
tgagtgattagaggatctaatccacctgtatcttccatcattgggtctcggtctgcatccctgaaagccgttcgtttcacttccttaaagtcattctttattattctgcttaaagagttatttttcaagaagtgctctctggtacatttcaccatgtcacaattttatttctctccactgtcgaacttcctcccacttcagactggtaagcatccaggagggagcctcctagaagcacgtgcccttgacatacaagcaaggctgcccctaata

SEQ ID NO: 543128 - DNA, 1512 bp, Homo sapiens
  misc_feature (1122)..(1122): n is a, c, g, or t
gctgtgagcggggcaacctgatacctgtatccatgcaccttcactgtgggtgactctacgaaggtctactacgattccggatgcgccaggtaacacgccggggatcaggttccaccgggactaggcgcgaatcccgacttgcatattcgggacaacgccaagggcgctaacccactgagattcttccggcccaattgtacctggcgtcagagggtgcaccgaccactcccgaggaggatagatggaagtcggcatttcttgtgtgtgtccgcagaggcacgagcgcatggcactaagtaatggtgaggcaagtgcagagacggctagcgcgcggaacgatgcgtactcgtgcacggctacgcagggctgaccggtagggcggagagggccttgaggcctctgggcctgcactatgccggattagtaatttcgccacccacccatggcaagctcaacacgtggcgtggtaaggtccttgcccaaatctattgcgcgctagatcccaatgcccagggcaaacaagaaggcacaccaatcgggcgaccttggaagggaggactgtcccgaagggtatcgcaaagggctcgaggcgcggagaaaaatcatttcgcgcgccatgacctaggggacctggatgccatcggtgttgagaagcagaaagagaagtatgctcatttgactttgagcatggagagtccgcaggaacgaaagggtgcacaccacgtatgggagcctagatggatgtctagtggggatggggttcaatggcagggcacagtgggccatggaatgggacatcccttggtgaacgaccagggtggtccgtagaaatggctcgtggggaacccactgcgcgagggaacatttctacaccgcaaaagggttacgcgagtagggcagcttcgcggtatttcgctgcgaacccattgccaaatctgaactctaagatccgcggtaaggtgtgcgcttggtgacctcgtcccttgggagagcagtaccgttggaaacaccatggatcgagggcacgtacacgcaatgttgggcaccagctttggggaactcgtcttgaccaacacgagtctgggcccgtgtggacaccacaagaatcttgaaagaacacgngcggatcattggcacgcaacggggagagaggtcaatcgacaggagcgcttacaagttgcgaaagaagacgggacaacttgccgaaacgtcccccctggggagttgatagacctgcgcatagggaagggggagtaaacacaaggtgacccgttctagggtccacccggaccactgttgataggacggggacgcacctaggccctgctactgttgtggcacttgcttgggaagtacttcaaggctaggggtgcaagagacacaagcggtttgcaaatgtaaaggcgtgcctgtcgggttctagcacttgacacagcaaggaagttataacgtagtggaatacatggggcgtacatagtgtataaaggaacaggacaagattctaggcccatg

SEQ ID NO: 543129 - DNA, 148 bp, Homo sapiens
gggacactgccagataaagatgaatggacaccagacatgcaccatcaggaaccacgcacctgatcctcacccctgagaaagagccccggggcgtctgattatatccatacagaaaacatctggatttgcagccaaatgtggctacacg

SEQ ID NO: 543130 - DNA, 125 bp, Homo sapiens
cacttttctagaggctaacatactgccactgttcaggtggagactgagcaaaggaagtcctgggctgtgccagttcccagagcttcagcagaaagagctgcagctgtgtgcctgggaaccatcag

SEQ ID NO: 543131 - DNA, 117 bp, Homo sapiens
cccacttccattatcgggcaagagcctagaccagcactcccataaattatctccgacaaattgtcctgccgtgtcaaggtcccacgactacttttgagtggatgatcgactggagtt

SEQ ID NO: 543132 - DNA, 867 bp, Homo sapiens
gggggaaccgaggtggggagtcgccagagctcccagactgcgagcacgctgagccgccgagcgtcacccgcgccgcgtcacggtcccgggccggcctcctctgaccccatccgctctctccgttttccccctctccctcctcctcctgcgagcgagcagtgacttaagcagacggagctgcggatgaatgcctcatttgttctccttcctcgcagccgcgccagggagctcgcggcgcgcggcccctgtcctccggcccgagatgaatcctgcggaagaagcaggagttcaaaatcctcctggtcaccgattcctacaaggttactcacatataaacaatatccacccaaaacaagcaaagtttaatgcctactttgaattgccgctgacaacaagacgaacagacaacagtccaatatttaaggacggtgaacactactgacgggaaacagtacttatgatgggttgcagtacgatcttaaataagtacttaaaaggctaagtagtaccaaagagaaaatccaggaagccaaagtatgtctacagagaactttccaaagatgatgtctttacatgcccacgggcgctggcacctacattcctttgagacaagtatgattgggccttcttgccaagtagaaattcaacatgcttgtaccttgagtgcttttgtcaagttccacagagcgacaattgttctctttcacgcgcgggcgacaacaccgggttcaacaggtgtctggcgttagcacttgggattgagacctattctggtgccgagcctggtatcacattcccagggggcccaacatcttgagcgcacaaggcacttgcgccgtatttttccacgtctggtgcccaaaggtt

SEQ ID NO: 543133 - DNA, 562 bp, Homo sapiens
  misc_feature (54)..(54): n is a, c, g, or t
  misc_feature (380)..(380): n is a, c, g, or t
ttatcagtgtatatgaatgagacaggaaaagcagatatgttgaccaggaagaanaataagagaaattagagagatcaggcatttcttctatctgcctcagaaagcaagatggtgctaacaatgggatgtgctagagggctggaatatttgaggatggggtggcaaaaactggaaaaagatttttaacagaaagtcagagatgccaaagattaccttcctttttattcagacaaactatcctgtaaggtcgcgtaaggatgtggcctccactcacccactcccagcccatttttgtgccagtcttgccatggtcttctgggtaatcctgaaactaggactctctttctcaatcagccaacaagaagcctagtgagagccanaggaggacaactgcagcatcagtcaatcagcaagtgtgggggactctggggacagaatttagaagatctcctttctcttcattacttgtcttctgtgtacaatgctttattaccttcacataagcaaagggcttggtggagagcagagagcaaatagataatataagaatctcacccccaaa

SEQ ID NO: 543134 - DNA, 899 bp, Homo sapiens
gtcagaccccgagagtacagatgatggcagcctgagcgaggagacccccgcacggaacaccccacactgactcagtgacccacagctcagccctacacccacagcagatacgccgaaatacgcatgaactgtgtctgtgcccgatctggggcattcaaggagaagaggacagaggcgcggacatcagatgaggagaatgggccgacctctatcgcccgacctggaccgccatcgcggcgagcatgcagcgcgcatggatgcatgcagagaggccgaggacacccaggatcatcggggacctgccacggacacgcggcattaacacccagcgacattccagaagcatgaagcagaaaatatagaagatccagggagggagcgccccgggaccgcgatccagccacagaacacaaaataagaccaccacgaacacaaataccgaggacactgaaaatcatgagagacgaatccagggaacccgagacaatacataagacagtataacacaaaatacacaagagaatagtccccacacatcatgaacaaatcaccaagacacgaacacataaacaaaacaaacagaaccatgaccaagagaacagaaaggagcgagacatacatgtccaccagaaaacaccagaaaaaagagagaacatgaacaggaacacacaacatccacggcacataacaagaacagagacataccaccaaataaaaaggcagacatagagaatcgagacagaaagttcaatacagacaacataaaattggagtacagcactcacataagcgaataaccggacaaaacgccgaacaaaaggagaattagatcgaccacgagcaatatgccaccacacaccccataagtcacaagaacaggaacaaatcaaagaatgaga

SEQ ID NO: 543135 - DNA, 339 bp, Homo sapiens
tttctctctttaacccaccataaagcttttttaggggtttcttcataggattttccatctttttcaatatccacatttggattagaacctttaagtgacttacctgctggacttgcatgaaataaaggtataactaagaatcccatttaacttattgcagtttaataatatgctggagctaaagcatttccagttgattctactaaccatgatgcaattaaaggcgtagtaccaccaaataaagaaacagatatgttaaatgttactgataatgtacgatatctgatatgtgtatagaacattgttggtaaagatcctggcattgttgcttgtcgacgc

SEQ ID NO: 543136 - DNA, 122 bp, Homo sapiens
atccgcccgcctcggtctcccaaagtgctgggattacaggtgtgagccaccatgcccatcctgttattccttttaactgctgtaattaaatgaaccacctaaaaatctcttttaattgcaga

SEQ ID NO: 543137 - DNA, 465 bp, Homo sapiens
  misc_feature (51)..(51): n is a, c, g, or t
  misc_feature (68)..(68): n is a, c, g, or t
  misc_feature (143)..(143): n is a, c, g, or t
  misc_feature (169)..(169): n is a, c, g, or t
  misc_feature (171)..(171): n is a, c, g, or t
  misc_feature (187)..(187): n is a, c, g, or t
  misc_feature (222)..(222): n is a, c, g, or t
  misc_feature (237)..(237): n is a, c, g, or t
  misc_feature (245)..(245): n is a, c, g, or t
  misc_feature (292)..(292): n is a, c, g, or t
  misc_feature (322)..(322): n is a, c, g, or t
  misc_feature (374)..(374): n is a, c, g, or t
  misc_feature (425)..(425): n is a, c, g, or t
  misc_feature (457)..(457): n is a, c, g, or t
cgccggttcccgactgtgtctcggcacgtggcagcgcgcctggccctgggnttggaggcgccggcccntggatccgccggcgtggtcgccgagtcggtgtcgtccttgaccatcgccgacgcgttcattgcagccggcgagantcagctccgaccccgccgcgccccgntntcccaggaggttcatntgctccttcctgactgcagcgcaattacagcaaanctggaagcttgacgncacctgtnaagcacacgggggagagaccatttgtttgtgactatgaagggtgtgnaaggcttcatcagggactaccatctgagcngcacattctgactcacacaggagaaaaacccgtttgtttgtgcaagcaatgntgttgatcaaaaattcaacacaaaatcaaacttgaagaaacattttgaacnaaacatgaaaatcaacaaaaacaatatatatncagttttg

SEQ ID NO: 543138 - DNA, 329 bp, Homo sapiens
taaatttgcggccgcgtcgacagaatgtttagaaacagtagatgtttagcccgggcgtgatggctcatgcctgtaattccagcactttgggaggccgaggcgggtggatcacgaggtcaggtgttcgacaccagcctgaccaacatggtgaaaccccgtctctactaaaaatacaaaaatgagccaggcatggtggtgcgtgcccgtaatcccagctactcaagagtttgaggcaggcgaataacttgaacctgggaggcagaggttgcagtgagcctagatcacaccactgcactccagcctgggcaacagagtgagactctatctcc

SEQ ID NO: 543139 - DNA, 272 bp, Homo sapiens
gccttagtgcaggtcaccagtgatacgttggcagtacgggacacgggaaggcatgccagtgagcttccctgtcagctcagtgatgagcttgcccacagccttggcagcgccagtagaggcagggatgatgttctggagagccccgctggccatcactgccacatgtttcccgtgatggggccactccacacgtctatctggtgtggccagtgcattggccttggcacgtgtgtgtccatgcagtccccttcccacttgtctgtggctcagtc

SEQ ID NO: 543140 - DNA, 872 bp, Homo sapiens
cgtggtgtctcacacctgtaatcccagcacttggaggctgaggtgggtggattacctgagaccagcctggccaacatggtgaaaccccatctccactaaaaatacaaaaattagccaggcgtggtgattctagctacttgggaggttgaggcaggagaatcccttgaatccgggaggcggaggttgcagtgagccaagattgcgccactgcactccagcctgggcaaagagcgagactgtcttaaaataaaataaaataaaaataataaagcagatgtacaaaatgtgcaaggggatatgctgttttcaaaattattttgggtggtacaggaggcaagagtttgaagactctcttttatatactgatatatggcagtgccaggctattccagaggcaggactgtagcaggtgaatgtcagtctccgctggaatgaaccaatcaaccaacggaaaaactcagctcctatgtgctgcctgcgctgggcggctggagtttcaggctgtaaggcaggactcttaaacgcccactgatgtgactcagcaacaattggacaatgaagaggagccacaactcacctcatttggcacaaatgaaactaggtttggagatgacagaactgcataatgaaaaggaatcctgatctatttcatttaggaacagagcggagatctagttgaaaaaatcctaagaaatctgtactgtggaggaagagaagtcggtgaaactcagttgggtggttgtaccggggaagccgcctcggccatcaggagcttaaagggttttctaggagaggaaatcccctggtgggtaagtcaaaggggggggggttttggggggggcaaaaaaaggccggcggggtgtggggcccgg

SEQ ID NO: 543141 - DNA, 1123 bp, Homo sapiens
ggggggaactgggttccgggagccctgggtccgcgtggcgtgggtggtcgcgcgtgtaggaaggaactggtttcggaggagccctgggcggggcggctgtggggaggaaggtgacgtgcagggggaccagaggctctgcgagcgtgcgtcctaggacagctcatctgtaatcagaaagaaaatagataaagatacagaacggctgacgtcctccgtgagacggatcggggaccttagcacgtgttaatcccgtcccttctgatgcgctcggtgtgcactttgtagagctatagcgtgtttcattggacgtgtctagcgtctcgcatccagtgtccttgatgtggcttttagagacttagcgagaaaggttggacacaagcagggaacttgattttttaagaaaaaatattacattttgaggacatttttgacaagtaggggagagagagggcttctgttgtttggtctgtttcgtataactaaacctgaaggtattaatttccagcgaaagacactggtccctcaggagcactcaggtacagctctgccagggacagagtccctgctagtgggaggtctcaggtggggcggtgtgttctggtgccgtgaggcagcgacatggtccggatggatgtcgtcaccagccttcctcaggtctcatcacctggtcgtacgccaggccgactcttcccagcaggggtcgccagggactgccgtttggatcctgagtcttaatttacttttccgtcaacttaccgatttggagacatttggcattaaagggactcatttaaagtgtgcagcagttctcccagggcggattccgggacttatttgtccaaaaccgattaaccccagggggaacccgtctgggagacaggggtcctggtgtccaacaggactaagggaggggaaaaccctcagagatgactacgggaagagcacaaggggaaaagtaggggggcttttaaaacatgggagggtctactaaaccgaggctgtcccaacggaagccacccataagaaaaaaatgacgcgtatgagtggttcctctttgcttcctctgcttctctgttctttcctccttctcgaggaagcaaaagaagaagaggagagacaaaca

SEQ ID NO: 543142 - DNA, 245 bp, Homo sapiens
gggtcttcttttcttaacagtgttggacggacagatcggggactctctttcagcctcgaccgccctcgattttctttcgcttgcaaccctcgggaccaatttcttggccaatttcgtcttctgggaccgccagcaccgtttttgggtaggctcttcttgccaaccaaccatagcctccagatctgtcagaaatatttcaccgacggtgagggagccgataacagcctggctaattgttaccttca

SEQ ID NO: 543143 - DNA, 451 bp, Homo sapiens
gggatttttcattaaacatccctcagataatttagctatatatcattagaaagggaaagctatcatttttattttaaaactaaacaaggccatcttataaacggtcaccaaagtctgggggggttttattgcgtgtgtgccttgagtgtcggtttacatttaattcactatgttttcatgtattttctgtttggtggttatttcttgtggggtgggatgttcatattatgtttgagagggtaaaaatgtatgagcagcttaactgaagtagaactattcatgatgcttttcacacattgtggcataagatgtaaagtttgtaattaatgttaatttctgtgcattttaatattcttttataattattaatgttaatttctgtgcattttaatattcttttataattatgagcattttaataaattcatttttacaaacaataaaaaaaaaa

SEQ ID NO: 543144 - DNA, 120 bp, Homo sapiens
ccggatgtatactatttgcgcttactttgtagccttcatcagggttttggtgaggcaggtcttgtgttttatttgaaaggacaaatgagagaagtgcttttcatataattttataccttt

SEQ ID NO: 543145 - DNA, 466 bp, Homo sapiens
ttgcctcaggtctcccaagtaggtggaattacagggcatgcaccaccatgcctggctaattttaaaacactttttatagaggacagagtctcactattttgcctaggctggccttgaactcctgggctcaagcaatcctttcacctcagcctcccaaagtgctgggattacagacatgagccaccatgcctggccaacattaatcaatcttaagagtggaacagcaatgtaagttgaagaatcacttaaaagttgctatgagaagcctcctattaatcacatattctgggaaatgactcctaagttccaaatgtaaggtgcttttgttaaggcacgtaggggaaaggaaattcagttgtgtccagctgggattttcaaattaaagggccttctcactaggggtattaagccaactgtaaaatcaatcaaccccgctaaattactcaaaaggacaggggttttttag

SEQ ID NO: 543146 - DNA, 792 bp, Homo sapiens
  misc_feature (767)..(767): n is a, c, g, or t
cgctctttcctttcgcgccggttgccgctgcggagcgcggcgggtccatgtgcgcagtgagtggcgctattcctggcccagtagcacccgagccccgggtttgaccgagtccgcgctgcgatggaccccaacaccattatcgaggccctgcggggcaccatggacccagccctgcgtgaggccgcggagcgccagctcaatgaagcacacaagtctctgaattttgtctcaacactgctccagattactatgtcggaacagctggatttacctgtgagacaggcaggtgttatctatctgaaaaatatgataacacagtattggcctgatcgagaaacagcaccaggggatatatccccttatactattccagaagaagatcgccattgtattcgagaaaatattgtagaagccattatccattctcctgagctcatcagggtacagcttactacatgcattcatcacatcatcaaacatgattatccaagccgctggactgccattgtggacaaaattggcttttatcttcagtccgataacagtgcttgttggctaggaattcttctttgcctttatcagcttgtgaaaaattatgagtataaaaaccagaggagcggagtccattgggtagcagcaaatgcagcattttcttgccagttctaaacggatcggtttaatcccagcttctttcgaccagtctgatcagtctgtctcatccagaaacagatatccagatcttctatgcccttggtccggatcacaanctggacttgtaccagaacctgggtg

SEQ ID NO: 543147 - DNA, 738 bp, Homo sapiens
  misc_feature (23)..(23): n is a, c, g, or t
  misc_feature (181)..(181): n is a, c, g, or t
  misc_feature (188)..(188): n is a, c, g, or t
  misc_feature (192)..(192): n is a, c, g, or t
  misc_feature (233)..(233): n is a, c, g, or t
  misc_feature (238)..(239): n is a, c, g, or t
  misc_feature (279)..(279): n is a, c, g, or t
  misc_feature (309)..(309): n is a, c, g, or t
  misc_feature (317)..(317): n is a, c, g, or t
  misc_feature (322)..(322): n is a, c, g, or t
  misc_feature (326)..(326): n is a, c, g, or t
  misc_feature (332)..(333): n is a, c, g, or t
  misc_feature (336)..(336): n is a, c, g, or t
  misc_feature (385)..(385): n is a, c, g, or t
  misc_feature (433)..(434): n is a, c, g, or t
  misc_feature (444)..(444): n is a, c, g, or t
  misc_feature (457)..(458): n is a, c, g, or t
  misc_feature (462)..(462): n is a, c, g, or t
  misc_feature (464)..(465): n is a, c, g, or t
  misc_feature (467)..(467): n is a, c, g, or t
  misc_feature (553)..(553): n is a, c, g, or t
  misc_feature (564)..(564): n is a, c, g, or t
  misc_feature (594)..(594): n is a, c, g, or t
  misc_feature (607)..(607): n is a, c, g, or t
  misc_feature (664)..(665): n is a, c, g, or t
  misc_feature (724)..(724): n is a, c, g, or t
ttactaagcaatatagagtcagncaatattatctttccccttatgatcttttaagacagccactcaagttagaagagtatgatacaacattagagaaagaaagatacaaaggctttattcatgtgtgatagtaaaaatcaggatgagtcttagatatacaaaagataaatggctatttaanatagttntttntgcttttttagcaaaatattcgcgtgttaagtatttctggntcttnnaatacaaaatccacttattttattagttaaaagtagaagnttgaaaagacaaagtaatattgttttgagnggtaagtngggcnaaanttgggnngcntgtctttgttgttcttcctccattctaaactgctaattatccaacaganacccctaggtcatagtttacgtttctattctcattaaagcaaatgggnnactggggaangaaaaaaaaaggnntatngnntnggggcggcggtcgcctttcggtgtggtccatcataaaaaatatggtttgactcaatatttctatgacataaaatttaaaatctggnagccaattcantagatttctccatgtttgcacaaatctaanttctatttttggntcactaatttggtagtttataaaaatgctggaaatgaaattgtgtctagactaaatnngggagtatgttctattttaaatatttagtttgaaggtcattctcacttttttgcctgantctttcagcgtcac

SEQ ID NO: 543148 - DNA, 101 bp, Homo sapiens
acggccgtgtattactgtgcgggaggcctcgggggcgccaatgtactaatggtgtatgcttttgactactggggccagggaaccctggtcaccgtctcctc

SEQ ID NO: 543149 - DNA, 132 bp, Homo sapiens
aagataaatttatgctgttgatcctacaaaacaagtacagtgatggaaaataaatgggaggtcataaggataagacattaaaggacgcagtagaattggcttataagatgatggatttagaagaggtactac

SEQ ID NO: 543150 - DNA, 698 bp, Homo sapiens
tctatgcattcaatatcaatcgaagcacagagaaaagaggctaaatgctcaatgaaaatcctgttctcttgacagggtgggggttttactccaacgaagaacaagaacatgctaattatctgctggactgtaatgcctgtgtcttactttcatggagggcatggatgctgttaaaattgctgttaataacactatgcaatttgacttgcagcaacaagttttttaccctactacgcaaaacaggtattgttatatattgacccgcaacgcttatatacacaagctgcgtattcatacataacagctttccgttgcttttttgatgccttgcgcttgctggtcacaagctcaacaagtgcagattggtgcacgaattagctctccgtttaatcatagcgtgatatattctgtctggaatgagaagagtacactatttatactttctgcgaacgggttgaatatccaatttcatatgcttaactcaatgatcgcctgctcaccggagattgtgctgcataacttcgtgtctatgacacttagctgacgtattctcatggaaaacacattaagtggctttggtacccctggtggaaagaccttttggacccgcgcatttcattgcgcatgatgacttttcaccgacagattggagaacacttttttctttgttttggtgtaaacgttatacaaaaaaaggg

SEQ ID NO: 543151 - DNA, 212 bp, Homo sapiens
aacccgggccggtagagcggctacagaacagaatagaacagaacagaatagaatagatagaacagaacagaatagaacaaacagaatagaatagaatagaatagaacagaagagaatagaatagaatggaatacaacagaatagaacagaatagaagagaatagaacagaatagaatagaatagaatagaacagaacagaatgtaacggaat

SEQ ID NO: 543152 - DNA, 112 bp, Homo sapiens
tcatcgagctcgcacggtgatgcgctctgaatcagaacggaatggaaagtcgccatagctggtgactagccccgatatgcgaaagcagtattgtggaactaggtgtacgaca

SEQ ID NO: 543153 - DNA, 431 bp, Homo sapiens
tgggaacggctctgccggcccaggtgcctcgcgcatattcatggaggccgcaggtagaaccgagtctcactgtttggggaaatgcctgcgatctcccggagatagaaaggcgggaagtttattgaggagcaggtacagtttccctactatctcctgcagtacatataatctagtctatcttcagactatatttaagcgactgcttcatgtatgatgtctcactcccacatcctacatccattgtcaggcaaactttctagatagcaccgtgacccatcctttcaacccccaagcagccctttcctattatctggtgtccgtgtactccccagtccctcctttcttcagggccctcgctttatcaccttcatggacagaacatacttagatctctctaaacctgcggtttatacctgacacgcgtacagtaa

SEQ ID NO: 543154 - DNA, 343 bp, Homo sapiens
agtcacactatggagcagctgagccaggatttgaacccagcagatctccagacccagactggtccacccggggcccagccatggttccctgggtcctgatgggaaaagctgtgtctagcccggagatgaaccagtttagggaccattcccttgagcgcgtacgggctaatgaagtgtcgatccagttgtgctggactccctcaaacaccaaacttttctaaaagcagttttcttgtgcacatttaaaatggatgtttttctgaaatgtaatatgcactttctcatcttcttaaacagaaaaatgcaagaagcatgcaacctttgctgttggcttgaattgttt

SEQ ID NO: 543155 - DNA, 357 bp, Homo sapiens
acttcaacctgcttcgcatgccttggtgccgacgctttccgtaccagccactacctctatgcagaggcagtagatgcagatgtgataccgctatgggattgtggtcatcgatgagtgtcccggcgtgtgcctggtgctgccgtagttctacaacaaggtatctctgcatcaccacatgccggttatggaagcagtggcgcgtagggacaagagccaccccggtgtcgtgatgtggtctgtggccaacgagcctgcgtcccacctagaatctgctggctactccttgaagatggtgatcgctcacaccaaatccttggacccctcccggtgcaggtgtccggagcaggtttgggacat

SEQ ID NO: 543156 - DNA, 314 bp, Homo sapiens
tacaaatgtttgggctttacaggcatgatttcacggattcaaacaagaaattaacactgttatttagccttctgcatgacatacacagaaataacattgctacaaactgcaatggagagaatcttgtttcaaatggcttaatttggggttttgactcaaggtctcattctataatgaaagctccattttgagggtttgtcaaattgtgatactattttagcacataacagaatttcattgtgactatattcttaatatataaactaacgcttaatacgttgtgtattaatgctgtacattcattatatcaaatg

SEQ ID NO: 543157 - DNA, 1817 bp, Homo sapiens
  misc_feature (1437)..(1437): n is a, c, g, or t
atcattccctctaagatagtgttggcgcgcggagacaacactctgctcctgcggttttttaagcgacgtcccttttgggttcggctcataaaatttgcttgctggttgatgttgtttggtgcgtttggtcgccgttgaatattatgatttggttgttgcaccttgtgtgtttatatacttctgccgctccctaaactaatgggggggggcccaatcatttgtgttcaccaacatccaaaaggtgggggcctcattctctcccccgggggatccgtactctccactagttttttggggggggttgttgttcacgcacctcctgcctaaagtgacatagatgatcgtggtggtgtggttctctttttgaggatgtgctcctcgtcctccgttgattgtgggaacaaacttttgtggcgatactcactttattatgggggccggccgggggctgcctccaaacttatgttcccctcaccgggaggatgtgtggtgtcctctatctccccttcccgtaaggggttctatcaatttctccgtgctctagactcttctggggtgggtctgccctcggggcggttttctttcacgccaactatagtgtgtcgccttgtccttggctgcttccctggatgacaaactcattgggggctactctgcggccctgccgaggagggcggttggtgtgatcactctctcggcggggcgtggttgctatatatattcgccctctcgcgacagtgttgttcttttgtgggccagtcaaacaatccccccgtggttctcctccagcagtaggtgtagttcctggggcgcccccacaacacccctttttgtaggagagaggtgttgttaccccgcatcgaaccacaacacattctacgcgcgttggtgcctcttcggtaggtgggaggacagacctttgtgtttgttaataactaacacctcggcggcgcctcatctcttggtaggtgcctcggcgcctgcatatgtgtgtctctggaagagccgtgtttcttaacagcccctcctttattgcttcttcgtggcgtcatgcgtatgctcctccacctcacctttggtcgcgacaccacaccaacgaggggcaccccgacacacaacttttgttgtcgcctcatcgggatcttggagcccctcctcctcgaggcatgtttctctacggggccgcccatatctccacacaagacgcggggctctctctgatatagtgctcgtggggtttttctccaccttgtggcccacctgtttgtctctcaagagccctcccgtggaatctccccaattggcgcacagagaggccaacgtttcacaacaagagggtctcaccccggacactcgggtatctctctctttacccgaggtgcgacacctctccgcggcgcagagtgtatacccgcgcgctctcttcttgtgggcccnccctgttcaacacttgttatagagaggcgctctgtgatacacacactggagaacctctcgcacacgcgtgtacttctcgcgagtgtgattctataagacccccagattaagagtgtttcacgaggactggtgtaaacgcgactgttctattcaagattaagaggcccccgctgtctgggcaccacacacccgctgtctggaccgccgttccaccgcacactttggcgccctggcgtggagaccaccaccctgcccccctaccagaaagacccagactgggttccccggacagcccaacaggggcaccaccccagaccttagggtgcgctcccaacactgcggggcttttttgccaataaaagttcacgagcgtttggaaa

SEQ ID NO: 543158 - DNA, 162 bp, Homo sapiens
gtatctagaggatcgcttacgggttgtgcatcccccctcaccccactgcttcagggtgctaggtgagggatgtttttcctcccccttaccgcccatgccttgaaagaaaagtcactttttgtggagggcatcattcattccggattcacaaacccggaaggt

SEQ ID NO: 543159 - DNA, 280 bp, Homo sapiens
cgtcgttgtactgagagacgttacgcggtttcgctgactattctgattagcgctctggcctttggcagcgaagtcagatatcgataactttccgccggttattcagatcgggcaggggaggtcgcggcggcacgattgaatggtgcagcaagcgatgttcgtaaggatcggatttccgataagcctgtatggtattcttttaactatggggcttgtttttttggggaatcgattctatgtaacgtcaacagacacgcggtgcgtggggctgaatcttcag

SEQ ID NO: 543160 - DNA, 133 bp, Homo sapiens
ggcggaccgtcggtctctgcaagacagttcattttgttaatctcaaatctgtttttcagcacagttcttaaagtagaaggagatatgctcagttcttcagcgatttccttttgttttatttttacctgcatat

SEQ ID NO: 543161 - DNA, 114 bp, Homo sapiens
gcggccgtctactactactactgctcgaattcaagcttctaacgatgtacggggacatgaagatccccgcgcaattcaacgccttctggcttccaggtgatgactgggccccca

SEQ ID NO: 543162 - DNA, 142 bp, Homo sapiens
aggttatgtcttacggagtgtcagtctgtgctggctcagccctcccccagcaccggaggagggccccgtcagccccctctactcctgaccttctcagtcccacccaggtgagccagccacgtgggtcttgcgctgcaggtct

SEQ ID NO: 543163 - DNA, 167 bp, Homo sapiens
tccagaggacgggggtaggaaatgctccaggaatctgaggaagtatcactccgcttctcctgctcaatggtcgtcttgggtcggcagggatgttctatcatcctgacgctgtccgtatgcttcagtgtggccgtatcgaagctggcgatttcccccatgtctggttt

SEQ ID NO: 543164 - DNA, 184 bp, Homo sapiens
cagcatgtccagcacgagcacctgactcgcgctgggatcagcaggcagaatgtgtgtcctgcgtggcatggtactgtggctggtgacctgcccgctgccccagacacggcacctgacctggaaagacgtcgcccgcctcgtactggaagccggcagcctgccataatcctgacaggcctgggta

SEQ ID NO: 543165 - DNA, 1143 bp, Homo sapiens
  misc_feature (254)..(254): n is a, c, g, or t
  misc_feature (603)..(603): n is a, c, g, or t
gatatagacgggataccgataagagtaaagacgcgactactaaaaacaaataaatagacccaagacgagacgcgcgcggaggtaaacaattcttctaaacccaaataaatactgacttatttaaggatcaaacaatgaaagcctattatccttcctatactaaatacaagagactctagagacctaaataatcaaatcctacgctaagaatttaataaatacagcgctaacccacgaaaaatctcttaggaatnaaatcgagctcctggatactcgaagaatatgaatccctcaaactatgcgaatttaaatagaggctcatatccgctgatgaagacaaaccataataatctctccacgatggaaattagataagctacgctaaccaagacgccatattataccgactcatgattccaaataataattaggactcctagcaagaagggaaggcttataacgattattttattggggtaggaatctatgagttcaactatatacacgaagtcgaataaatagttagttagaatggtattcatggatggaaggtaggactactggacgcaattaggcattacctatttaagtttataaaagctnaggtggaaatgaccttggatagtattagataaactctatatactagtcaattgatcaattaaaacgacacagattacatcacgattagatcgaaattcatatttcaaactattgctacttgttgagattcgagcaagacgtggtactattcgcgacaataattagagcgggatttcaattaaaagtgttgttgaggtattctttataaggcaataacaaaaaattaagaaaaaaaaaaaataagaaaaaaaaaataaacataataaaaatattaaataataaaaaaagaaaaggaatacaataataaaaaataataacactataacaaaaaataattatatatagggcgttaatcgggatacgggacggaaggttatattgagagaatcacacggtatgacataaacacaaacatagaaacacattacatatatacatacaggatagagacataacaattaaattatacttactaaaacaaaaagaaaaaatataacatatatataaacagaacatagaaaaagactaacgaaaacagag

SEQ ID NO: 543166 - DNA, 346 bp, Homo sapiens
  misc_feature (153)..(153): n is a, c, g, or t
  misc_feature (172)..(172): n is a, c, g, or t
cattacagacaaggtcctcatcacaagcccagaatgatggttgtccttattttaaaacacttatgttgggctggttgtggtgtctcatgcctgcaaccccagcactttgggaggctgaggcaagagcatagcttgagccctggagttcgaganccagccctggcaacatagncgagactctgtctctacaaaaaatcaaaaaactagctgggcattttggcatatacatgtggtcttagctacttgggaggctgaggtgggaggattgcttgagcccaggaggttgaggctgcagtgagctgtgatggcaccaccgtacttcagcctgggcaacacagcaagacct

SEQ ID NO: 543167 - DNA, 185 bp, Homo sapiens
caggacttaacatgttgactttcgccaggctaggagtcaagtggagctgttgctgcctgcctatgccagagccacagcagtgccagatctgagatgcgtcttcgaccaacaccacagctcatggcaacgctggatccttaacccactgagcaaggtcaggaatggagcgaaagtcaacgatgtgt

SEQ ID NO: 543168 - DNA, 659 bp, Homo sapiens
gccacagctacagcaatggaagctctcgcctcgtcgccgcgggctctcttcgcccgcaccgccactccgacgacggcgctggccacgccagcaagatggacgccgtcatcgaccaggcgtgtcaaggccgccgccgccgccgagccggccggcgaggccaagccggctgcggcagccgcgtcgccggcgcccaagaagatcctcaagaagaagcccgtctactccatgaagaaagggcagatcgtgcgcgtcgagaaagagaagtacctgaacagcatcaattacctgtcggtggggcacccacccttctacaaggggctagactacatatacgaagaccgcggcgaggttttggacatcagaatcttcgaagaaaccggagagtatgctctgatcgcgtgggtagggattccaacaccaccagcatggctcccaacttatatgctcatcaagtcagacaaactcgactatgagaggatatgatcgccggatgagcgattgcgagggagaacaatgttttgtgcatcaattgatgtcgctatgtggtgatgttgtgacattgctccatggatacaagattaagcagttgtaaatcgaagaaacaacagtgaaatatatccaaagttgttaaaaaaaagagaaaaaggacgcaaaagggg

SEQ ID NO: 543169 - DNA, 158 bp, Homo sapiens
  misc_feature (9)..(9): n is a, c, g, or t
tttgggggnttggggcccccccccccgggccggtttttcccttgggaaaaaatttcttttccccttggggcggggttttttagggggggggggttttttcccccgggggggggggtttttttttttttttaaaaaaaaaatttgggcgcgggggaaga

SEQ ID NO: 543170 - DNA, 241 bp, Homo sapiens
tatgtaaaaaccctagcgtgggtgtggtggcacatgcctgtaatcccagctactccggaggctgaggcaggagaatcgtttgaacccgggaggcagaggttgcagtgagccaagattgcatcactgcactccagcctgggcaacagagcaagaccctgtctcaaaaacaaaaacaaacaaacaaacaaaaatatatctattcttgacaattgctatgagagtagatttcagttgttcttac

SEQ ID NO: 543171 - DNA, 903 bp, Homo sapiens
  misc_feature (903)..(903): n is a, c, g, or t
ggcgggagctcggctggagtggctgggccagtgtgactggtccgggccatgccgaggaagaatgccattcatgctgtgaatgcatgaacgaatgaatgcagttgcatgtgacaaactggtgatgctgtgaatgcagaggtgcttcaatgatggtgcttgctgctccatgttccatacagcctgcatgctggtgagcctgggatgctgtgcgagaggaacatgacctgacaacctcgtgactggtggatgtcttgtgacccgatcatatcctgcagtgcttaaccatgcagccttctcacgggtgctggtgtccacgagtgctaccgacccaaaatctgataaccgactgccattttgcagaggcagaagagcagggcaggcatggtcagagatgtgagcaaatgagcagcagccctgtggaagcgaaggtttcatagagcctggttcatgtgcgtgagattgttgaggaagctgggacaatacagggaagagtgtatacaagacttggcatcagattcttggacattaccatcagaaagtcgctccatatggaagacatatgaagatagtacagaggaagcaaacataatagagaccaatggaggaagaggaagcttcacaagaaatatcatttggagaaggattcattggggctttactccgtctgaggaaagtacaagactactaatgaagacacaaagtctaggacgacatatgaaacgagaaagggattggtaggagagggagatgataaaagaagagttggtcgtggaacattaaggtgaagatagatttaagtacacctcgcattactcacggacgaaattcgaaggataagtaggaagataacagagagaaagagagtataataagaatatcagtaaatagggaaaaacattgggn

SEQ ID NO: 543172 - DNA, 231 bp, Homo sapiens
atctcaaccatacctggtgggagtcttcgctccaacctcttcttccctaggttcaaagccactatcatctgatgtgtaagggatgggttctgactggcagaaataaatacagctcccaataggagcccacggaactaagtagggtcccaagaaaaaaaacgggagctatatcacaagagctgagcttctgccagatttcattcctcaaacctttagttgagggtaaaattg

SEQ ID NO: 543173 - DNA, 738 bp, Homo sapiens
gggaaatgggagcaaggtctcagcacccgtgactgcacgggccgtggcaggtgggggcagcggttggaaaatagctgtcgctttcgtgacaactctcaggtcattgaccagccctgtgatgccttctgatggttttaggaagcaacaataagtaagcaccactggaagcagtgatggcgcgagggagggctcccaaggtgaaggggcccatccgtgcgtgagagatgcaggttttgttgacgagcctgggaagttcacattcccctcaccccatgaggaaactgagatctgccctgagccccagaccctgtgtcccttcccaggggcttgtgtgagagcggccacatggtgcacctgtagaggtgaaaaggatgcccaggggctgggtgggccgtcttgctcaggaggaaatgtacccccacccagtctcagcacaactgcctggccagccccatcctggtgacccaggtggtctctggtgggccctggtcctggagggctctgggattcccccaccagacctgcagcccaggtggggaggggcaggtccgagactcctatcccccgtcattccccacctctgaggctggacctcacctttgacctgaccctccgaggaagaacaacttgtgttattgctgggggtcttcgggtggtcagcacctcaccacacaggaggaatccttctgtctctgggggtcacagcaaacgctgggacaaagcagcagcagggtgcgg

SEQ ID NO: 543174 - DNA, 187 bp, Homo sapiens
cctagcggaccccgggtgtaccttgtctaaatcctatatcacgcctcttggacttaaaactaactgatgcggatttatttcgaggcatagtatccctgtgcggacgtctaacaagaatgtatctcatcatcgtagtgtagaggtctccaggctgattcgaatgtgactatggtatcatctatacatc

SEQ ID NO: 543175 - DNA, 180 bp, Homo sapiens
ccagccctggtcccgcgtgttgctcactgcagtgcccctctgtacccgcaggaggctactggcgtcgagccacactgccttcagaaaacttcctttcatctgttcctactgagactggtcccagcctgcagttcagagctgccctctcctggcgcaggctgcctccccgcctctgcttgc

SEQ ID NO: 543176 - DNA, 452 bp, Homo sapiens
aggattgacccctaggtatctggagtggatttactgagataattatctttttttttttaatggcgaagtgctctctctttccttgaaacttggtgagactatttggagcgttgagttgaggttgatttcgtccacagaggtttggtcttggcttttggcctgttgcctaagacacagcccggcccatgatacaattttgatggtcatcacttagcatcaaagtaatttttaggccaggtgcggtggctcatgcctgtaatcccaacactccgggaggtgggtggatcacctgaggccaggagtttgagaccagcctggccaacatggggaaaccctttctgtactaaaattacaaaaattagctggggtgtggtgttgcatgcctgtaatcccagctactcaaatgggtgaggctaacagaactgattgcacctgggaggtggagattgcag

SEQ ID NO: 543177 - DNA, 691 bp, Homo sapiens
agcgggttcaccggacgcggcggatgagccggccccgctggggaaggctcaggccggcggcgggcggccgggaggaggctgcgtgctcggggctggggctgcgagcggggtgattttgtattaaaatgaggaggaggaagaagaggcacccacagcggcagcggcggcggcggcggcagcagcagcaggagcagccggccgccgaccgcatgcagcagcagcagccagcgaggagccagagcggcgtcacacgagggcgcaagcgacggcggtctgcgagcatcagtgcaagcaagatggaagcaagggcgagcaagatggcagggcaggcacgacggagacaagtaaactaacggcaggccagagaggcagatccgtccgtcagtccacgatcacagaggaacgtaggatgcgtcgatagctctgaggaccggatagggaacggaaccgagagactaattgcacttagatttcgacagggtgcgagcgcgacgtcggtcgaacgagacaacacaaaccgattcaatcatttcatatcgtagaaaacacaaggccagggcagagctaagctagggaaccggaaggcaaccggaggggaaccgcagaggcgaggagaaagggacgaacctgacgcacagagaaaggaagcggaacgggcatgggatcgggaagaaagaaatggaacgaagga

SEQ ID NO: 543178 - DNA, 450 bp, Homo sapiens
gcacgatggcgcgtctgttcccgcacagcctgtgaaacctccattttgccactttcaaggtcagtgcccctgaagacccgtggccgttgttgaccataacactagctttggccacaaaagccagggacacctacgcttggaaatgtgcctgcaccactgtgtggtgcctccttaagttgccccagactccagatggtcaaagaaaaggtgaatgtccaggtggctcatggctcctaagtatggggtgtagggtggggaatgaccccggcaggtaaggagacagcgactaaggccaagcccatattttctggtagtataacggacatttctattcttgactggtaatacctagaagctgtcccggtcacgtggctctacctgacaatgtggtaaatcagacccgtgacggagcaaggtgagcgttcacattctcgcatagataatgggctg

SEQ ID NO: 543179 - DNA, 241 bp, Homo sapiens
cagggagacgtgtggaaagataactctgccaactaccctacagttcattccagtttgcccgagggccttgcgtgggcagcctgaagtcgagattccctgagtgagcttcccactcaaggtgttgctctgtcctcttgtggcgtgatgtcctgattccgagctaatccatttttgtatgttcatgccccacaaaggatcttttgacacggcgtggcagcaaaagctgtaatgattcttctta

SEQ ID NO: 543180 - DNA, 145 bp, Homo sapiens
tcagttaagcgagcagtgctgggggtatgttgtgttggtcaggcctgccttggcctcccagggtgctagggttgcaagtgtgagccaccatgcccagctgagatctgatggttttatacatgcttgacagttgctccgttactga

SEQ ID NO: 543181 - DNA, 804 bp, Homo sapiens
aagagaaagaaaacgcagatggtcagacagaaacatgcacgacctacagcaagtgggacaacatccaggagctcctgggccaccctgtggagaagcctgtggtcctgctcgaaggtcttcctccccaaacaacaccaacccattggttccacattctggctttggtcttcaggcgaatgatcttgaggtcatgcagaacaaccacgagtgcctcggtgaccctgtatggtccccccaggccgggtagggcacctgagaagcagcggaaactccccctagggacaccagcacccatgcccctcgtgtccgtggaactgtgcatcaacatccgtgctcagttgggctctctgtaccaccctgtgcggcttttctatggactagcctggccagtgctgaagggctgtcgtgatggttctgaggtggggctcaggctggggtgctctgccatgggctgaggggcccagatattcttctgtccatcttcggctgctggtgccagctaggggacacagactgccaagagaagcacaaagtcagagccttgattcctggacccaggagctcctcaactaacaaaggaggcaggacgaggtcaacccatgtccccatgcgacatagggaagactccggcggcactaatcgcggacctggaggaagaacaggcaaccccagggattacaggaccaagcgtcctgcacttggggctccacatggcagacacgacccttatacaggcacgcgggcacaagtgtacacagtaactggatgaaaacatagaaccaacaaccacttcagacaccggac

SEQ ID NO: 543182 - DNA, 439 bp, Homo sapiens
ttcatgtcagggccttcatccccacactctctctggtgacagtactcaacatgtatatggtatgcctgcaaggtcctttcatgttcagtttcaaagaggagaggcagggataagaggcctgcctgggttcacgagaggaaggaagggaagcagcacctgctcctgttcagggagcaagcctgactgggcatgaaagcactcgatatgaattcatgtccagtcctttcatgccgtcagaggagtcctcaggaggcaggaagtggctgtgcctccacagttgcaggtgagcgtggcgggtgaacctgatcagggcactgcaagggaagcggcgcatatgctctgcacagttgcccaaagctgcctcgtcctgtcgaaagaactcctcgaaggcctcaaaatggtgagcacaggccctggggaatcttggcggatgattggg

SEQ ID NO: 543183 - DNA, 372 bp, Homo sapiens
tgataagattaacacctagtctctctgcttgtcgagtatagctctctgggcaatcacgctctacatactagagggagcttcacttggtaggacaacaagcttaccagagtacctggtgggctaggcagagcataagtacatccaggttgtctaccttcattacaacaatatctactgtaagtttgatacaagtgacttctgcccacctggatcggaacaccaaagggagggcttctttaatacgggtagtaggagtctattttcagcaaccccggtaccagtactgggagatacagccataccaccttacagatttgtctaacgtgcgctctgccattcaactcggaaactataagtaattcttcaagaaag

SEQ ID NO: 543184 - DNA, 188 bp, Homo sapiens
gagttcgggcaacatggagagaccccatctctacaaaacattaaaaaattagttgggcatggtggtgcacacccgtggtcccagctacttgggaggctgaggtaggaggatggcttgagcctgagaggtcaaggttgcagtaagacatgatcacgctacttctgcactacttcaacctcagcaatgcg

SEQ ID NO: 543185 - DNA, 250 bp, Homo sapiens
  misc_feature (142)..(142): n is a, c, g, or t
gagatccccgatgcaagttgtcaggacagagccatgttcaggagcggagccatgtgttttgctgatcgagtcgaactcgagcccaggtctttagttgtttcatctgatgtcggtctttggggagaggcaaagggtgaagttncttctacttacgatgcggctgtgtgttgaactccgtttcaaaagatgacagctgctgcgtactcctaaaagtccaccacctccacactgagaatcacccagatgacat

SEQ ID NO: 543186 - DNA, 1113 bp, Homo sapiens
caacctcgttatctactctaccatcttggcaggcacagtcatcagcagcgctaagctcggcactgatttattcacgttgacgtaggcgccgtaggaagagtaaagcatgacgtagcgtgttgtgattgcacagattgcatagaacgccaaagaaaataacagcgctcggatctctacagaagcatgccatcatacgttattgtccctcacagtcaacgcaatccgtgatcgcgagtaatcctgtcgtgaataggcgtgatgcgcttcttacagacaatgatagcatctccgggacaatgagaccgtaagccagatactacgaatcaatgactcatcattaataatcataatggctatagcaataagaatctaggaatagtccgccctttcacttctgaggtcccagcaggttaccctaatggcagccgccgtctggacgatgccggtcactggcgtctcgtgtcgtcagcagtgtacaagaaactaggcccccattctcaagtcatataaccaatatctctccctcactaaacgtaagccttctcctcactctctcaatcttatccatcatagcaggcagttgaggtggattaaaccaaagcccagctacgcaaaatcttagcatactcctcaattacccacataggatgaataatagcagttctaccgtacaaccctaacataaccattcttaaatttaactattgatattatcctaactactaccgcattcctactactcaagttaaagtccagcaccacgagcctactactatctcgcacctgaaacaagctaacatgactaagaccccttattccatcaccttctctcctaagagggctgcccggtaacggttttgccaatgggcatatcgaagattccaaaagatagcttatatccaccataatagtcacatagcctcttaaactagtatactaggctagtaaagtccctaagaagaagtcccattaacggaaaacagaagtgggaaacaaaacccaacccaacaggcaaaagggcaaagaccggaaaagttaaacaggggagacacagagaggacacgaaagcacggaacagcgaacagacagcggagagaaaagcagacaacgacg

SEQ ID NO: 543187 - DNA, 390 bp, Homo sapiens
ttgggcctgaaatcccttaaaaggcctgatagctttaaaaattagggggggttgtctgtctggaagtgttaagtggaatgggctttgtccccccggaggtgggggaatgtggtaaccttgaataccgttgaataaaatcgcttccaaaactccccctctcccaatgcattgttaagtatgtaaaagccataaccttgattttctgttggacttttttggaactaattctgtgagagttgagctccttttctagttggaagaatgtgatatttgttgggttggtggtttccctaatgcccctccctaattagattttgataaataggtttgtccttttgccagttccatgtttttaacctttttcaatgaagtcctccttttgacttgtta

SEQ ID NO: 543188 - DNA, 212 bp, Homo sapiens
cgggccaacgcaccgtgttgggccacgcaccgtgcagtggataccttattccagcggggattcttggggccattgtgtgtcgtgggcgtctcgtacaccgcgtagcccaagcgcagtccgcagtacgggtccatgccggtcatgccgtgattcttggccgactttgcctgttccaccgtgatgttcagtcggcccacggtgcgttggcccca

SEQ ID NO: 543189 - DNA, 288 bp, Homo sapiens
ggtgcacacctgttaatctcagctactcgagacgctgaggcaggagaatcgcttgaacccgggaggcggaggttgtagtgagctgagatcgtgccactgcaccccagcttgggcaacagagcaaaactctgtctttaaaaaaaaaaaaacaaaaaaaccaaacaaacaaacaaaaaaaaccttatatgggctgggctgggcgtggtgccttatgcccacaatcccagcattttgggaggccaagatgggaggttcacttgagcccagaagtttgagaccagcctaggc

SEQ ID NO: 543190 - DNA, 1602 bp, Homo sapiens
tcccgctccggagttccgggatcctggaggtgggggctgtgccctgagtggagggcacagggaaccgggatggggctgggcggacagctgagtgctgggaatgtgtgctgatgatttcactcctgtgggctctgggtctgagctacccctgtgcttcagtgctggtcctgctgcctcctctccccaatgacccttctgtggtgacacatgcactgcatgaccctgcctgtgagacaatcttgttgctgtgtgatgccctggacgtcctcgtgaataaccactatgtgtcttcttgactacgcctgtcatggctgtctcctgctttgactaacattcagtcatcgcacttctacgcgggcctgcccgtgacacctatggttgcatcgaatgtgccacagcttcggtgttgataatgcactgtgcttgagccctgtgcatgctgggtgcaccattggctgcttgaccgacccatctggcctcggcccttccaactgccgctgtgtgggcgtgaccgtggctgcaccgcccttttcgcgggacacgtgagccgtacgattcagctcctgtggcacgcagcacgtgactgccagccccaccttggtggaagaccggtcggttgcgacaggctggcttcgcgctgaaatggcccaacgggcttccccatggcagccctgccttccactttgcgaaacgcacttgtaatcaggccccatgtagttcgacgtccggtacatcagggccccctggcctggaacgaccaacgcacggcccggtaacgacactgcgctatccccagttggcccttcttagttcctcgggagacccttcccctacaacacaacccacacgccactgtctgcggaagcctcggtggcgattctctcccaacgctcctcccgagcggacacgcacctgcccgcggcaacgccactgggctgcgcgcacgcacaacggactcagagaccccaaacgggacctccccccggcggctccataatcggccctccctgcagcgcgcacgcacccatgccagcgggcgcccacctccacgtccattagcacccccgcactgggggcccacccgtcggccgccgatcacaatgcgcgacgcttggacagccatgagcacgacacaccggggtgcgacacacagggcaccgcacgcaccgcccccgcgtccgccacacgtgctatgtgacgcaagtggtcgcacccacggcgcccacggcgcgcacccccgtgccccggggccgcaccaccgcacaccccggccacgcactgcccctggtgcgtggagccacccccggacagcagcaacacctgcaggaccagtgcggacgcccccctcacagcgcgccacccgcgcgcgcccgccacagccaccacagcgtggcgtccggccccgacccagcacagcgcacacccgtcggttcacccggcccccgcgcagcacaccacgaggggcagcgaacgcaaccgcacgaacgcagccaacccaccagagccagcaggcagctgcctgcaccgcaccacaccagcgctcacccacccaaaggccgcaagcacacgccccctggcgcccccccactcgcccaccaccac

SEQ ID NO: 543191 - DNA, 1043 bp, Homo sapiens
caaagggtacggtggccatgagccctcttgccactggataaacatggccgccttggtgacatcccccaggactcaccatgactctcctccagtctctccaattccacaaatcccttccctgccatatgtccaaactctgccaagctgtgatgaacgatgagctgataagctgtgctgaaaaccatggtgggtggtgcttgactcagcccgccttattaccccaaggagccttcagggacacgtccttctggcactgctccacgaattccctccattcttggctagtgatctcgggaggggtaggagcaaaggctcgtgggaaggcgatatcaagctatgagagggagaaccacacgtagaccactaagggcacttttgttcctgccacaacggaacacaagttatccattcaagtcgtcctcatcccgaatgcaatgcgatcatgagcgtccccaccaaacaggacgggactactgtaggggatgagcgtgggcgaccgggcctggagtgcagtggcgccacgcattaggacacattatttcgggttattgtggtcccaagtttaagctttttgtccatgttctattctcgagacaattaaaagtgttttccgtttaatcattcaacccggtaaaaccaagacaacctggaccttgagagcaccgtgtggcgcgcggcgcctttctgaaaggagaattatggcgccccccgaaagtgtgcgcccacgcataacggtctgtaaacgcagcgttagacaccccgggggctatccagctgtaggataaccacactgctggtgctccccccactataatagtggcggagagaccacggccttaatctaaacatcggcatagtgggtccttatggagcggcccacgttcagatttctaaaagctagaacccgattggttgcaaacctgtggccttaaacccttgtatgccgctaaggacttcgggggggacacctcgtccccggggcgaaaagaggagcaaacccctttgacctttccctagggtcgggtaggtgtagctccactaag

SEQ ID NO: 543192 - DNA, 213 bp, Homo sapiens
actgactagcccgacatgcccacgatctgtggttaccccccaggtgacagcccatgccaggcacggggacctgtgccacacgaccagctgtgctcccagcatgaggctgtgctgtgtcagttcttctcgcgaagtgtgttatccccccgcactgtctgggctagtacggggacgtgtcgcggctacgtacggggcgggtacctgaggctcgaa

SEQ ID NO: 543193 - DNA, 919 bp, Homo sapiens
  misc_feature (57)..(57): n is a, c, g, or t
gaggaaaggagatttttcttttgtgcatagctctcccgatgtaaatcctaggtccgnaatcctctgtcctggcaaaaccacaaagttccgtatggccaagaggaagggaataattcatctcccccaaggatgaaatgggcaaccattgcttattctcgggggtaaaaaatgggaccttcttgaccagccaaagccactaatccactggggctggaatctgatgtaacaatgaacatttcgactcttgttggtaaatgctcaatgccttcctgaaaaaagttggggtgctgccttaccatccacgagataaagcagccaaggaccattaaccagaaaatttgaaggagaaaaacttcaagcactgatcctcatatagatcacgtatagctcgtcatcgacatctcaccaccaatctatctatagccagattcaggaacagcgcatcactgaaagaagctccgtcgacgaaaggacagtgaatcgtattaaacacagcaagcctcggatctgtgccacttgtgtcagaggcaagaagaaacacgtagtggcagttgtgcgaataattggtattcctaacaatgccatgatgtataattatgttgttactttgttgatttgagaactctacaaataaaagtcgcctgggagctagattacactcgcagaacattcttagttatatgtgtagagcctttagttgttactcctttctagctacccttgaagatatgatccttaaaggtggcctagcttggtaagactgtacttatccttaatctgcattcttctttcattgtagaatacagtatttgcaactcattcttttcttgtttttagttacagatatacttactttctctttgatctattaattgtagacactaagcattcaattgaaaatttgcccgaactgcgtcct

SEQ ID NO: 543194 - DNA, 312 bp, Homo sapiens
cccccccggggggccctggggggggggggctcccccgcaacagggggggggggggggccccaaaagggggcggggggttcccccccccccggttccttggggcggggtcccttccccccccttgggggcccggtaagccccgcccgccttcccttttggggggtttaacagggggggaccccgtttggttaaggaagaacccttaaggtggtttatttttttccaaatattcaagaatttttttttgtaaaaaattgggcccccttggcccccattggagggggttcagaaaaaacttaaaccctttgggga

SEQ ID NO: 543195 - DNA, 159 bp, Homo sapiens
ctctagaggatcttaaaaaaaatataaaaattagcttggtcagtgttatctcctgtactcccagctgctagggggctgaggtgggaggattgcttcagcctgggaggcagaggctgcggtgagccgagatggcgccactgcacttcagcgtgtgcagca

SEQ ID NO: 543196 - DNA, 152 bp, Homo sapiens
tcatatagaatcgagcctgttaccgaaaatgtctgacatacgagctggataggacagatatacggatcctggccgaattgcaacgcgatggccgcgcacccggcgcaggcagtggctggccgaccgcgtctccctgtcgcccagcccctgcc

SEQ ID NO: 543197 - DNA, 643 bp, Homo sapiens
aacaagtgacattcagatgtcaatctccattatcaaatgaatggctcagacactgtgacatgtgttaatagtcggtggattggacagccagtatgcaaagataattcctgtgtggatccaccacatgtgccaaatgctactatagtaacaaggaccaagaataaatatctacatggtgacagagtacgttatgaatgtaataaacctttggaactatttgggcaagtggaagtgatgtgtgaaaatgggatatggacagaaaaaccaaagtgccgagactcaacagggaaatgtgggcctcctccacctattgacaatggagacatcacctccttgtcattaccagtatatgaacccattatcatcagttgaatatcaatgccaagaaagtattatctccttaagggaaagaagacaataacatgtagaaatggaaagtggtctgagccaccaacatgcttacatgcatgtgtaataccagaaaacattatggaatcacacaatataattctcaaatggagacacactgaaaagatttattcccattcaggggaggatattgaatttggatgtaaatatggatattataaagcaagagattcaccgccatttcgtacaaagtgcattaatggcaccatcaatt

SEQ ID NO: 543198 - DNA, 392 bp, Homo sapiens
tcctactgtgttgggtgtggatcatgtcgtgaggggcgatcactagaatccgtttgagtttcagcatcatgggcctcgtcctggtggctcaagtatctggcgtgaggcgctgaaggctctgatctttgtcaatgaatacccggtccgggcagagacctttccccgctggtcgattaaccccgcaaaccccggaatgaacagtgcgccgcagtgcctggcacctatgctggataaactccctattggcgtcatttctcatgccggaaacacgaccactgcacattcaacacctcaaggctgcctgttccagttgcagcgttttggagttgtgcctgcccatcggtctgaccggtccggaggtccaacgtctggacacgctgatcgtgcaacgc

SEQ ID NO: 543199 - DNA, 112 bp, Homo sapiens
atggatagatgtgtatactcgcgctacctgccagccccgggagtggtggtgcccttgactgtggagctcatggcaccgtggccaaacagctggtgcccagctgcgtgactgt

SEQ ID NO: 543200 - DNA, 285 bp, Homo sapiens
acattatcgattacagaacaggctcgtctcagcagggatatgaagcactgccaggtcctttgagtattaagctgtggctcgtagtgttctggcgagcagttttgttgctttaactgttgaggtttagggctaagccatagtggggtatctaatcccagtttgtgtcttagctattgtgttgttcagatatgttaaagccactttcgtagtctatattgtgtccccttggagttttgagaactcaggtgagtttcagctttattggggagggggtgatctaaaaaa

SEQ ID NO: 543201 - DNA, 152 bp, Homo sapiens
cggtcatctaaggatccgctggcgtgtgttctgtgctgtgcatggttggcttgggggtctgtggttcctgggccttgtggcaggttctcccgtggagactttggtgtggaaagcattaggaggccctttccgagggttgacaccgtgtcctc

SEQ ID NO: 543202 - DNA, 189 bp, Homo sapiens
  misc_feature (56)..(57): n is a, c, g, or t
ctgaggatccgagcttacgaggtgggttaaatagaaagacacatcattattacctnntgggtttatggaagattaagagatatccacataaagttcctagtatgtgactgccatgtaatggagtgtatcaaccaagttagctaatattaattacataaaacagataactacttgaagatatccctcgtt

SEQ ID NO: 543203 - DNA, 266 bp, Homo sapiens
cactacatgaaaccacctctctcaatcagtggtgtcatttggaaagcttgcttggcctggtacagtggctcacacctgtaatcccaacactttgggggtcgaggctagtggatcacttgagctcaggagttcaagaccagccttggcaacatggtgaaacttgtctctaccaaaaatacaaaaaattggctggtcatgatggtgtgcatcttgtgatcccagctacttgagaggctgaggcaggagaatcgcttgaacccaggggg

SEQ ID NO: 543204 - DNA, 147 bp, Homo sapiens
ttattataacatatggatccccatgaagccctctacaccaaatttaccaggagatttgataggatggggctgatgggcttatcgtttataaaatccgggctgctgagatggggttttgccatgttacccaggctggtcttgaattcc

SEQ ID NO: 543205 - DNA, 183 bp, Homo sapiens
accatgacgtcaaactatatatacatattaaagccatggcacaaaacgaaagaaagaacgtacagacacaaagacagaaagaaagaccgaacgaaagaaaggaaaagaaaagaaagaaaggaaagaaaagacagaacagactgaacagagagacagaaaggccaagaatcagaaccgccaaaa

SEQ ID NO: 543206 - DNA, 113 bp, Homo sapiens
ggcaaaagtgtaacggcccaacactttgttccgctcaattttacgcctgtctctgacataaggaggtgccctaaatagcttggaaaagtaaccatctcctggccatcccttca

SEQ ID NO: 543207 - DNA, 154 bp, Homo sapiens
gtgtggacggggcgtgagcaacactcaggaggtgtcttgagattatcatccgctgagggtggaacggggagtgagcagacactcgggcaggtgtcttgcatggctcagggcagttatcagttatagaatgttagatgagttggtagtgatggtg

SEQ ID NO: 543208 - DNA, 334 bp, Homo sapiens
  misc_feature (267)..(267): n is a, c, g, or t
  misc_feature (300)..(300): n is a, c, g, or t
  misc_feature (324)..(324): n is a, c, g, or t
ggattgcatgaacccaggagttcaagaccagccctggcaatgtagtaagaacctgtctctgcaaaaaatgaaaaaaattagccaggcctggtggtgcatgtctgtagacccagctactctggaggctgaagtgcttgagcctgggagggtgaggctgcagtgagccaaggtcacgccactgcactccagcctggggcaacagagcaagacttctgtttcccagaataatggtatgggaagttttctgttgtctttgttaataaaggntttaatttcgatttattttagggatttagtatnccgatacccattcaacatgtcaantcggctctta

SEQ ID NO: 543209 - DNA, 287 bp, Homo sapiens
agtagagtggtgagctacagtgcatgggccaaagcatccagctggttgttgtattttatagtagagacggggtttcatcatgttagccagtgatggtctcgatctcttgaacttgtgatccacctgcctcgacctcccaaagtgctgggattacaaggatgagccaccaagcccggccaagcttcttgttttgtacattgattttttcttttttattttttttttttttttttttttttttttttattttattatctaacgcgggggggggggggggggggggggac

SEQ ID NO: 543210 - DNA, 351 bp, Homo sapiens
  misc_feature (15)..(15): n is a, c, g, or t
  misc_feature (19)..(19): n is a, c, g, or t
  misc_feature (255)..(255): n is a, c, g, or t
  misc_feature (310)..(310): n is a, c, g, or t
  misc_feature (329)..(329): n is a, c, g, or t
ggggccaggcgtcanacgnctgtgggatcacgggcaagtcttggaggtgcctcttccagcttcaaatctctatgtactttggggaggcagggggtttgcttcccaggtgcaggcttgcactgcgctctttctggattgcatcagagctgctcaggactcatttccccacccccacagggcgcctacagctccctccccctcccataacttattagctacagataacatccctttgttctcccagtgacttcacanccacagaagggagagggggatgaaggaaatctggcagggggggttgccttcccgncagtattttgatggaagcntttcctttttgagtaatatgtt

SEQ ID NO: 543211 - DNA, 643 bp, Homo sapiens
gcgatatggccgcataccagctggtcgcgggggcggcggcgcctatggtgccctatggtgcctcgtgcacgacttcgtcgtgggtcagcaagagggccccgctgaccaggtggctgcaggtcctctctagagaatccagaaccccgaactcgggcacgaggaatccagctgtcacaggtgctacctgccctgctcctgcaaagagttacacctgatactgtctattagatcgtctgaatgagcatcatcttgtgatcccatctgtcctgcagggtttgaaggcacttagcctgtgtgtggccctgcccccagggctggctgtttctgtgcttaaagccatctttccaggaagtgcatgtacaggtggaccgacacacagtctacaatatcatcaccaattttatgcgaacccgggaagaagagctaaaagagccctaggagctgacttcacctttggcttcatccaggtgatggattggggggaacaatgtgatttcccccgtaaatctttctggttggcctttccgcatcgttccatgtatctcatcttcgcatggtaactaatacgcttgtgaccctttttgttggaggacacgtttgtttgacaggttgaaccaattctctttgttttaattttcccctt

SEQ ID NO: 543212 - DNA, 379 bp, Homo sapiens
caacctcagtaacaaaatatatgacatgtcaataacactaaaggatgcagttggaaatgtattaccatatgtttgcaggagcccacttttttcccgctggtgttggtcctaggatgattttagtgtttgaaacccaggtctgctaacgagaatctaactttctttagttttccatgttccaggtccctagttccctcttatttgaaggaaaaaggacagctagacaagtgcccaaaccagccggtctggctgttctgcattcattcatgcatgcaagcaacaagtatttattaaacacatactatgtccaggaactgtgcagggcaataactacttatttgttctcaaggccccagaggagatttgtgcagcactggga

SEQ ID NO: 543213 - DNA, 210 bp, Homo sapiens
cacattcagatcatggcagtcgcattataaagagagacacacagctctctctctctctctgaccatgtaagtctacacacaagtctgccatctgcaaaccagaagcaggtgggctctctcagcacagatctgctgcactcgatctggactgcagctccactggtcagcatgcacgcttctctgattctcagctcagtgttatgtgcctgc

SEQ ID NO: 543214 - DNA, 105 bp, Homo sapiens
ctcttgaggatccccccccgggccgatggcccatgactctatttccactacactgttcctcctccttgagcttactgcatgtgttaggggtgggctggaaaatgc

SEQ ID NO: 543215 - DNA, 144 bp, Homo sapiens
ctgcaacctctgccctcctggagttcaaagggtcctcccatctctgcctcttgaagtagcttgggactacaggcacatgtcaccacacttggctgatgtgtatttatctatctatctgtttattttgtggtggagcatgtgaag

SEQ ID NO: 543216 - DNA, 628 bp, Homo sapiens
  misc_feature (367)..(367): n is a, c, g, or t
  misc_feature (394)..(394): n is a, c, g, or t
  misc_feature (412)..(412): n is a, c, g, or t
  misc_feature (469)..(469): n is a, c, g, or t
  misc_feature (572)..(572): n is a, c, g, or t
  misc_feature (622)..(622): n is a, c, g, or t
cttaattctgtcatcttcataagctgaggatgaatgtcgcctcaggaccctgtgatgattgcattaactgcacagattgtttaaacaatatgaaatctgggcaccttgaaaaaggaacagtataacagtgatgttcagggaacaagggagataaccattaggtctggctgcctgagagccgggaggaacagagccatatttctcttctttcaaaagcaaataggagaaatatcactgaattctttttctcagcaaggaacatccctgagaaggagaatgcattcccaaggggaattctctaaaatgggccgctttgggaatgtctgtcttttatggttgtagataagggatgaaataagccccagtncttcactttagcgcttcccaggcttanttagggacgaggaaattncccgcctaattaaattttggttcagaccagtttgttctgcttttcaaaccctgtttncctgataaggtgtttattcaatgaccattgcgtaccccaaactttcattaggcatttttaattttgccctgggttctgtgatcttggcctggcttccatttgnccttgttgatatttttattaccctgtgaagtttgtgatctttctgacccncatttg

SEQ ID NO: 543217 - DNA, 641 bp, Homo sapiens
cgctgatttgtggtgattgctctttcgagtgggtgtgtggtgttgtgggacatttattcgtcagggtttgaggtgtgctcctagcatgcgttcagtgcccgttgatgaacacggggtgtcagtccctcggcttagtggggttatttatgcccgatgggctttgcctttcagtgtgtcagctgttcttccctgggtgtggcttcgttccgaggggatagtgtcccctccagtccagattgtcggggcggctccccactcctctgcgcatcttggttcacggtggtcacccatctctgttgatggccgtgctcaccctgtctcattcacgttgatgtgtctcgaatgaagtcacaccaactgggggtcattgtgttgtcaagtggcccctttgtgcagtttacatgtaggtgactgattcacattgtttgtccaaatgtattgcacagcgccaatgtgcatgtcagcccgctctcccacgtcatcacagtctgggttcctcgataatccctgaaggaagattcgctcacctcgttggttctgcagcttgatcaggttctcagcagttccctctccctcatgagattggtgaagaaagtaggttggcaaaattgggcaaagacacatcaataagacagaataca

SEQ ID NO: 543218 - DNA, 228 bp, Homo sapiens
cggaggttgtagcaaggccccatataatggcttttttttgacgacggaagaggagtttttgatcaggaggtgaatatgtaaattgtaacatgatagacatgcaagactgttatccaatctagatactatatttacattctgatgacttaggaaatcaaagcattcattagtgacaagcctaaaacgcttgacatatataacatacttaggatctttttttgtgcgagt

SEQ ID NO: 543219 - DNA, 477 bp, Homo sapiens
aggcatgaaaacattaatctcccgatacctctccgtcagagctctgggtgattaagttatgtcaatgtgcaataatattctgaaagaaatcttttttctgagcagctaggtcttaacactgggcctaaaatattggtataccgtgctatcatctaggctgtgtcattccatttataaagcataggcagagtagattttgcacaattcttaagggtcatagggattttggaatggcaaataagtatgggcttcaattagaagttactagctgcattagcccctaagaatcacatcagcctgtcctctgaagctttgaaaccagacattgacttctctcttactatgaaagtcctagatgatatcttctttcaatataggttgttttgtctacattgaaaatctgttgcttaatgtagccatcttcatcagttatcttagctagatcttctggataactcactcctgcttctacactag

SEQ ID NO: 543220 - DNA, 794 bp, Homo sapiens
acaaatgcaccgatgtgcctactataacctagcaatggggccgaccatctaaggaaatcattctgtagatacggtacgactctgagaatatatctaggtagttgccattgttccctcatgagattggcgtcaggactcgatgcagtaccgtagtcctaagcagtgtggatgtcactgaacttataaacgtcgtaggactgtatgatcctagtataggatctcctccgggtatcaagtggctatattataccctctaaaagcactcttctattgtataatgtccgacccagtacaacctagcgtggaagcttgtcgtgtatgtaaatcttcaatggcgtgagacaccctagttgggcctcaggtcctatcttgagtacattgatgcgcaccggtcattaacagaactccggcagtaggaaagccatttgtcatccaccctagggatgtcctgtaaatgttgatacggatgtagtggttcaatagctccaggggattcccttaattcatgctggcaaccagttccataggagaagcttcttaaatcgcgtttttcccagaaagcaggtgtaacctgcaggtcacttaggtttcccgttaaagttccggccggataatgagagactgcaaggatatagccgatggccaaaacgttttagcctgaggttccgatggcacccaggcaattaggaaagaccggtaagctctgagaggaaggaataacttgtcacaaggattaacccccaacccctttgcccttatttgttgcagggggtatagtttgatcaactaccgtc

SEQ ID NO: 543221 - DNA, 231 bp, Homo sapiens
acgccgctgacggatcggtgttacttgacaatgacacaggctctggaggccaggctcgggggctccccgttcggaccggctggaacaggaaagacggagtctgtcaaagccctcggccatcagctggggcgattcgtcttagttttcaactgtgacgaaacctttgatttccaggcgatgggacggatcttcgtggggctttgccaagtgggcgcctggggctgcttcgac

SEQ ID NO: 543222 - DNA, 541 bp, Homo sapiens
atcagaagacagatttgtatctacatcacatctagtctctctgactctatgatgatacactgtgtattcacgagactccagattttcatatgtacatgctattctgtgttgcaagaactcatacatctgcatccactcatatcttcctgcgcggtataggtttgtcgtgctgtaatattaagtcacaagtcaaatcattatggaatgtccaaatattctcccaacactctagtttaatggtgttgaatatcattcaaaataaataggccattacctaaatattctgaaatctattcttaaggtttcaacttactgtacacaaacctaatatatgaatagccagatttacagagaagataaattggagagggaatgttatttacattcactgatggagttgaccagcaggatcccttcacaggaaatccctgtgattgaaaatggagaacccacaactctcaggtggagttccaacccctaggtgctatgcggcgtatacgtctatcacctgtagagggatcaaagagaaggatttatgact

SEQ ID NO: 543223 - DNA, 237 bp, Homo sapiens
agattaccatcaactaggattccagattagagtaaccatcaactaggagtctccagattagagcaacaatcaactaagagtctccagattaaccatcaactaggagtctccacattagagcagccatcaactaggagtctccagataaaccatcaactaggagtctccagattagagcaaccatcaactaagagtctccagattagagtaaccatcaactaggcgtctccagattag

SEQ ID NO: 543224 - DNA, 296 bp, Homo sapiens
tcgtgaccgtcagcactcttttcttttcttttctcgtgtgtttctcgagatggagttctgtccttgttacctagtctggagtataatggtgcggtctcggtcactgagcacctggccccttttctgtttttttatttttatttttatttttttggtgagacggagatttgcttttgttgcccagcgtgaagtgcaatggtgtgatcttggctcaccgcatcctctgcctcctgagttcaagtaattctcctgcctcagcctcccgagtagctagtattacaggcatataataccac

SEQ ID NO: 543225 - DNA, 461 bp, Homo sapiens
gggtatgcaagatccaaggaagacgtcgttatctaccctccccacttactcgatggagagaggtgagggggggatgacttgcgggttctgatcagtgcccctggagtggggaagtgggcacatgtgtccctcagcatgcttacgcccctggagtcttgggggtgccagcctgggcctggggccttttccagctactgtgcccttgtggcagctgcgtctggggctcaaacccccaatactgttaccctctcacagctgcgggtctgtagtgcagctgtcacatctgaagggtttctgcaaactggaccccatctgggtgtgggtcagaccctgtgaaccacatgacaaccccaccctccacagagcccccttgctgggacagacagctcacctccaaagacataccatcttggcttctcccacttccgagtctgcagagccgtgggcttctcttccgattt

SEQ ID NO: 543226 - DNA, 637 bp, Homo sapiens
tatgctcaggcttcagtaagaggctcgcgtctattgttctccgtgtggctggaagaaggtctggttagaccccattgagaccaatgaaatcgccaatgtccaggtcccgtcagcagatccggaagctcatcaaagatgggttgatcatccggatgcctgtgatggtctattcccgggctcgatgccggagaaataccttgggccgccggaagggcaggcgcatggggatagcgtaagcggaagggtcacagcctggtgcccgaatgccatagaaggtcacatggatgaggagaatgaggattgtgcgccggcgtgctcgagaagatacgcgaatctaagaagatcgatcgccagatgtatcacagcctgtgcctgaaggtgaaggggaatgtgttcaacaaagaagcggattctcatggaagatatgcacgagctgaaggcagagaaggaccgcatagaagctcctggctgaccagggtgaggccccgcaggtctaagaccaaggacagcaaggcaagcgccgtgaatgagcgcctccaaggaccaagaaggaggatgatcatcaagagttatatccaaggagtgaagagagcaagaattaaaagctcccattagtcgtgtgcatactgggctctgg

SEQ ID NO: 543227 - DNA, 4541 bp, Homo sapiens
ggcggaggctccgggacggcgagcggcgggcggcggaggaggagacggcaggtcgggcattaaaaaatatttaatcattcatgtgttgagactcattcttgagttatggatgacaaggcttctgttggaaaaatcagtgtctcttcagactcagtatctactcttaatagtgaagattttgtcttggtttccaggcaaggagatgagacaccatctacaaataatggaagtgatgatgagaaaacaggactcaagattgtagggaatggaagtgaacagcagctgcaaaaagagctagcagatgtactgatggatcctccaatggacgaccagccaggggaaaaggagcttgtgaaaaggtcacaactggatggtgaaggagatgggcctctttctaatcagctctccgcttcatccaccattaaccctgtgccattagtagggctccaaaaaccagagatgagcctaccagtgaaacctggacaaggagattctgaagcttcaagtcctttcacaccagtggccgatgaggacagcgtagttttcagtaaactgacttacttaggctgtgcctcggtaaatgctcccaggagtgaagtggaagccttaaggatgatgtccatcttaagaagccagtgtcagatttcactagatgttaccctttcagtgccgaatgtgtctgaaggaattgtgagactcttagatcctcagacaaacactgaaatagcaaactaccctatctacaaaatcctcttctgtgtcagagggcatgatggaactcctgagagtgactgttttgctttcactgaaagtcattacaatgcagagctcttcagaatacacgtcttccggtgtgaaatacaagaagctgtaagccggatactttacagttttgccactgccttccgccgttctgccaagcagaccccactttcagccactgctgcaccccagactcctgacagtgacatctttaccttctctgtgtctttagaaataaaagaagatgatggtaaaggttattttagtgcagttcccaaagataaggacagacagtgctttaaactacgccaaggaattgataagaagattgtcatctatgtgcagcaaacaactaataaagaacttgccattgaaaggtgttttggtcttctccttagtccaggaaaagatgtacgaaatagtgacatgcacttattagatttggaatctatgggcaaaagttcagatggaaagtcgtatgttattacggggagctggaatccaaaatccccacattttcaagttgtaaatgaagaaactcctaaagataaagtcctgtttatgaccacagctgtagatttggtaataacagaagtacaggagcctgttcgatttctcctggagacaaaagtccgcgtttgctcacctaatgaaagattattctggcccttcagcaaacgtagtactactgaaaatttctttttgaaactaaaacagataaagcaaagggagagaaagaataatactgacactttatatgaagttgtatgcttggaaagtgaatcagaaagagagaggaggaaaactacagccagtccttcagttcgcctgccacagtctggatcgcaaagttcagtgataccttctcctccagaagatgatgaagaggaagataatgatgaacctctcctgagtggatctggtgatgtatccaaagaatgtgcagaaaaaattcttgaaacatggggagaactgttgtcaaaatggcatctcaacttgaatgtgagaccgaagcagttgtcatccttagtaagaaacggtgtccctgaagctcttcgaggagaagtctggcagctgctagcaggctgtcataacaatgaccacctggtagagaaataccgcattcttatcacaaaggagtctccccaggacagtgctatcacccgggatattaaccgaacattcccagcccatgactactttaaggacacaggaggagatggacaagattccttatataaaatatgcaaggcttattctgtgtatgatgaagagattggttattgccagggccagtcatttcttgctgctgtgctccttctccatatgcctgaagaacaggcattcagtgttctggtcaagatcatgtttgactatgggctcagggaacttttcaagcaaaacttcgaagatttgcattgcaaattttaccagttggagcgcctcatgcaggaatacattcctgacctgtacaaccacttcctggatataagccttgaagcacacatgtatgcctcccagtggtttcttactcttttcactgcaaaattccctctctacatggtcttccatatcatcgacctgcttttatgtgagggaataagtgttatttttaatgtcgcccttggattattaaagacttcgaaagatgacctgctgttgacagactttgaaggtgccttgaagttctttagggttcagcttcctaagagataccgctcagaagaaaatgcaaaaaaactaatggaattagcctgcaacatgaagattagtcagaagaagttgaaaaaatacgagaaagaatatcacaccatgagggaacagcaggcccagcaagaagaccccatcgagcgatttgagcgggagaataggcgtctacaagaagctaacatgaggttggaacaggaaaacgatgacttagcccatgagctggtgaccagcaagattgcactacggaaggacctggataacgctgaggaaaaggcagatgctctgaataaggagctgctgatgaccaaacagaagttgattgatgcagaagaagagaaaagacggttggaagaagagtctgctcagttaaaagaaatgtgccgtcgggaactcgacaaggcagaatctgagattaaaaaaaacagttctatcattggtgactataagcagatttgttctcagttgagtgaaagattggagaagcagcagacagccaataaggtggaaattgagaaaattcggcaaaaagtggatgactgtgagcggtgccgggaatttttcaacaaagaagggcgtgtaaaaggcataagctcaaccaaggaggttttagatgaggacacggatgaagagaaagagacgctcaagaaccagctgagagaaatggagctagaactggcacagaccaaactccagctggtggaggccgagtgtaagatacaggacttggaacaccatttagggcttgccctcaatgaggtgcaggcagccaagaagacgtggtttaaccgaacactgagctccataaagacagcaaccggggttcaagggaaagagacttgctgagagcagctgccgcctcccgacaccttcagaaaacacgacaccttttgttgccttctttggccagatgtgtgattctgtgacttgtcccaggaccagaatgtacctaagtcagatccatagacgcatgttggtaggtcactggaccagagcttgtgaagcaggcaacctctggggtaagactactgatactaacaggcctgctagctcagccgacgctctggacactctagaaatcactcctcagtgtgacctcccaggcctcttccccgtgtacgtcaacacctcacccagcctaaaggctgagtttacatgatcagagttaggggatccttcagtctgttgattttttttctaaaccttttttttttaatatacatatatatatatatatatatatatatatatatatatatatatatatatatatatatatatatagtgggggtggggcaagggatcagaaattcaaataattcttttctgcttcaatgccagcagaaggtcccccaggtagacatggagaagcactttgttttaaataggagggtttcatagttgcatctgaagccacctggttctgttaaactgtatcgtgcaggttttgggtttggcattattcatgtttctgatcaattctatgcaactctcatagttcctgttactttttagcattagctgccaaatgacttcaaaaggctggggtgggtgacttgactgtgagactggattataacatggacaaatcttattttgcttaatgtgtttgtgtgtgtgtgtgtgtgtgtgtgtgtgtgtgtgtgtgtatgtatatatatatatataaatatctttcccaatatgccccgttgacagtgtttaaattccagactaggactgctgatctgcacaatttaattatgtggttattcgagcacttaatttcactcaaggttcattgggctctgctctcctccctgccattacgggagctgtggacagagctccctcacttcaagattcctagtgtttttgcacaacaggttgtccaagtgagaaagactgagttgcgtgtctgtaaatgtctgcgcagggtgcacatgctgcgaggtctccatcctccgggcctgtccctcccagatgggctgggcctttgggccctcctcagagtatgcctgggtacaaacctcactgttcagatgggctgtaagttctcacttcaaagctatggaatggattttagcaccttt

SEQ ID NO: 543228 - DNA, 134 bp, Homo sapiens
gattgcttagacataatagtattattaaagaatcacaactgttaatattgaatacttattggataggctcttatgattctagggtcctttactggcactaatgatttcctatgtgctatgtctaaatgcaatca

SEQ ID NO: 543229 - DNA, 1023 bp, Homo sapiens
tgctacatcagagcatataggcttatatgttttggggttatgtctttgtctggttttgtatcatggtaatgcttgcctgtagaatgagttcagaataattcccttcttatttttctggaagagtttgagaagaattggtactggttctttaacattttggcagaatttagcagtgaagtcatgtggtcctgggcttttctttgatgggagactttttattactgattcaatctcattactcaatatttatctgtacagatttttaatttcttcttggttcaattttggtaggttgtatgtgtccaggaatttatccatttctttcaggttttccaattggttggcatatagttgttcataatagtctctaatgaccctttgtatttccgtggcatcgtttgtaatgtttcttattcatgtttctgatcaattctatgcaactctcatagttcctgttactttttagcattagctgccaaatgacttcaaaaggctggggtgggtgacttgactgtgagactggattataacatggacaaatcttattttgcttaatgtgtttgtgtgtgtgtgtgtgtgtgtgtgtgtgtgtgtgtgtgtatgtatatatatatatataaatatctttcccaatatgccccgttgacagtgtttaaattccagactaggactgctgatctgcacaatttaattatgtggttattcgagcacttaatttcactcaaggttcattgggctctgctctcctccctgccattacgggagctgtggacagagctccctcacttcaagattcctagtgtttttgcacaacaggttgtccaagtgagaaagactgagttgcgtgtctgtaaatgtctgcgcagggtgcacatgctgcgaggtctccatcctccgggcctgtccctcccagatgggctgggcctttgggccctcctcagagtatgcctgggtacaaacctcactgttcagatgggctgtaagttctcacttcaaagctatggaatggattttagcaccttt

SEQ ID NO: 543230 - DNA, 3549 bp, Homo sapiens
ggcggaggctccgggacggcgagcggcgggcggcggaggaggagacggcaggtcgggcattaaaaaatatttaatcattcatgtgttgagactcattcttgagttatggatgacaaggcttctgttggaaaaatcagtgtctcttcagactcagtatctactcttaatagtgaagattttgtcttggtttccaggcaaggagatgagacaccatctacaaataatggaagtgatgatgagaaaacaggactcaagattgtagggaatggaagtgaacagcagctgcaaaaagagctagcagatgtactgatggatcctccaatggacgaccagccaggggaaaaggagcttgtgaaaaggtcacaactggatggtgaaggagatgggcctctttctaatcagctctccgcttcatccaccattaaccctgtgccattagtagggctccaaaaaccagagatgagcctaccagtgaaacctggacaaggagattctgaagcttcaagtcctttcacaccagtggccgatgaggacagcgtagttttcagtaaactgacttacttaggctgtgcctcggtaaatgctcccaggagtgaagtggaagccttaaggatgatgtccatcttaagaagccagtgtcagatttcactagatgttaccctttcagtgccgaatgtgtctgaaggaattgtgagactcttagatcctcagacaaacactgaaatagcaaactaccctatctacaaaatcctcttctgtgtcagagggcatgatggaactcctgagagtgactgttttgctttcactgaaagtcattacaatgcagagctcttcagaatacacgtcttccggtgtgaaatacaagaagctgtaagccggatactttacagttttgccactgccttccgccgttctgccaagcagaccccactttcagccactgctgcaccccagactcctgacagtgacatctttaccttctctgtgtctttagaaataaaagaagatgatggtaaaggttattttagtgcagttcccaaagataaggacagacagtgctttaaactacgccaaggaattgataagaagattgtcatctatgtgcagcaaacaactaataaagaacttgccattgaaaggtgttttggtcttctccttagtccaggaaaagatgtacgaaatagtgacatgcacttattagatttggaatctatgggcaaaagttcagatggaaagtcgtatgttattacggggagctggaatccaaaatccccacattttcaagttgtaaatgaagaaactcctaaagataaagtcctgtttatgaccacagctgtagatttggtaataacagaagtacaggagcctgttcgatttctcctggagacaaaagtccgcgtttgctcacctaatgaaagattattctggcccttcagcaaacgtagtactactgaaaatttctttttgaaactaaaacagataaagcaaagggagagaaagaataatactgacactttatatgaagttgtatgcttggaaagtgaatcagaaagagagaggaggaaaactacagccagtccttcagttcgcctgccacagtctggatcgcaaagttcagtgataccttctcctccagaagatgatgaagaggaagataatgatgaacctctcctgagtggatctggtgatgtatccaaagaatgtgcagaaaaaattcttgaaacatggggagaactgttgtcaaaatggcatctcaacttgaatgtgagaccgaagcagttgtcatccttagtaagaaacggtgtccctgaagctcttcgaggagaagtctggcagctgctagcaggctgtcataacaatgaccacctggtagagaaataccgcattcttatcacaaaggagtctccccaggacagtgctatcacccgggatattaaccgaacattcccagcccatgactactttaaggacacaggaggagatggacaagattccttatataaaatatgcaaggcttattctgtgtatgatgaagagattggttattgccagggccagtcatttcttgctgctgtgctccttctccatatgcctgaagaacaggcattcagtgttctggtcaagatcatgtttgactatgggctcagggaacttttcaagcaaaacttcgaagatttgcattgcaaattttaccagttggagcgcctcatgcaggaatacattcctgacctgtacaaccacttcctggatataagccttgaagcacacatgtatgcctcccagtggtttcttactcttttcactgcaaaattccctctctacatggtcttccatatcatcgacctgcttttatgtgagggaataagtgttatttttaatgtcgcccttggattattaaagacttcgaaagatgacctgctgttgacagactttgaaggtgccttgaagttctttagggttcagcttcctaagagataccgctcagaagaaaatgcaaaaaaactaatggaattagcctgcaacatgaagattagtcagaagaagttgaaaaaatacgagaaagaatatcacaccatgagggaacagcaggcccagcaagaagaccccatcgagcgatttgagcgggagaataggcgtctacaagaagctaacatgaggttggaacaggaaaacgatgacttagcccatgagctggtgaccagcaagattgcactacggaaggacctggataacgctgaggaaaaggcagatgctctgaataaggagctgctgatgaccaaacagaagttgattgatgcagaagaagagaaaagacggttggaagaagagtctgctcagttaaaagaaatgtgccgtcgggaactcgacaaggcagaatctgagattaaaaaaaacagttctatcattggtgactataagcagatttgttctcagttgagtgaaagattggagaagcagcagacagccaataaggtggaaattgagaaaattcggcaaaaagtggatgactgtgagcggtgccgggaatttttcaacaaagaagggcgtgtaaaaggcataagctcaaccaaggaggttttagatgaggacacggatgaagagaaagagacgctcaagaaccagctgagagaaatggagctagaactggcacagaccaaactccagctggtggaggccgagtgtaagatacaggacttggaacaccatttagggcttgccctcaatgaggtgcaggcagccaagaagacgtggtttaacgtggtccacctcccctagggaagctgctgcactcagaggctgtgctgcccagtggcccctgagccgtgtgagcctgcaggaggcgtctgagcagagcctcaagcccggtatggcgccatcttcatgttgccatcactgcgttctcacctgaagccttaatctttgcgacatctgtcagtgagcgctcggcttgaataccaaagtgtgtcttcatcttctccctgtcttttagatgcctgtgtcataggaaaatctgaaatgatatccaggatctttgatctggctacaaca

SEQ ID NO: 543231 - DNA, 547 bp, Homo sapiens
taaaagccaaaaacttatttaattttatttaaaaaaaaacatggaagatcccccatttcccaccacccaaaaaaatttttgaagggggaaggttaaaaagccaacccatttgggggggtaacaaaaccagaaaaaaccccagttgccaaaggagaaaggttggaaaaaagtttggttttaaaaaagctgagcacctacgggaaaaattccggggcaaaatgctgaaaaaaaaatttaatttcggcacagaaaataccattaccttagaacccttggctaaagggggggataaattccccaggaagtcagaaggagacaataagcagcattaacttcaaaggcacacagaactagggcccaaacggctagcaaaaattccaacagagtaaatagggcaaagtcacaacccaggggtcaatttccaccaaatttagagaccccccctaggcacctaggggaaggaattaccacggaataaaaaggcccccaggaaaaacggaaaattcagttagggttaatttagccaaaagataataggggcaagtac

SEQ ID NO: 543232 - DNA, 211 bp, Homo sapiens
tgggcaatatagcaagcccccctttttccaaaaataaaaaaataaaaaaattaaaaaattagccggggggggtgacaaacgcctgtagccccacctgattggggggttgaggctggaggattgctttagccccggggtttggggatgcagtgagttatgattgcccccccatactttgggggatgatggcagaatgggccctactccccga

SEQ ID NO: 543233 - DNA, 717 bp, Homo sapiens
gacttgttttctaaagccccccggtagagttgccccgcatggtgtaatctcgctttcgtggatctttggtgatcatagggttggggggtatggcaaagcgcgtgcctattcttttgtctgcgtgaaaagattcttttcttctaagggtcgataaatagtgaatgagtgtcacgagatttcctctatctgataatttttttcagtagttcctgggtaattattccagtggttcgaattttccccctggagaaaatcttgtggggctttccttgaagaccatctattcccccgagtgtgtcataactccagagtagggggccagtatccacctgcagtctgttcagtggtgtgagttctcctctgcttatcatggagtgcctctgctaattatgggtgcccctcaggtagaaggtcccatcttgtgggatggtggaagaacacttttttattctccttgtagaagtcgaatttttttctgtctatgagaaagacttgctaatcagtttttttttttttttttttttttttttttttttgttaaatgctaggcttgtagaggcttacttaaccgttaatggagaacgctggcaatctcgcagggggagggagaggggaactgttatctcactgtagcatttaaccttcacttttgtgaaaggtaaatgcaacaaggtgattacctggtttatcctgctcgagtacactctgtgccatggg

SEQ ID NO: 543234 - DNA, 738 bp, Homo sapiens
  misc_feature (427)..(428): n is a, c, g, or t
  misc_feature (430)..(430): n is a, c, g, or t
  misc_feature (443)..(444): n is a, c, g, or t
  misc_feature (578)..(578): n is a, c, g, or t
  misc_feature (634)..(634): n is a, c, g, or t
  misc_feature (645)..(645): n is a, c, g, or t
ttgttttttccaaagggtggatataaaaaacccccggcccgcccctaaaaatttttccccacaaaagattaaggccccccgggttttttcctggccctttttccccaagggggtcgcgctgaagggatttggggaaaacctgggtttaaccccccttaccaattttaaagtaaacccctgccctggaatttcaagacgggcaaatttaaattcggcctgcaaaaaccaagtttggcccttaaaaaaagggaagttttcctttcccttttccaagggttttcctcctcccttatattccccccttccttcccttcttgccctgaaatgactccttctacaaggatgtctaatgtgggaaaaaaattaaactcaatgccaaggacaacgggcattatctgttgaatatgaatgctgagtatgtctatcnncnagcatctgtgtgnnatgagcggagctcccatccctggagtatcagcgagctgatctgcggtgaatgtaaattgtgcccgattggtaaatccatttttggcttcccagctctctgcccctgtggcatttctctcttagcgcagatattngatataacagtgggaaattttccatctagaatgctgtgatgccagacccttccccntagtccgaagnatgtgtttgggaaattctcattttccgtggatcacagctgagctatatggcctgagggaaaccgtgcgctgctggacaaatgccttggattgg

SEQ ID NO: 543235 - DNA, 222 bp, Homo sapiens
attcctttcatttccaggttttcagtttttgcctgggcaatggccaggggccaggagtggggaaagttttgatggaggggaaaggggtcaccccccccccccgcctggttttagggtgttgccccccaaggcccggcatttgtttgctttgcaaaaatgtttttttggagttggaatttcattatatgttaagaaaataaaggaaaatgacttgtaaggtca

SEQ ID NO: 543236 - DNA, 907 bp, Homo sapiens
gtccatgctggctgccttcaggaagctaaagtatgttggacctagtaaactagtcagtgttggaaacggccttgaaatatttaaaacatatttgtaaccagtgaggcaaatacagaagttgatgtcggcagtaaatggaaaacaatacgtatgtcatggatattgtaggtttccttatgctgtttttactgtgcactttttaaaattaggttttaatttcagtatgtaagaacaaatatttgtatactttcaaactcaattatatggtaatcgattggtatctatggaatagatatatgtttctggaaaaaaatgcttaaatgtcaaactgtcattacttcttattatagttgaaggcattctccagattctttttaaaagattgttcatatttctctctctctctctctctctctctctctctctctctctctctctctctctcttctttctctctgagggagagggagccctccaaactacagatcgtgtgggtagagtatcattatcttcagctcttagataccgtgtgtgagagtaatagctaaaggaagttcatgtcaataaatgcatacttatatcacaaaaaaaaaaaaaaaaaaaaaaagagcacaccaagccaagaaaaaggaggctgggcgccacacacaagatgactaccccaggggggcgcacaaatagaggcacccaacattttatgaaaaaggagcgccacaaagaggggacctaattaaaagaaggcgacgcggcagtatacacaagcgtgaggagaaacagcactcggaagaagtgaggagaccaccatgcgggcgggacatagaggaccaccacgagaagtagaggcgagagggaaaacagcgaggatgggagaccaccgacgtcgcgcaagaggctagttatagcaacg

SEQ ID NO: 543237 - DNA, 835 bp, Homo sapiens
cgcggtggctcatgcctgtaatcccagcactttgggaggctgaggcgggcagatcacgaggtcaggagttcgagaccagcctggccaacatggtgaaaccccatctctactaaaaatacaaaaattagccaggtgtgctgacaggcacctgtagtcccagctactcgggagaccgaggcagaagaatggcctgaacctgggaggtggaggttgcagcgagccgagattgcaccactacatgcagcctggatgatagaccgagattctgtctcaaaaaaaaaaaaaaaatttaaggcccgtttttacaaatttattttcacggtcctgttcccacggtctagaaaaaatctgtcgttttctacaacattaattactaacatacggtgtttccccttcaatggactggccacacccagggcagctgtagcttggggtgaaattctgacgaatgtgtgttcatcccctgtacattctccatacggatcggtcaaagattgttttctaacctttcttctcccaactcagctaacactagcgggactcctggttgttcctatttctctcccgccggggggggcgaccagagcaatatatggacaaaagagccaaaaaaatcataaaaagcaacaagagaaaacatggacagttaaaacacgaacaacaaaacttaataaacgcgagcacaacaatagatgaacaaacaaacacaaggctacaacagaataaaagacacagcagcgacaatgagaacaacagacaaaaaagaagacaacacggagaagaacaagcaaaaaaaaagacaagcacaaaaagactagagaagcgtacagacaga

SEQ ID NO: 543238 - DNA, 583 bp, Homo sapiens
agcggacgtggcctctcttccgttcgtgtgactgctgtgtgtatagtgtcgtgtcgtcgtgtgggcagtggcggcagaatgttggctaccaagatatttagcctagattggcaagctgagcaattatccaccgtctgtgtgtgtacagagcatcatgaatagtgttgtgaatgatgcagaatgacattttcagcgtcccagctttatatggatcggtgctgtgaccaaccccattgcctgagaggtggccccgatgtcggagcagcctgtctgccagccgagacaggccacttgtaagcgatatatgtgagaaaggccgtctccttgggaaggccctaggctccctccttccccaataatagtgggcaatttggcaacggcaaaaaaaggtctgccagttttggtaatctgcatatatacaaaggttttccaaaacgtgacagtgagccgtttgtgccatagaaaggaaatagggaaaactaagtgggggtgcatctcacacacatgagatagggcgaaatcccaggggattagatatgaggagccaggggtggcccaaaattaggattatcttattcaaatc

SEQ ID NO: 543239 - DNA, 295 bp, Homo sapiens
acaaggattttggacccttccttcagctgggcagccgtgcagtgctcttccagcacccgctgcaaagcgagtacattatcataacaaccacccacacaagcaccaccgagcccttcctagtggatgggccgaccctgggggcccagcacctggaggcaggcggctccctcacccggcatgtgacccaggagtttgtgagccggacactgaccaccagcggaacccttagcacccacatggaccaacagttcttccaaacttgaccgcaccctgccccacccactccttgtccagc

SEQ ID NO: 543240 - DNA, 341 bp, Homo sapiens
  misc_feature (147)..(147): n is a, c, g, or t
  misc_feature (185)..(185): n is a, c, g, or t
  misc_feature (193)..(193): n is a, c, g, or t
tgcctccatccccgcgggcactcggggggggggacgatggcgggacgggtggcgccggggttccagccctgcgcctgttctggatcaccgggtttttctcgctgaccccctcgtcccaggaccccgcatgcccgagtgcctgggctngtcctctttcgcgcccgctgccaggtgccagggccgcncaggcggncggaggtgggcaggaagcgccacgccgaggagccggggactttgggagctagcgggagacgccggcgtccgtccagccgacccctctgggccgtggtcgacggctcccggaactggccccccgcgggtaaaggcctaccggccttgat

SEQ ID NO: 543241 - DNA, 326 bp, Homo sapiens
tcccactgtcgatgtagatttcaatatagatcatcctaatgtgtatggtggtcccttgatatctgtagggggttggttccgggaccctctgcagttaccaaaatctaggaatgctcaagtcccttatgtaaaatactttaaatcatctctaaattacttacaatacctaatacatacaatataaatgctatgtcaatagttgttatactgtattgtttagagaataatgacaaatgaaaggactgcacatatttagtagagatgtaaccatccattttttccaacaaatattttcgatctgcggttggttgaatccacagatgctg

SEQ ID NO: 543242 - DNA, 259 bp, Homo sapiens
ggcaacaggaagaccatttggaacgcttccgggggcaagaggttaatttcaaaaccatcattaagaaattcctgacgagggaggtggagcgggccaggcttggcatcacatagtgggccctgcttcgggatcaggtgaggcccctgggccaactaaaggcggtacatgcgttcaggacgcatgtgaaatctacccccagttgtctctccagggttcccagctcttaatgtggtaccactgtatttctgttgcccatgtc

SEQ ID NO: 543243 - DNA, 754 bp, Homo sapiens
cggacgcgtgggtccgcagattaaccccctaataacaattaattaaccactcattcatcgacctccccacgcccatccaacatctccgcgatgatgaaaacttcggctcactccttgcgcgcctgctcatgatcctccaaatcaccacaggactattccttatgccatgcactactcacctagatcgccttcatacccgcctatttcatcaaatcgcccacattcactcgagacgtacatattatggctgaatcagtcctgctaccttcactgccaatgtgctgcctctaagtattcttgatctgcctcttccgtacatcatctgggcgaggtcctatattactggatcatttctctacttcagtgaaacctggaaaccatcggccattcatccatccttgcttgacgaacctgatcagccatacagccgtgtcagtcagggcgtagtgtccttcccgttgaggccaagatatcgattctgagggggccagcaggtaatttacaaacttactactccgccactcccatacagttgggacaggaccgtaggttcaaatgaatctgatggaaggcatacatcagttagacagtcccatacacttcacagcggacttccttttaccactttcagatttcattcgtttaccccttcaattgtttgacaagcaccttagcaagctacatccatccatccttaattcctaatgcagcagaaatacggggatcaaacgaaccccctaggaatcacctcgca

SEQ ID NO: 543244 - DNA, 516 bp, Homo sapiens
  misc_feature (12)..(12): n is a, c, g, or t
ttcgtggaggcnaatatacaacacgttgcaggtttgtagactcaatcctaactatatgaataatcacatcaaatgtaaatagtctgaatatcctaattaaaaaacagagattgggctgggcttagtggctcacgcctgtaatcccagcactttgggaggcagagatgatatttttattttttctttttttcagctctaactccaatggatgatattttgtaaagacccaaatcatacttctaaagattggaaaatataatcactaaagggtggaaaaaaacagtgggatgagattgaattggcaattaagacattgcagaaagaaagatcagtgaactttgaagacagcgatatatattattccaaaaataaaacagagaacaaaaattattttcaaaaaacaagttaatcagtgagctgtgtgacaggatcagaacagctaatatatgtgcaaatgggaacagggagcaaggagtaccagaaacatagtcaattgttcagactttttatgaaaca

SEQ ID NO: 543245 - DNA, 529 bp, Homo sapiens
agacagcaccagtgaataaggaagaggaacgaacaatgaccacaagcgtgaacggaccagaataaacatgccagggcaaatatcaaggcacaatcgtgggaactaagaacataaagcacatggatttttaaatcatggctagcaaatattcaagaatgtcagcacaggtctttgaataaatcttgcttctgagagaagttactatttattcctaattaaatggggaaaaaagtttctaaacgaggaacctctgctttacttattacacccccaaacttaaattcccttttttggcccactttccacaatattttcattcatttttatctttagcatctattaactcacctacatgcttgtcatggtgattgtgagcttgtaataaaacctttactcgatccaatggagcacctgttgtttgggcacagcatccagcaatacctaaaaatcttccacaaggtcaggaagaaatggcgtaccatttctttccagatggaaatcataagtggcccgccactcgggtaccgag

SEQ ID NO: 543246 - DNA, 279 bp, Homo sapiens
gcgtcttccaggccccctctcttcctggacccaccccctcagaatggccaaaaatccccaagtcgtccagcagctctgctttctaagaagcagtatgtatagaggcctgtgcttatgtcacccaacagaggggtcctgagaggtctggctgcctgggatgcccctgcccctcctgagctctcagagatgactggctgggagcagatcttgctggcatgagctatgcagtgtctgacactgagcttctgtgcacagatacgctctctcagatgtgctgct

SEQ ID NO: 543247 - DNA, 322 bp, Homo sapiens
ttttggcacaaaagactggccagggacatgaccagcagtgggctacagcctcgatttatatttctggtggggggtgaactgatttttttaaaaccaaagttaagaaagaggttttggaaatgcctatggtttcttggaatggtaaactggagcatcttttcactttccagtagtcagcaaagagcagtcgtgaatttcgtggtcgcttcctatcaaaatattcagagactcgagcacagcacccagatttcaggcgcccggggaaggctcaccataggtgggtcgaagcggccgaccatggacttggtgagggtaccgagct

SEQ ID NO: 543248 - DNA, 379 bp, Homo sapiens
cttcctatggtgccagacccttgggcggaacttccagatgaagcagattgattcttattgctcctggattaaagaaaagagctcaggttctcccaggaggccctgggcagccccccccaagccttacaatattttaagtgttgggtgtaggggtggcttctcttttctctccaacttgacagcactgttgaatcattgtcttcatttgcctatgagatggttggcattgccctttaaagcgggcccgcttgagctaaagctaaagggcggtgtgcagcagccgggtgaccctttgtttttactttgccttccgtgctaagtgttgacttttgatgagtttgatttcattcatttcagataaacatgtatggtgaataaa

SEQ ID NO: 543249 - DNA, 481 bp, Homo sapiens
gagaaccgagggacatgagcaccacacaaagagatggtttagtttttaaaagcatttctactaattgatgcaaatgtaaatagccttttaggtatgttataaataaaatttgatacttgtggattattttgttacttgttttgtttacagggatgattgtgtgtgaacttgtaaagtaagagcaaatgagaataagattctaccacttgggtgataattaaattcacacagaggaataccttacactggttttaaaaagagtgtaataaatcatctatattatatggatagacttcttgctttgatgcttggcacttggtctcctctgttttgaggtcttaaggtgttgaacacagagttatgttcattgcagataatattgtccatttatttttcctccagatgcatccgttttattttgaacagcattgtgaacttatttgtaacgcctgtttgctttcaaatacagaacaagaattta

SEQ ID NO: 543250 - DNA, 422 bp, Homo sapiens
  misc_feature (8)..(8): n is a, c, g, or t
  misc_feature (28)..(28): n is a, c, g, or t
  misc_feature (386)..(386): n is a, c, g, or t
  misc_feature (419)..(419): n is a, c, g, or t
ccccattnaactgctgggttcccccaanccccctgccccccaggcttgccacgaacctagccgttccaggtgatgattgcccccaaggaatgaacctgccttgctggggcagatgcctgaaatcaacccccattagaactttgaatgagggcccgggagcagcagctcctcatctgtaatccccagcactttgggccaaggcgagaggatcacttgaggcaaggggttcaagaccagcctgacagtgagaccgcatcactacaaaaatttaaaaatttgccgggcatagtggtgtgctactgtagtccagctactcagaaggctgaggtgggaggatcgcttgagcctgcctgggaggttgaggttgcagtgagtcgagattgtanccactgcgctccagcttgggcaacagagcgagnccc

SEQ ID NO: 543251 - DNA, 992 bp, Homo sapiens
tggggcaagcttaccgaggagcagcttaggacaagctgatgggtacgctgaggaacacgaagcccaactttgtccgctgcatcatccccaaccacgagaagaaggccggcaagctggacccgcatctcgtgctggacagctgcgctgcaacggtgtactcgagggcatccgcatctgccgccaggggttccccacaaggtttgtctcccacgagtccggcacagactatgagatcctgactcgaaactccatccccaaggggtttcatggacgggaagccaggcgttccgtgctcatggctcaaagccctggagctcgacagcaatcctggtcccgcattggccacagcaaaagtcttccttccgctgcacgagagtgctggcccacctggataggaggaagcaaccactggaaggatcacccgaagtcactcctacggtacaaggcctgcctgcatcggtgcttaccagtgggcacagggccaagccttttgcccacgccgcgccccgcccgccaggcttaccggcccactgacaggtcacccaagcgggaaagtgcgccatgccttaccgaggaaagactgcggacaccatgtggtcatggaaggaccgacacctacacccacggctcaagaccgcatggcatgcaatgtgacacccggaagaggcaggccgctcgaatccccccaatgaaaggcaggacaacctggcgaaagcgcagacgaacacgcagctgccgcggaccaaaccagcgcccacgggaaatcggtacgcctggaagccaccacgagcacgagacacacatgccggcgaccgacacacgacccaggacaaccacccaagcccgaggtacccagagacaagcgccccggaccacctgacccgcacacaccccgcataccagacgacagcacgcgacgtaaggccaggaagcgagaagacgcacccaaacacaacacagaaaacgacagccacagaagaccacacacgacg

SEQ ID NO: 543252 - DNA, 368 bp, Homo sapiens
atctggaagcaacaagatgtctttcagtaggtaatggataactgtggcataagcagcttgctgaaaaggaacaagtcgaatatctgaaaaagagaaggaaaacaggcagcgccatgtggcctggggccaacaatatggggaatgaatccaccatatggaatgagtgtaagatgagtgtccttctggaggtccacctttccctggtgaaactgtatcaatccaggtccatggtgagagcaccttgatctctcctcaatctcagatatcacactgtaaatgagcagccacgcgaaaccatgagaagaaactgcacgagggtgtgtcctatgtgctctcacagaaccaggcagctacagtaagatgccatt

SEQ ID NO: 543253 - DNA, 238 bp, Homo sapiens
aacgcccagctaatttttttctttgtatttttagtagagacgaggtcatcatgttggcaggatgtctcgatctcctgacctcgtgatccaccgcctcggctcccaacagttgcttgggacttaaccaggtgtgagccactgcgcccgggcccccaggctaaatcttttacaaaaaaagttggtttttgtaagagatggggtctccctcattgttgcccgggggggttaacccggaagg

SEQ ID NO: 543254 - DNA, 617 bp, Homo sapiens
gtccaagtcgggcgctgcaggtggaatccagctgcaagggagttagggaaatgaaggtctttctgtaaaagcttctcagccttcctagggaacagacatggggggagccaatctgcaatctgctacgacaggcatgagaccagttagatgatggaaatattatagagagttatgaacacttaaataatgatagtggtatgacatgggatagaacatgggatactttaggaagtggaattgacagggcatattagtggaggaagtggagtcatttgagtctcttaatagccaggtatcataattaccaagtgaagctgggggcacatatggtctccatgttacagttggggaatataatggagagattagtatggttctctgtcatgcccacaagccctttgtacggaagagggccctactatagcagttgttatatgtgtcaattgatgagtataatgaatgagagttcgggtacctcctgtctttacaaatatgggtgttgccagtattggtccttttgaaccatgccaatcggggtgaagggagtgtccattgtgggttcactgtgtatatccctgataggtataattgggtcctagaaatctttatacatgcag

SEQ ID NO: 543255 - DNA, 379 bp, Homo sapiens
  misc_feature (179)..(180): n is a, c, g, or t
  misc_feature (274)..(274): n is a, c, g, or t
  misc_feature (295)..(295): n is a, c, g, or t
  misc_feature (323)..(323): n is a, c, g, or t
taggttacaaaggtgacccgtccaagggggctttttctaatgaagtgagcctcagtgtggattttgtaggttttagttcaatgtttaagtctcataatattatcaatgtaccgggctacgattttcaaatactgatctactactctcttaacatgtttatagtttagtgaacatgtccnntcacagcatgaacattccagagcctcaaatgactgtaaccaaaccaactgaaaatactcccaactttaggctgagtattaccctgctctacagnacccctagagaagggtgtgtnaaagcagagagagtcagtaataatcaanttttatttccacatttaaatgggctgataagggagaggggatccgtgcacgttaac

SEQ ID NO: 543256 - DNA, 874 bp, Homo sapiens
ccccattaaatatctctcaactctaaacaggctcccatcatctattatccccaccccacctacaccctcatttaccaccgcaaaactttaaaacacacccccgcgccaaataaaaaatcatcacaacccactctcccactcaccctactctataaacctccatacacaacaccactcaaaaacctcaccaaaacccctcccccatcctactcctaacacccccaccacaaccaccctcttacacatcaccctcctaacacaactccactccccaaccccaccctctcaccccccccccaaccacccacaatcaaattcctcactacacccactacaatcctcaccccccacctcccctctacaacactccacacatcttacccacctcccaccacttcactccaccaatcctccccaaccccattccatctctccaccctcacacatccctaaaccctctcaccaaatacctcacaaactcccaacactcccccttcttcacaccctacaccccacacacccccactccctctcacccaactccacacccctcactccaacatactctcaccactcaacctctcccaccctcaaccccaaccctccatcactcatccctatccaatccactccccccctatcccctctacacctactcacctactactcacctcatcaaccctctatccactctcccaattctctctccaccacccaaccacatcaactaccctcactcaccacactcaccacacctcactctatctcacccctcttcttccaccctcaccacatcctcactcacactctactctcactctacctcccaccctccctcctctacccatccacacactctctacatccaccccct

SEQ ID NO: 543257 - DNA, 169 bp, Homo sapiens
atgcagacacgatcccgagcatcccagcccccaggacaatgagagtgactcggactcgtcagcccagcagcagatgctgcaggcccaggcccccagccttgcaggctcccactggggtcaccccagtctccctccgtcagctcctccaggggaccccatcagactgccc

SEQ ID NO: 543258 - DNA, 520 bp, Homo sapiens
  misc_feature (44)..(44): n is a, c, g, or t
  misc_feature (372)..(372): n is a, c, g, or t
ccaaatcattgagttagggttcggggttgggttttctttctttncgcaccaaatttaacccttcaaagggaaacctttgccgtcccccgagggcgcataaaggtccctcgtggtgagggtccatgctcccccccttccccccgtagagaggggaattccttaccacaaggacctcccaaaattagggtttggggcgcttccgttcaccttttaaggcccgggggggccccccgtgggtgggggcctttttccaatgggggcccgcccttgggggtttttaatttttccccccccagggggggccctttttttaaaaaaaaaaaggggggtttttttttttttttttggaaaaggaattttggttttctcgtncccccccggggggatccttttttcccctggggccaatgtgagaacggggggttttccctatttttttcccggggttgggggttggacccggggcccccccccgtaatgccttgcctgttcccatgtaataaaaaccccctttttttta

SEQ ID NO: 543259 - DNA, 186 bp, Homo sapiens
cataatattatagatagaatattagtgattacgggggaatatacagccgatgttccccataacaatgtttcagtgatgaacctcatatgtaatagaggttttcctaaaattataatagatatgtttagatacacaaatatatacactgtgttaaattgcctgcagtattcagcacagtaacctgct

SEQ ID NO: 543260 - DNA, 1148 bp, Homo sapiens
tctatggaggtgatcctgtgtcttctttccattctagtatgttgttatgcctcgtgctcttttttcctctctctgcctcctggttgttatttcctgtattctgtctttttcatcttcgtgtcccctcatccttcttttcacgtgctagtcctccaattaattggtatcttgtctatctctttgtgtccttgctctttacccatgcatatgctggcgattattgtcatgtgtgtgccatagtgtcactatagtccgctccctatcttaatgcccacttgtgcgttacttcggtgttatccattgagatgtatgtccattagcctccaagtcattcttcaactgccttcttgcattccccttctgcttttctctcccttgcttagttcatccaattgtcatcttttgggttattcttgtgtataggatctatattatccatcatcgtccatgctactctctggtcatccctctgttatgttttgttgtttggctccatttccctggtgaattcctgttgtgtcgtgattgtcgcggtggtctttctcagaatcatttcagttcctggcttctattcttggcgcttgctcaatgattcttgttgtggtcattaggtctattcccatgttgtctgatcgggaaagctctactggcatggccttttcgtgtccctcactgcctacgtgtcatgtggtggacctgactctgccgtctagaaaataacctgctcattatatgatgtacaatcaagaaggtggtgaagcaggcgtcggagggcccccttaagggcatcctgggctactctgagcatcctaggtggtctcctctgtacttcaacagcgacacccactcctcctacctttgtacgctggggtctggcattgccctctaacgtaccactttgtctagctcatttcctggtatgtacaacgaatttggctacagccaacagggtggtggacctcatggcccacatggcctccaaggagtaagactcactggaccaccagccccagcaagagcacaagaggatagagagagaccctcactgttggggagtcctgtcacactcaggtcccccaccacacttgatctcccctcttcacagttgcaatgtagacccttaaagtagaggggaggggcctagtgac

SEQ ID NO: 543261 - DNA, 234 bp, Homo sapiens
tgccctggggaactaaaaaggggcctcctttattggaaaatttgctttattactttggtttgggactgcccccccccatttttgaaggatgcatggatagcttttcataacccagatatcccctttggcccgatcctattggttctggacaatgttgatgctaaccttgatgatatccatccctattactgggatccttatccacaaatccataaatattttttgaacctttta

SEQ ID NO: 543262 - DNA, 215 bp, Homo sapiens
aaataagcccaccaaggaaggaaatcaaagcgcatcgcatagtggtttccatccatccatccatccctttctctcgttgctaggcagctagatcttgatcttgtgttgcaggccggccatggacggcgggaagaagggcggccgggaccgcaagccggcgcaggagcgcagcgaccgcaagtcgggcaccgggatgagcggcgacgccaagaagg

SEQ ID NO: 543263 - DNA, 666 bp, Homo sapiens
cgtttttaaggagaacacaggccccctgagttcttcaccttcgaggaggccctccctatttggacatggtgattgcagagccgctaggtatgtccccgccagctttcagattcacccggaaggcagttcaggattgcgaggtgttggggcagggcatccccgcaggcgctgtgctaaagatggccgtgggtgccctgcaccatgaccctgagcactggccaagcccggagaccttcaaccctgaaaggttcacggttgaggcccggcaacagcaccggcccttcaagtacctgccctttggggccggcccacggaactgcctcggggtgggtttagggctgcttgaggtcaagttgaccctgctccacgtgctgcccaagttccggttccaagcctgcccttagacccaggtaccgctgcagctagaatccaaatttgccctaggtcccaaaaatggtgtttatatcaagattgtatccccctgacacaaaagggtgcccggggggggggagggcccccccaaattcaaaaaaaaccctaagtgtggatgttcagaattttggaaaaatgtccctgaagtgattgaaaaagggcctggcatgcaaggataaaaggttttttacataacatttcctaaatgcttaataaacgtttgttgcccttgga

SEQ ID NO: 543264 - DNA, 841 bp, Homo sapiens
cgtggtggcttacgcctgtaatcccagcacttcggggggccgaggcaggcaaatcacgaggtcaggagatcaagaccattctggctaacatggtgaaacctcgtctctactaaaaatacaaaaaattagccaggagtgcttgcaggcgcctgtagtcccagctactcgggatgctgaggtggagcttgcagtgagccgagatcacaccactgcactccagcctgggcgacagagctagactccatctcaaaaaaacaaacaaacaaacaaacaaaaaccctgaaaccaaaaaccaaaacaatcctaaagactgctgtagcctaatgagaggttgatatagttgggtctgtgtccctgcccaaatctcatgtggaaattaattcccactgttggagatggggcctgctgagagctgattggatcacaggggtggatttccctcttggtactgtcctgagttctcatgagatcttttgtttaaaagtgtgtagcacttaaccaccgcacccagaccccatcttggtcctgctcctgccatatacgaacctgtcctgctttgccttcaccacgagtgaaagctcccttgaggctccccagaagcagatgctgcatgcttctatacagctgcagaactggtgacaattcacctctttcttataataccagactcagtattcttttgcaggggggatggctaaacgggtgaaacccggctcggggtttggctaaaatttcactggggggtctgaaacattcccctttttttggggccaaaggaaattggggctaaaccggtccccggggtcgaaattcccgaatggaaaaagataattgggcaagg

SEQ ID NO: 543265 - DNA, 112 bp, Homo sapiens
gaccgacggggtccggcttgactatcgggacggactcctacttggtgacgaggggcttagtactgacttactggcgcgttgacttacgtacgtacgttacctgggttgacac

SEQ ID NO: 543266 - DNA, 320 bp, Homo sapiens
atagcgacaccgtactacttaatgatacaagattagtcatccctcagtattaatggggaattgcttccaggaccccctatggataccaaaatctacagatgctcaagtccctgatattaaatggcatagtatttgcattacctatacacatcttctcatatattttaaatcatctctagcttacttacagtacctaatacaacataaatgctatgtaaatagttatactgtattgtttaggatataatgacaaggaaaaaatgtctatatatgttcagtatagacacaaccatttttttttttttctaaaatattttcag

SEQ ID NO: 543267 - DNA, 201 bp, Homo sapiens
agcaggatcctggacagcatcctaaccagagaaccaggggtgccgtattatcttacaagaaaatgcactgtagggatctaataattgtagactcagtagagactacaactccccttctggccaaaggtgttctttcttttacactctattcatgaagttccacatggggaatacagaagcttcataattctttcccccccc

SEQ ID NO: 543268 - DNA, 178 bp, Homo sapiens
cgatctgactacgcggctaggagtcaataaagtgattggctgagagggcgaaatattatgctttgttgtttgtatatatgacaaatgtcaattattcgctaggatgacgtatttatagtcatacgtgtaacggacgcctcctagttagctaggtactgtacgctcgagtcgcagcaca

SEQ ID NO: 543269 - DNA, 143 bp, Homo sapiens
  misc_feature (59)..(59): n is a, c, g, or t
tgagctcggtaccgctggtacagttgtgggactgcatgctactgtctagagctgttccntggatctagaacttcatcgcccgctgaatgacgcacaggatggcgccccgaatgcatgccgccgaatgcattcggcgcgcagaa

SEQ ID NO: 543270 - DNA, 301 bp, Homo sapiens
ctgtcgcccagtgtggagtgcagtggtgtgatcttggctcactgcaaactccgcctcccaggttcaagcgattctcccacctcagcctcctgagttgggtcctacaggcgcacacgaccacgcccagctaattttttgtatttttagtagagttggggtttcaccatgttagccaggatggtctcgatctcctgacctcgtgatccactcacctcagcctcccaaaatcctggggttacagatgtgagctaccactcacgggcccaaatcttcttgatccatatgtttaaatatatttttt

SEQ ID NO: 543271 - DNA, 299 bp, Homo sapiens
  misc_feature (53)..(53): n is a, c, g, or t
  misc_feature (55)..(55): n is a, c, g, or t
  misc_feature (102)..(102): n is a, c, g, or t
accccggggtgtgtgtgtgtgtgtgtgtgtgtgtgtgaaaaaatacatagganangcagtagttctctttatctgtgcaatcacattctgcagtttcaggtnctgtggacaactgtggtgtaaaaatatgtgagtacagttcaatgagatattttgaaagaggccacactcacgtaacttttatgacagtatattgttataaatgttctcttttattagttattgttcatctcttactgcctctaatttatggactttatccaaagtgtgtacatataataaaatacatagtatataaa

SEQ ID NO: 543272 - DNA, 718 bp, Homo sapiens
ctgataatggcattatgatagcatggaagggtattgaaagactacgtgctggcttgggcatattacatgacatagaaggcatccgctatgaaccaagaatgtcctcttggagtagacatatcaaaagaagttggagaagcttccataacgagtaccagcaattaaaaatggcagattatgactttcgtgcgtgttgcaagaaaagtccctaagagggtctcactctctgacctcagctggagtacaggagccagatcacaactcactgctagagcactgacttcctgaactcaagaaatccgtcctgcgtttaggcctcttgaatagcccgggactacaggtgtgcatgtccatgcgccagccaagtttatttctattttttgtagagacaggctcttgccatgttgcccgggctggtcctgaactgctgaattcaagtgatcctcccaccttgggcctccagaagtgctgggattatgggtgtgagccaccatgcctagccaaaagtgtttcttaaggtatacattctgggtcttagaagacgttatacatttgtaatatttattactaagatatcgtcaaagtgattacaataacatgttgaccactgtgagctacgtttgaatcatggcttctgtgcacaccaagttgaaaaatgttaaactctgtgatatatacactagttataccagctcatgtcagtcaataaattgaaggt

SEQ ID NO: 543273 - DNA, 204 bp, Homo sapiens
tatagcatcctaagcagactgttcactgtattgtggacagtgcatggagaggcagtggtgggaatcttcttgtgatatgtgggtggtggctgtatggagtggagtggtggtgaggctggctcagtcgcgtggcactccctgctgactggctggatgcggtcctggatggaataatgccttcagtgagccacttgaccctgcaca

SEQ ID NO: 543274 - DNA, 431 bp, Homo sapiens
  misc_feature (40)..(40): n is a, c, g, or t
ggtgtgtgagcatggggaagttatttgcactttctctgangagcaattttgggattccggtttaacaagatcttgctttacatctctgagtattgatgtaatttgatctgtaggagtggccagaagaatatcatccataaaatgaatgatatcgcagtgggaaacatattttgagactcctttaatgctcttcctacaaaatggtgacataatgtaggactgttaagcatgccttcaagtaaaacttgtcattgatagcaagaaacaggttctctatgattaatagaaggcatagagaaggcaaattgaggcttatgcttctcgtgtaatggtataataaagaaacaatccttaaaatctattaccacaagaggccagtctcttggaatggccgccggggaaggtaaaccttgctgtaatgcacccattgg

SEQ ID NO: 543275 - DNA, 351 bp, Homo sapiens
cagttaaaaaaaaaaaatcaaggataaaattaaactctcttctaactctccagtataaattccaattatttgttaaaaatagaagttctattactagcactttgggaggccaaagtgggtggatcacctgagatcaggagttcgagaacagcctggccaacatggtgaaaccctgtcccgtctctactaaaaatagaaaaattagctgggtttgctggtgcgcacctgtaataccagctattcaggaggctgaggaatgagaatggcttgaacccggtaggtggaggtgcagtgggccgagattgagccactgactccagcctgggtgacagagtgagactctgtctcaaa

SEQ ID NO: 543276 - DNA, 520 bp, Homo sapiens
  misc_feature (2)..(2): n is a, c, g, or t
  misc_feature (69)..(69): n is a, c, g, or t
  misc_feature (110)..(110): n is a, c, g, or t
  misc_feature (122)..(122): n is a, c, g, or t
  misc_feature (130)..(130): n is a, c, g, or t
  misc_feature (259)..(259): n is a, c, g, or t
  misc_feature (263)..(263): n is a, c, g, or t
  misc_feature (265)..(265): n is a, c, g, or t
  misc_feature (278)..(278): n is a, c, g, or t
  misc_feature (308)..(308): n is a, c, g, or t
  misc_feature (319)..(320): n is a, c, g, or t
  misc_feature (353)..(353): n is a, c, g, or t
  misc_feature (365)..(365): n is a, c, g, or t
  misc_feature (369)..(371): n is a, c, g, or t
  misc_feature (377)..(377): n is a, c, g, or t
  misc_feature (380)..(380): n is a, c, g, or t
  misc_feature (388)..(388): n is a, c, g, or t
  misc_feature (392)..(392): n is a, c, g, or t
  misc_feature (395)..(395): n is a, c, g, or t
  misc_feature (398)..(398): n is a, c, g, or t
  misc_feature (400)..(400): n is a, c, g, or t
  misc_feature (403)..(403): n is a, c, g, or t
  misc_feature (405)..(405): n is a, c, g, or t
  misc_feature (409)..(410): n is a, c, g, or t
  misc_feature (416)..(418): n is a, c, g, or t
  misc_feature (420)..(420): n is a, c, g, or t
  misc_feature (424)..(424): n is a, c, g, or t
  misc_feature (431)..(431): n is a, c, g, or t
  misc_feature (436)..(436): n is a, c, g, or t
  misc_feature (440)..(440): n is a, c, g, or t
  misc_feature (445)..(446): n is a, c, g, or t
  misc_feature (449)..(449): n is a, c, g, or t
  misc_feature (451)..(451): n is a, c, g, or t
  misc_feature (483)..(483): n is a, c, g, or t
tnggggtatagggctcctgcatccctctgggatctgagcatagaaggctcgggcagagttcggcgagtncataaatggaagcggtattttctggctggcttgaggttgangtgtgtggcctngatctgcncggcctcagggttccgcacatctttgaattgctcccctttggtgctcactacctggttgtcgatgtttcggatcagcttcttgggggcctccttgggagccatgggccggtgaatctactgaacctctncgcnanccaccatcatgtncttctgcaggatgaaggactggagcgcagncttttgggggnntgtgaggggtgtgggcaggggctggttggggcnctgccagggtgngggnnntgtgcnttngcctgtgngagngtntgngnagngngtgnnaagtgnnngngagngtggggnagggncgantgggnntgngncaccgaacaggtagggaacaccttcaggagtncatgcacccctgggagaggctcctgctcagcgccagt

SEQ ID NO: 543277 - DNA, 406 bp, Homo sapiens
cctccttggatatggtcatgccatcttgcacttctccaaacacagtggtctgaatagagtacccgcggtcaacaccattgcccccaccacacagcagtttggccccttcttgcttccccgtgttaatgaacccgagtatcttcttaacttaagtttcatccacttgcggcccgtgctcgttcttgcatatcaaaggggttcccgaccacccaagacttggcgcgggcaacgttccgctccacaacctcatcatagatgtcctcgtgcaaagaggtccggaaggcggcacagcagcagtggctgtggttaaagcacagggcgaagtgggcgtgttacgcggcactatacatagcggcatctcacatgattatgttggcgctcttcccctcgtgccgtctcctacagc

SEQ ID NO: 543278 - DNA, 356 bp, Homo sapiens
  misc_feature (13)..(13): n is a, c, g, or t
  misc_feature (106)..(106): n is a, c, g, or t
  misc_feature (112)..(112): n is a, c, g, or t
  misc_feature (114)..(114): n is a, c, g, or t
  misc_feature (125)..(125): n is a, c, g, or t
ccgtgagttaatnccagggaagatatttctttgatactcggaaatgacaaaaatggaaaggaagaagtcataaagagaaaaattccttatggtggggggggggggntgtatnanaataaacccanaagaccctacatactcaaaagagattcttactattactgagagaataaatcatttatttacatgtgattgtgattcatcatcccttaattaaatatcaaattatatttgtgtgaaaatgtgacgggggggggatctgtctcttctacaattagagagaattgaatgggatttttctgcactaatataaattagactaagtgtgtttcaaataaatctaaatcttcagcatg

SEQ ID NO: 543279 - DNA, 143 bp, Homo sapiens
gctgatgtgatctagaggatcccgatgctctctctgtggggctgccaggctccaaaggccccgttggagagggcagccaaagaggcgaagcttgtgggacgcccaaagggatcaatgtgggtgctgggggctcagtgaatggg

SEQ ID NO: 543280 - DNA, 225 bp, Homo sapiens
tcgatctagaggtcccggtgttatcgatgccacttcacaatattttatcaaaaaactcacctgagaaaactcaaagaatcacaagtattaagcgggagcccagaaggtctgagtgaaagggaggagaccactgggtagatatagtccagtacgggacgcatatcctaagtggtctggtggccttcattgggcccatggagacacagagggaactgtggtgagtgt

SEQ ID NO: 543281 - DNA, 339 bp, Homo sapiens
gcggctcggcagacggtcggtcacgaagcagtcatccattagcaggtccagtgacacctgacgccttctgtcgtctcctcaatatgatacaaataccttcaagacctcaataggacatgactgcaggagggagtcctacattcaagttgaactcggaagtgcaatgactgctagtgcagcgaccgcctcactagatcgtcgggattgcatacccccgtgaggttttagttaacagctaaacaccctaatcaactggcttcaatctacttctcccgccgcaggaaaaaaaaggcttcccacaataattgtattatcaacactagtcctacctataacacc

SEQ ID NO: 543282 - DNA, 219 bp, Homo sapiens
ttttttggggggggggggggggggaactttctttttttttacccaaacccggggggggggtggggggggggggtagttttcttttttttaaggcctttaaaccccgggccccgggtttttttttaaatttccttgggtccccccccctaaatttggggggaattggcccaaaattcttttttcgtttttttttttattaatccttgggttttcccctta

SEQ ID NO: 543283 - DNA, 375 bp, Homo sapiens
gtgtccattttatgcatgtttgaaatattttatttaaaaagaaaaatagccctgccctgtgcgtgggggccactaacggcccaggtccatccattctgaatgggaaggcggagactgccagcacgttccgtggtcgtccgttggtgtgcgatgaggtgttgttccctcatccctcccatccatttcactgtgtgtgggggggtagcagggggtaccacgcaggcgttgaggcagtcctgtataaatccagagtcagttgtttttgtattttaggctattcttccaaagccaggagatgtttggaaattaaggaaaaaattaaattctcgtcgatggtggctgttatagggaaatcagtaaagatcttgagtatcg

SEQ ID NO: 543284 - DNA, 738 bp, Homo sapiens
taacccctctttagtttattgccctcaaaaaccaatttaaaccccccccccttgtaacgggggggcggggacaaaagcaaaaacgccgcaaacccggctgggaaacccccatgtgttcgtggccccccgccatttatcggccctggatggggttttgggtgtttccatctggtccctgtggctggggtgtgagatgttgagagggtgtggagacgcctctgggggggcgcatctggcgccattggtagcccctttgggaagaatgttcagaagggggatgtgggcaacaaggggcattggtccgggcctggggctctcgggggagcaccagggggttgggtccccccagcaaggttctcgtggaggggcgggaggggggggttggggcgagggtctctctcgagggtggttccgcgggagggttgtctgcggagaggccccaacgagggagggggctccccgtggtgtggaccgtgaaaggtgtgaccgcggaagtggcacagagcgggtcctaacccggttgggtgttcatcacgagggggggtcccccatccgagggcgggggccgaggggggggcgcgtctctttcgcgaaaacctttgtggaggaaaccctctccccttttcccctgggggggaaccatcttgtgcccggccctctagaaaaccctgacttgtgtctcccaggggggttccgaagctccgggggggaacctctggggggcacagggggttttac

SEQ ID NO: 543285 - DNA, 443 bp, Homo sapiens
  misc_feature (5)..(5): n is a, c, g, or t
  misc_feature (11)..(11): n is a, c, g, or t
  misc_feature (69)..(69): n is a, c, g, or t
  misc_feature (87)..(87): n is a, c, g, or t
  misc_feature (158)..(158): n is a, c, g, or t
  misc_feature (163)..(163): n is a, c, g, or t
  misc_feature (208)..(208): n is a, c, g, or t
  misc_feature (243)..(243): n is a, c, g, or t
  misc_feature (337)..(337): n is a, c, g, or t
  misc_feature (350)..(350): n is a, c, g, or t
  misc_feature (363)..(363): n is a, c, g, or t
  misc_feature (376)..(376): n is a, c, g, or t
gactnaaaaanggactccaaatccctgaaggctggggaccctggggaatgggtttctcaaaacccccanatgtctgtccccttgganagggtgaggctgaagcacccagggagaaaatatgtgcttcttctcgcccctacctcctttccccatcctanactgnccttgagcccagggtctgtaaacctgacactttatatgtgttcanacatgtaagtacatacacacatgcgcctgcagcanatgcttctgtctcctcctcctcccacccctttagctgctgttgcctcccttctcaggctggtgctggatccttcctaggggatgggggaagccnctgtgcaggtcancttccaggcaatntgaagataggganccacgggcctggcagtgagaggtgtggccccacaccgatttatgatattaaaatctcaactcccaaa

SEQ ID NO: 543286 - DNA, 411 bp, Homo sapiens
  misc_feature (28)..(28): n is a, c, g, or t
  misc_feature (238)..(238): n is a, c, g, or t
ttgtttttttgcccccaggctggtcctnaaaactcccctgccttcaacccaccctccctgccttgcccccctaaagtggtgggattaacaggcgtgagcccactgagccctggtggatgtttttttttgttgttgttgttgttttgagatggactttcgctctgtcacacaggctagagtgcaatggcacgatctcggctcactgcaacctccgcctccccgggttcaagtgattcancctgcctcaggctcccaagtagctgggaccataggccgtgccaccacgcctggctaattttttgtatttttagtagagacggggtttcgccatgttagccaggatggtctcaatctcctgacctcatgatccgcctggtggatgtttttaatgattatccttttgtactgtac

SEQ ID NO: 543287 - DNA, 183 bp, Homo sapiens
taggctgcagtgctccacggaaaagcggccagtataggtgatggggggcagtcgagtggtacggctgaggtaactggtctccaccagcaccttctcgctagatcagagagatgtcaggaaaaaactctgccaggagcacagagaagcgggaggccatggcttactgagaacgcaatcacctgg

SEQ ID NO: 543288 - DNA, 1528 bp, Homo sapiens
  misc_feature (304)..(304): n is a, c, g, or t
ggtgggatcggagtgcattggttttcttagttgcttgcccagtagccccgaggctcggcctccacccaggataagacagtgccctggcggacctggtgggctcctgtgctctagcgagtgtgttgtgcacgtggttagacccagtggtggccgaggtggagtgtttaaccagttcgtcctgatcgtcccgtgtaagtagacgagtcctctggtaagagaatgtataaatagatagagagggcatcgaccgcgtccttcgcagtactcattctctctcgaggttcttagtgtgtacaagcgtccnagcatgtattggtataaccactagttgataccaatataagtatagattcgggctaatgccacatggatggtcgattgctgtttgtgtaagcgtgacacatcttggccttgggcttgacagctagtaggaagcccgtagtaatcaaccatgggtcgtgtgtgatggctcaccagtagaatggtggtgggaccatgtctaagctcgagggatcggaattgctgaagccaccaaggcttgatggtgttgtagtgagactccgtcgccccagtaggaacggctcccatggaggggtctcgcaaggtttgggctaccttatcgtccctctttgacaccggctcaatttggtcaggcaacagatcttggtttgcgtacccttgccgaaggtcggtacacgcgtaaccaggtcaccaatggtgggtcccccgtgttgtggaatagagcatcactttaagacgttccattgcttgttccataaccggacggcatgtactactacctcgggaactatgtttgtctcaagcggggaaggcctttaggaatccttcaccaaagttgtccgcgtcacctgtgtggacaaggttggcgaaccttgtagcacatatcaaagggcacaccgtccacccatactgaaggcaaagactttttagaagacacccattttgtgatactgcggaattatgggaagattatcaagcgcaagggggacacattcggggcttgaatatcttacactagggcaggcggagagttcatagggagggtccagccctttagagaggtcgcccttgtgggttagaagtcccacgcattgcgattacagaggaatgctagggccaaggcccgaatggccccgcaggggaaatctaaggaaacggggaatttttccacttcttcccccctatttgggaagcattcaatacaagtcgcgtatggcgggagaagttcaaaggcctcccaaggtttggacagaggcatccactggtcgaggcataggtagtatccgattcaagatcgccgcagggaacaccatcgggcttggcactagagcggtgtctctgggtagcacacttaagaaccttttaggctttacgaaagtgagaacggccgggaactatacacttgggtggggaacttgacagcaatgtggctggacctatgtgccaagggccacaagtgagcactgtgaccccgtaacacagtatagatacattcaagctgtgacca

SEQ ID NO: 543289 - DNA, 316 bp, Homo sapiens
agagacaagatgaaagggaaaaaaatcagattggggtagcggaaagacctcaggctgagcattttcggggtttcttgagcagtgctacaatgaaagaattggagggacgataaaggagattggtaggaaggcttggttaatggggtttacaaccttagatgttatttaaacaaatcttttgagaaaaagcacatcaaggactgaggattcccttttaaaattcctttctggaatgctgggactggtggctttctttggtattgcaaatttctggcagaggattggccccacctggggcctttaggcattattatgg

SEQ ID NO: 543290 - DNA, 125 bp, Homo sapiens
taggtcggtcctcactaatgtcacaaccagtcccatttttatggccaaactgtattctgaaacaaaatgaaactgcaaactcgtgtgtcttaactccccccagggatgcactccattcctccggc

SEQ ID NO: 543291 - DNA, 439 bp, Homo sapiens
  misc_feature (95)..(95): n is a, c, g, or t
aggaacccctgtgggaaaggtttaaacctaaaacagtgccccctttggctcctcctcccttggcggaatgggttcctggaccatgtgcatttcantgggccatgggatttacatttccttgcatccccaggtggtttgatccctgccagggccccttccttcctgctcatggttttcagggggcctgatcatggaaagtaagggggttgggccttcccttttgggggtgaaccctgactccatccccctattgcccccctaaccaatcatgcaaacttttccccccctggggtaattcaccagttaaaaaaagctttttttaaatgttttgttttggggggggggcagggccccctttttgtttttttaaggagttggttttggtttttggctgatgttttgttttttaacatgcccccagtttgtaaggccaaaggta

SEQ ID NO: 543292 - DNA, 392 bp, Homo sapiens
ccagcaccaacagctgggataattgtagtctgctgacaaaagtctgaagaggcgacctgtattaccatccctgaatgggaacgagacagaacgatccttggggtctcctcatggtcggaagagcgggctttcacttttggaaccaacatctaccattgcccaagctgtatattcggaaaatggctcatgtataactcctagcctgggttaaccatttacagccacacacaaccatagtcactgacgtacttccgaaaaccctctgtatattcctgtgtagcatcaagggggccaatccagaccgtaacactttctcgctggtacctctttaggagtagtcacttcccttaggaatatcctcaggaatcttatgatcccacaagataacctcc

SEQ ID NO: 543293 - DNA, 649 bp, Homo sapiens
ttcggtgctgttgttgcaggtgcagctgctttattgttataaaagggaaccttttacaacaaatatttgaaaaattacctccattattataccttctctttatgtaattgttagttcgaaaattttttcttcattaatataatcaacttctaaaactttctaaaaacgttctctttttcgagattagtgcttcttcccaatccataagaaatgtttcctttcttgacaattggcaccagctggctactcgttgctcgaaaactactctcttttatttttaatttacgaacgattatctttcgaaggaacgaccaaacgagctaaatatgggcatcgccaacgttaaaaaaatggaccctaccgaagacgttattatgccaaggcgcagcgaagagtctgtctccttgagaaaaaatatgcatgaaacaaaatagacacgaccagaccctcttcgggaaaaaaagtcaagatttaacacgtggctacaccggctggcttacaaccaaccaacataagatcaaacaaccctcaagtttagaaaatccctaatagcaacctctaaaaccatagacttctccattttcacgtactaaaaaagttcgggtatgatgtcatacaaatcctttcaacaaaagatgcttcaagatca

SEQ ID NO: 543294 - DNA, 978 bp, Homo sapiens
gtcgtcggggttccctgcttcaatcgtgtgcttggactggaacccgtcgctcgttccccacctcggtcggcggtccataggccagcttctccgtcacccgcaatctccgccacctgcgtccatgtgcgcccactgtgagatatagccccacgccatggcgaccaatcacagtctcgcaaatgaagtcttatccagcatatatgaacattcatgcgcgtcccttctcaaatataagtcaaactgaaggacctggtagagatgcattgcgcttttctttgccccccaagtgcattaatagcttacattcgaccgactttggtacacagcaggtactttatacaagattggaattctggcgcaagaaggtaacattgttacacgccgggcaatcttaaatctcttttacgtatggctccaaaagctttaacagtagcgactcgattgacagatgggggcacgatttttagtgacctcttagggatcatagaagacgttgttgctagcagttttcctccaaatatgggattgtcgatgatatcacgcgtaagggtttggtgtgtgtaactttatcattggggacccacttgtatgtaggaagtcgcatgagaatacgggtaaaagggatagaggcagactttgttgagaaccagggacagctatgtggggccaggaatgaaagtggccagacattacatccaatctattaggtaggctgccacttcaaaactaaacacagcagcataactattgttaattcccaaggagatcactttattgtaaaccattagcagacgtttgtcctatcaggtgatggctgattaggctgcatttactccgggattgggagctagtgtgagttgtgtgtcatggtacgacgaagacctgctgcttaaaactgcttgggttgcgttactggaatatagtcgagccaaagaaggccccctttagaagatatccaaacggatgtgcgatggactg

SEQ ID NO: 543295 - DNA, 350 bp, Homo sapiens
tcagacgtgaactatgtgttaaaattcaggctggagtgcagtgtcagaatcataggctcactataattttgaactcctttttgcccttttttaaactggattatttattgagttttaagaattgctaatattttaaaaacagtttttcttaatgtttctattttgagtggggcattcaaacttttctgagccttgttgaacattattagatctgtgggctgaataatagtttccaggcaattaacatttttgtttttgcttgttttagatagtgactcagacatctcctctacaagtacctaacccatcctggatgcaccaccattcataccacatagttcagcgtctga

SEQ ID NO: 543296 - DNA, 119 bp, Homo sapiens
gccggtaccatctctccacactggtgggaggcagataataatcatagaggacaatctagtttcattgtttaaagacagacagcatataggggaatcttgagtaattcaacacgcggttg

SEQ ID NO: 543297 - DNA, 552 bp, Homo sapiens
agagtacagtaattcaaatatagcacagtacagagtttaccaaaaacacataaaactttgctagatagacagtgaggtggaaaggaactaaaatgtatctctcttgaatagcatttggggttcaattgaatttgttgtgtttacaacagcaaagcaccgttagcctggacagttgcttatggcatcgatagggttggataatattctgggatttgttgcagcagaattcctctatctgatgatcagcagttgaacataaacttcataattatagtaaaatttaggaaaaactatgagtgtgaagagtatgaactgattgggtagattaggcagagtgcattatgggcaagacaaaggttttcgatattaacttcttttaaaataaactttttattttcaaacagtttcagttttacagaaaaaatgtgaagctagtacagagaggtctcatttaccccacacccagtttctcctgttattagcatctcacattaatatgtggtatatttgttacaattaataaaacacattgatatgttaatattaaaatta

SEQ ID NO: 543298 - DNA, 184 bp, Homo sapiens
cacggttgctcataaacctccaaaacattacgctacgtcaaagaagccagagcacaaaagatcacgatcatgtatgatgccacttacatgacaatatccagaataaatcaatccacagagacagaatgcagattgatggttactccggggctggaggcacgggcagaactaaggacacacctgc

SEQ ID NO: 543299 - DNA, 318 bp, Homo sapiens
  misc_feature (164)..(164): n is a, c, g, or t
  misc_feature (293)..(293): n is a, c, g, or t
  misc_feature (297)..(297): n is a, c, g, or t
ctgacgcgggaacataagttcgacaacttaaaaaatgataacaagtccggtttatccccgctgatgcagggaacataataaaaactttaactagttcggtttatccctgtttttacaaggaatattaactacactcgatgtctttagaataaaagacaatacgnatcgcactttatcaattttcacttaaagtatgaactggatatctttattcataagaactattcatcaacagcgtatagaggcggttatgtaaaaccactcattagcctcaaaacaagacaaacttccanattnttacttaaccaatgaataaca

SEQ ID NO: 543300 - DNA, 456 bp, Homo sapiens
tatactggagacggctgcacaacagtgtgcgtgaagctttaaagttacgagcttacgcttaaaagtgcttaaaatgttgtgggctttttgtttgtgtttgttagagagtttcactctgtcacccaggctggagtacagtagtgagatctcggctcaccacaagtccgcctcccgggttcaagcagttctcctgcctcagcctcctgagtggctgggattacaggcacgcggcaccaggcctggctaatttttgtatttttagtggagacggggtttcatcatgttggccaggctggtttcgaacttctgacctcaggtgatccgcccacctgggcctcccaaagtgctgggattacagatgtgagccaccacgccaggccctctctttgaatttcatagaacaagaatttttgtgctagggctctttggctcaacattatatttgagatgcatctg

SEQ ID NO: 543301 - DNA, 594 bp, Homo sapiens
cggacgcgtgggtcgacccacgcgtccgcagcaaaaggtgggatctaggacgaaagaatccagtgtagaagttgagaagaacttgaacgtttgggttctggataaggtccctgacgcggccggcctctcacaaacagcacaacaacaggacacagtcgcacaaccacgcgccgagagttcacagcacgaaccacagaacagccggcacgcgcagagagccccagcaagacgagcccacaccgagtaacggcagaccactcgtaagcaccaagacaacaacacacggaagagagagaaaaaacaaagccgcaaacacaaccgagcccaccaccactcgagaacgacaagaggcccacaacccacacaccgaggcaaaccaagagaaaaaacaagaaagagaacacaaaccaagaagaccgaacagaggagaacgacagagccaacacaaaacaaagaccagagacgaacaacaccgcacaccagaacacaggaacacaggcagccgaccagaaccagacggccagagagacaagacacgccagaaacagaggacaaccgagcaacaaacaacgaccgccaacaaggcaccacaca

SEQ ID NO: 543302 - DNA, 698 bp, Homo sapiens
agctgttaatttttggtttcggtcactcttgatagcagacattgactgaagcaaaaaattaaaagctttatattcaaaatttgcaaaatgaagctgggtgtggtgtgtgcacgcctatagtcccagctacttgggaggctggtggctggaggattgcttgaggtcaagtattggaggctgcagtgtaccatgatgtgtgcctataggaatggctactgcagtccaacctggacaagcgttatcaagaccccatctcttagaaaaatgcaaagattaaatgcaaaagaaatgggctgggcatagtgattcatgcctgtaatctcagtaccctgggaggctgaggtggaaggattgcttgagtgcaggagttcaagaccagtctaggcaacatagtgagaccctgctgtaaaaccacactactaacaatatgttggcatatgggggcatgtgtctgtagtcccagccactctggaggctaacggtggggacggatcagtaacagccccaggagtcacaggctgcagtgcgccatgatccatgtcactgctctcgaacctgggcgatatccagaacctgtctcaaggacaaaggctgcggaacatgttcagacaagggttgtaaacggtttgagcattatattctacaagtatcacagtaacataccttgacttttgatactggtttctcataatgccctt

SEQ ID NO: 543303 - DNA, 582 bp, Homo sapiens
cccccctaggatgcagaaagtagatgacattccatccacactgtgtgagcaaattggagagattgccttgatagaggactgatgtttttcactgatgagatggtaggggttgtcttgctattggagaaatacatcatccctgaagaactgtgagcaagtggagcgagtgtgggctttgaagggtagcgagcttgcaccctgaccggggagggcccgggtcacacagttgttgatgtggaacaggtaattgccctgtttggagttgcctgttctgcccaggaatgtactccagggcctgatggcgatgctggaactcgcactacagtaaataattgataagaggaggcagttgtagggtccacttttagctggaagttcttaggggacagaaaaataacttggagtagtgagtggttctgagtaagctcaggaaacgtcaaataaaaactggatctggtcatttaacacgcagctcgcagatatccagtgctagaagaaaacaccaaaacgcggtaaaattctgtatgtgggtccacttcccgtgtctggcgattaaaataagaatatattcttgcgaaaaaa

SEQ ID NO: 543304 - DNA, 332 bp, Homo sapiens
agtcgtctagaggatccagttctggtccccactgctgctaagttgtcactatgtcccctatggctgcctgacatcttttctgggaaaagcagggctgtgtgagtgttggctctctcctttccgtacccagccatgtagttctagaagtaaggataacggcctcctaggagatgtctcgagaaggaaggtcgcacaggatgtggcatgatcgcccctcactggaaaggcagcacaaggtctaaaaaacctagaaaataggcagggccctagacattgggggacagccagtccctggcatgacccgtctctgctgtactcatctctgccagcca

SEQ ID NO: 543305 - DNA, 535 bp, Homo sapiens
  misc_feature (39)..(39): n is a, c, g, or t
caagtggccctgggatttgagattgcccctacaggaaantttttggagggaaggaaacccggttgagtttggaatgcagaacatagtattttaaaaaagacccccacgggttatgcaggtggtttgagttgggcctatgggggcttcacaagccccggccttaattaaaacttgggttccagttttggttttggggggggttccagctctttaaaccgccccagttcctccagggccggggttgtgaaaaaaatcaaaacacgttatgggaaggtggggtttgagtcttttaaggtcttgcccaagtgaaaaggtggggaagccccttcccggcctaccctttttggggttgcccaagagcttgggaaggagccccttttccagggtagccttgggaacaggaaacccccttggggtttagccctagccctcagcccccttggggggttttttacttggggcccccccttgcccaggcctccaggtaaaaaaaaattcaattggtttttttttttggtccaaaaaaaaacctcag

SEQ ID NO: 543306 - DNA, 142 bp, Homo sapiens
aggatcataaatgctgtggatgaatactaaataatgattaatagaaagattccatctcaataacagagtatttccgtcctggtgaagggttcctgctgatattaaattgtccaaatggattacttggagccaggaggaaaac

SEQ ID NO: 543307 - DNA, 1920 bp, Homo sapiens
  misc_feature (1920)..(1920): n is a, c, g, or t
gtcggactcggagatctcgttactctggtggtctgaagactctcctgcaagggcgaggcataccctagtgcgatgtttgtaaagtgctacggggagccgacggcgagccaaacagtgtcgagagcctccaatacgacacgaggaaagcgaagggtgtgactatcacacgtgaagaaacgccaatgcggatcgtaggacttagttttgccactggaccatatgatgctcgaggacgagtatgtgacgacgagtcctcatcaagcaaatgactacagcagtgcgagaatatatgacgttgacaaccatgtgagacctagttcgtcggacagcctattactcattggtcgcgctcttgaatatagacgccatgtgctacatgcgcagacacagggatgagggcgcaagaaaaaatagcggaagcgtttccggtaactaaagtagtggactctttgaccgcgataggtgacgtactggcgttcgacgtgtctataacacgttcggataggggtcgtccttgaatttggctaggtatatgaacagagagaaattgctagaggtcaacgggaacataattaagcacgtaggcagattccacgaaaattaaaagtaagtggatacaaagaagtgcaattcggatgggtggcatcttcctcgtattggaaacgcgggacaatgggtctttacgcttaggccacaaaggggcgcccaaggggttgggggtcccatagcggaaaagcttttcaaacattaaaattaagtatgtgtctgcgtgaatgcggagtataaggaaggaaagcgtacgtcaatgcgggccattgcaggttcctagggatcttatacgcgtgcgttagtggaacagaaatgtggtagtaggaggggaaaattaaaggaaagtgtctggggcccgcgccacgcaggaacagcggcacggacaacacacggggctcaaaacaaaaaggcgggccgagttgagcccacgattaagggaattacctcgccccaaccactggggcacgcaattctgtcatgaagacacaaacgcgcgggggcaccccaattggaaccaccaaagcacacagcccttggaaaggggcgatcagggaaagacaggacttcccacatgggaccgcagttggggaacaccacggaggacatcacgaatgcgcctgaaacccagagtaaatacaaaaggcgacaaattatttcacgcaacagggcaaagcacagtacggttccgacgcaaacgacgacgacaccggccaaacacgcgtttgcgacaccgacgttgcaggttccagacacacaaaggggaccgcccagacaaactcaccaaagcacatggaaccgggtcagattaggtcttctctcgtgacgacggagtgacgttgataacacggaaaatcccaagaagacaagattcaacagggaccgacgaccagggccacctgtgtgtcaaacgagatccaaacacaggtccccccaaaaaaagaaagcccgacgagacagtgtcgcaacggatgcactccccaggacaggccaccacacaagacaccggcgatgcggccaacatcgatactaaccacacatgaacgaacgggcgaaagcacaaagagaggagacacaacgcaaaccgagagcactgggtaactacaaataggcacacacgttgcgacacgggtgaacacagggaggcgtagcccgacggaacagaggacgcacctagtaggtgacgaacacaagcgaccacccgtagagagcagtatggcgaacgtcccaccacaaaccgaccaccggcagaaagcgagataagcaacgggagctgcaaaatcaaagaggcgaacagcaagaaccacccaaataggaatcacgaaagactagacggagaacgcacgaaacgaccacatgcgatcacccgacacn

SEQ ID NO: 543308 - DNA, 904 bp, Homo sapiens
  misc_feature (319)..(319): n is a, c, g, or t
ggaagaatccggcgataaatacgggaataaccacgacgacagtgagcatcgtggtctgatctcagtgatcacatggcctgaaggatggagcggagcggtgggcacggaggagccagaataagaacagtgagcgtgtgcatgtggtactgtgtgaataagcattctaaacgtaggaacgagagtatgctagagcgatgtctgaattattgagagtcgacataatcagtcagtacgtgcgtaaggatttgaacggaattatgaaggttaacattgtagagataatgttgatagcactcttcgtggcgcctcgcgtcgcaanaagtatgtgaagtataggactgcagttgatacatctggcaggagctacagagtcttcgagagctggatctttacgacaaccagatcaagaagattgagaatctggcaggacgctaacagatgctggagattctacgatattatcgtgtgttgaatctgctgagaaacatcgaaggggttgacaagttgacacgactgatgaaaacgtcgttcgtgtggtcaactaataaaatcaagtcaaattgagaacttaagcaacgttacagtcaactacagaatgctagagctgggatcttaaccgcttccgggcaatcgaccaatgtcgactaccttaaccaacctggagagttagatatgaggggaaaaacatagaattactaatacttcagaacctgtgatgcgcgtcaccgaagctgacagtcctcagtatgcagagcaaccggctgaccaagatcgagggtctgcagaacctggctgaaccatgtgggagctgtaccttaggcaccatgggatcgaggtcatccgagggcccgggagaacaataacaaactcacgatgtggacattgcatcacattcgaatcaacc

SEQ ID NO: 543309 - DNA, 1488 bp, Homo sapiens
ggcgagcggcccccttttttttttatttattcttttggcttaccttcttgcttaatgggaattggttaatggtctaagcacattagaaggccaaaaaaggagttttcccaaacccagcaaactcaaggtgctgtggattctgaacgtgccaaaagaaaactgcatttcccctcttaagtaaaacgaaagtgagttttctataggtaaagtgtatctcattaagcccccagaatttaacacaacaacacaaaaacaacaaaacaaacaacacaaaacacaacaacacacaacaacaaacaacaacaaacaaacaacaaaaaacaaaccaaacaaagagagagaggggcgcgcacagactgaaaaaaaattccacccgagagagaggagcagcccacaaaaagtaaaacgcaagccacacacgcaaagaaacaattatgtacaccagagggagggacacaaaataaaaagagcgagagaaaattatcttacaaaaaaaaaaagagcagcacgggccagcacgattacaaaaaaacgataaagaaaaaagagagaacaaaaagacgagaacacagaaggaacaactaccattcaacgtcaaaaaaaccaacaccacaccatagcgagagggcgggacacaataaaaagtggcagaacacgacaaacaaccaacacaaacaaaaaaacaaaaaaagcagaaatacgagcaaaaaaacacaacaaacacacactaaaaaacaatcatcaatcatatctcaaccaaacactaccaaaaaaaaatcaataaaacataaaacaaaaaaaaaaaaaaatcaacaccacaacaaaacaatattatcctcattaaacaacaaaaatattaccaacagaacccatcctaccttaaaaataaaaaaaccatacaaaaaaaaaaaacaaaccaaaacaatgacagaagaaggcgagacacagagatggaggacacaggatatacaagaaggagagagaagagagaaaagaaagcagaaaacaaaagtaagaagtcagatgagagaaagcgacgaacggcgaatggcaaaaagcgcacggcaacggatacagcgaaaaggcggaaatagacaaagacaaacaaggaaacaacaaatgtacgcgggaagaagaggcgaaaacaaaggcggaaagcgaagatagaagacaacgaatgaaacaagtagcaaagaagaaaaaaacaaacaaaataactataatgacacaacctactcacaaaaaaaaacaaacattacacgaacgagacacaccacaccaggcacctgaaccgacccacacaacgacaccacacaaccatgcaaaataacaaaataaacatcaactcagagatgaaacaaacaacacacagatcgatctaaattcacgcaaacaacaatacagatcgacaacttacaacaaaaaaacagaaaaacgctaacaataacaaaacacaaagacataattattattttatatacagccacg

SEQ ID NO: 543310 - DNA, 266 bp, Homo sapiens
tcactgcagctatctctcgcctcagcccctcaagtagctcggactacaggtgcatgccaccatgccaggctaattttttggtgttttttggtaggagacttgggtttgcccattgtgaaccaggctgggctcttaactcctggggcttaagggtatctgtcccgccttggcctcccaagggctggggatacagagtgtgagacaccccacactgcgcccaagcgtgagaatttcacactctcccatactctgcgcatacccctggg

SEQ ID NO: 543311 - DNA, 300 bp, Homo sapiens
cggagtagactgatctcagcatattcaagcatcccggttgtatccgagtcgctactagtgaaccagtctctcagtttctacctaacccaaatcactatttctttcaatacacaagtttttcgtactcaacacagttatactgtcattagttttatttctatttctttctttttttttttttttttttggaaagggattcccgttctgtagcccaggcggaatgtgcaggggcaaactctcagctccagtgcaaccttcggctccggggtaaaagcaatttctcctgtataagcctcccaa

SEQ ID NO: 543312 - DNA, 1045 bp, Homo sapiens
ttctacttgtttataattttagagctgggcaccaattgtccggtgacccctcttttgcctggggaatgtgcaaccagaaggcctcttgttttagacctggggatttttgtagttagggaaaacaggtagatggtttctctgcccaattgtgacacacggaaatttgaaaaaggagatattttgggagacccccacttgtgtctaaaagttaggtcaaccttttcgtttaagaggacccctgaagggcaccacttggtgtccacagacccgacgtaattttggggcgccttaaaatgtatgcctgttgggcgccatgaattgtagaatatggtaaattggaatttactcccccccccctagtagcgcattggttaaaacaaagcgggttacctcatttatgtatagcactgtgagtcctcagattatatctgaaagtaattgggactaaccagtatgctttgcccttatgtgtccaccagtttgaactacccgttaaaataagggatttgtagtatccgcttgttgagccaatgactttgaatctagttttccagtggatccagaacgccgccagttatttgagtgtatgaatggaatgatgatccctgtgctataaatgtcactgaacaccccccattattcccagaaatatttactacataatttctcccatctgtagtttctccagaagggctatggattagtttgaactgtccaataccttgcaaacattctgtgaccacccctgccccttttctgtctttaattaacccaggtgttaggtgtgactgtccaccactgttatagttttcccagtaaactagaagtcacgatatttgataaattataatttgtatttcacccaccccaatgtaatgttgattcctcccagaatgaaatgaaggcacctaccacttgaaatatgttttgtataaatttgtccactgttgaaccacgcacttttagccctggtaagttccctctagctatatgaattttggcatgtttcagagagatccagtaaataaaatattagataaaatta

SEQ ID NO: 543313 - DNA, 1361 bp, Homo sapiens
  misc_feature (1204)..(1204): n is a, c, g, or t
ggagcctgaggaagagggcggctgactggtggtggtgactgagcggagcccggtgcacaggatggctgggcacagattggtgctggtattaggagatctggcacatcccacaccggtgcaacagttgggccagctaaattccaaaaaacctccctggttgccaggaaaaaaattccaggcgacaatttcttcgtggcagccagggaaaacctttgggcacgcaaaaaggaggcagtttcatggacgtattcttcaaaggactcttgggcgtggggttgaatggttccaatattgtggtggacgaaggggaagaacttccggagtggaggaaaattctgggaactttagttcccaggaaagcagggacacaagggttgggttgaactctggtctggggaaaccaaggttttccaacaaacaattgtgggctcttggaaattccccaatgtggggaagccaattccaagaggtctaattctccccaattgggggggcacgcacttatgggggaccacaagctcttttaacgacgcacctgggttcggcaagggacgggcaaaatttttggaattgtgggacaccattctccctttaagttcgcttccggggtggaagcaaagcaacacaacgcgaagcacgcataacatttttctgggcacaggcgcaccattcgctcgggaaggaccaatttgcaagatcatgatgtttaaagtgagtatcgttaagccaatttttaacagttccaccaaaggtggggtttatccgtgggtgcccaacgctgcgtgtgggcggagccaaatttaggttcacatcgggggcctatggtgtgggggagaaaagacgcaaaaggaacgaatttgttaagtatttgccccacagttgcaacattcttgtggggtatgggttacggggaagtgcgggagaatattaagttagcacagaagggaaagatttatacattaagcagagggtaggggagggttaaccagccccatttagtatggtattgggttcaagttacacagggggcatatcaatgatttggtgggtgaggatgagtcaatatggacaagatgggttgcgaacacacagtggttatatggaaaaaccgcgagaaaagattgtccgtggacagagaatacgcaggacagaagtaaagtcctttttacaaagaagtgtacaccacggggggcatccagtatgntgtcgcttatgggacgagtaggaagattgatatgaagtggggggaatgataatagtgaaagatttcagcaaattgtggggttaccacgttggggtatgggagagacaattcaacagagtggttcataagttgtataaatgcactttttgtttcaagc

SEQ ID NO: 543314 - DNA, 1123 bp, Homo sapiens
ggggaccctgtacacgtatcctagaaaactggagggccttcaaggctactacatcgcatgctcagtacagcggggctcaggtccgcgatgctctaccgcaccaccaccacttaccatttaggccaaagccaaccgacacccctcgcattatactaccgacaaattatcctagccggcaacggtcccagacatattgagggtgactgactggatctctgtagtagtaatgacgagcaaccgccattcgcctactaatagtgagcacatgcacgagactgcaagggaagtacatccagaggcacgcaggccccaggtggatgcagatggagtagagctactgcatgataaccgacatatagtagcccaccagaccagctacctggcgatgatcccacacacatcgaggccatacatgcaaccagcaacaaaccagagccactgacgacatgcaacacgacggccgtgcaggcgccatcctagagcgctgcctggcatgctaaacctacgcacgaccgaaggaccataacatggctagggccgaaccgacgtgacaatagggactgaccaatcacacgaacagcacctgacaaccactgacagatgagactactactagcagacaggagtcacaaagaaagaccacaactacaacgcgggcaagggcccataccacaaaagtaaccaaagacacggacagagacagcacatccaacccgagacaaatgaaacacaagacccacaagagtacgcagagccatggacatagagacgcacacgcgcggaccaccccagcggaggtgaacgcaaccgactcggagcccccacgctgcaggcacaggccaccaaccgcaacgccacggggcacgaaacagacaccccacacaagccctaacagcacacgcggcaccaacccacaccagcgagccgaccacagcaaggagacgacgtgaacacaaccgggccgaccacacaacgaaaccgcccacagaaaagcgccccccacaggggacaatgacaacccctgacacaacgaggcagctgcccacaacacaccacgaggcggatccctggagccaccactgacaccaccagaagacgaccgcaacaaccggcgcccgccacg

SEQ ID NO: 543315 - DNA, 272 bp, Homo sapiens
cagatcatgggagtggattctaatggtttagcaccattccctcggtgatgtcctcatgatggtgagctatcatgagatctggttgtttgaaagcgtgttgcacctcccctgactccctctcttggtcccgcccctgccatgtaggacacctgctccacttcaccttttgccatgagtaaaagctccctgaggcctcccaagaagttgatgccctgtgcttcctgtacagctgcggaaccgtgagccaattaaacctcttatctttgtaaatt

SEQ ID NO: 543316 - DNA, 294 bp, Homo sapiens
  misc_feature (118)..(118): n is a, c, g, or t
  misc_feature (120)..(120): n is a, c, g, or t
  misc_feature (143)..(144): n is a, c, g, or t
  misc_feature (218)..(218): n is a, c, g, or t
gaatggagtgttctggttgaattatattaaattggaagtatgaaggtgaaaaaaattcagaagttaaatttcctttgaatgcaatttgaaaatatagccaataattccacttttattntntagtaagtttggacattatgatnnaattggtgtttcatgagagaacccctagtgtgcctgagacttactttgtgaagagaattttttaaaactttagntgtaagaggatgtaaatgactttggatgagagcaagctggatgagaactaagacttgtaaagagactttgtagatt

SEQ ID NO: 543317 - DNA, 263 bp, Homo sapiens
tcagggcctagttagagaacaggactctgagcagcctaattaaagttggtcaaggagtcttggtcacatagcactggcggtctccccaatataccaaacactttctctacatatgccagcataaagtgtatataagatacggtataaacaagcgctttcaggctggtatgtggtggctcatgcctgtaatttcagcaatttgggagacagagatagggtggctcgcttgagcccaagagtacgaaaccagcctgcacaacaga

SEQ ID NO: 543318 - DNA, 313 bp, Homo sapiens
gggggaggggggaaaaaaaaaaaaaggtgttcctgggggaaaaaggttctggataaaagttaccttccacccttggggggggggccctaaaaccaaaatcccggttttttttatagaaaattttttcgggtttaatcttttttttttaaccaggggctccttcttaaaaaaaggtttggcaaaaaaaaaaaaaagttggggcctttttattttttttaggggcggcaaaggccgggggaattttttaatttgcggttttggtaaaccacttggttaatagaaaagcagagaaattaatttccctccccttcca

SEQ ID NO: 543319 - DNA, 388 bp, Homo sapiens
  misc_feature (7)..(7): n is a, c, g, or t
  misc_feature (15)..(15): n is a, c, g, or t
  misc_feature (172)..(172): n is a, c, g, or t
  misc_feature (342)..(342): n is a, c, g, or t
gtatttnggtttttnctgagacagagtttcgctcttgttgctaaggctggagcgcaatggcgcaatctcggctcactgcaacctccatctcctgggtttaagcgattctcctgtctcagcctcctgagtagctgggattacagacgcatgccaccacacccagctaattttngtatttttagtagagacggggtttcatcatattggtcaggctggtctcaaactcctgacctcaggtgatccaccagtcttggtctcccaaagtgctgggattacaggtgtgagccactgggcccagcctggtcaatgtttttaatatttacccacataacacatatttgncacattctttgcagttttattctccattgtgttccaggccttcaat

SEQ ID NO: 543320 - DNA, 223 bp, Homo sapiens
atcctcacggtagtccaatagcagcaaccatgccatctggattcatagttttcaccaataaacaactggtagatttaagaaattagcaatgatgtgctagatatgttctgcaacccctgtcataaaaggttttaatctttctggtctctgtacttcaaattaccctttgattgatctccatgtaactctttgatgtacttcttgtacgcttctttccatattt

SEQ ID NO: 543321 - DNA, 162 bp, Homo sapiens
tctataagtacccagaccgtagcagcagtgggctctgacattaagctgacccccatctctgtaggtttatgccatatacctgtgttgctgttgagctgcccttagttgtaattttttttattttttctttttttaggaaagcgaaaacggcatcttcatcgg

SEQ ID NO: 543322 - DNA, 220 bp, Homo sapiens
cgactcatacaggatcccatggagagcaaggcccaggatgcggatcgctgtgctgagaaggcgggcttccatctcaaagctgacgaggatctggtcagcccctcatgctgcacattgcacatgtatctctattcctctccaaaatgcaccatcacaggtgaccacttctggtcagttccatatcctgcaggccttgctctccacaacctccgctagttcc

SEQ ID NO: 543323 - DNA, 235 bp, Homo sapiens
tccaggctgagcgcaggggccaatcatggctcagtccaacctcaacttcttgggttcaagcaatccttacatctcagcctcctgagtagctgggaccatatgtgcgcaccaccatgcctagctaattaaaaaaaatttttgtagggatagggtctcctatgttgcccaggctggtctcaaatgcctggcctcaagtgatccttgcaccttggcttcccaaagtgttggccgataa

SEQ ID NO: 543324 - DNA, 260 bp, Homo sapiens
  misc_feature (39)..(39): n is a, c, g, or t
  misc_feature (81)..(81): n is a, c, g, or t
  misc_feature (86)..(86): n is a, c, g, or t
  misc_feature (91)..(91): n is a, c, g, or t
  misc_feature (138)..(138): n is a, c, g, or t
aaggccttgtcagctcatcaacaggcaggccggactcangttatcccaccattatgagaacttctaggcccctgccggggnttctncccantgtccagttgagcagaggtttgagcccacacctcacctctgttcttnctatttctggctgcctcagcttctctgatttcccacctcccaaccttgttccaggtagccatagtcagtcaccatgtgtgggctcagggacccccaggaccagggatttgtctcagcctggg

SEQ ID NO: 543325 - DNA, 156 bp, Homo sapiens
acgttctcttctgattatgtatcataaaaaggtccactgtcttactatacacatgtatactttgttacattccatcactgtgaaaagttccctctgtgcccgctccctcaaaataagtttcagtctagcctccaaacttggaaagcggcgctcgct

SEQ ID NO: 543326 - DNA, 371 bp, Homo sapiens
cattagaaatgggcggatgggcaggattagctttatctacgacttacactcatggatttggaatttttccatgccacacattttattggggctaagtgactactttcttttctctctgtaaggaagtatatggaggctaacactgtatatcaacttgtttacatacccggaaagaggagagtgggggacccaggagagtggtgaattctcttttatcatggagcttagaaattaacaatttacacatgaaatatattccgatgcaaagtacctggagaacaccctaaagttcattcagaacaccttatgaggatgcctgtcttcaggagtgtacaccggaaagaggagagtgcgggccaggggagagtggg

SEQ ID NO: 543327 - DNA, 310 bp, Homo sapiens
cagagatgatgccactgcactccagcctgggcgacagagcaatgactccatctcaaaaaaaaaaaaaaaaaggttgttgaattcgggcagggcttttaagattccgggcccgggtgatttggaaactcgtgggcacccgggatagggcccttcataggcccggcaatttacccttcttccttccatttaagcacttgggcccatggtctcttaacattctcctttacccagtttttaacaggggccggtgtaaagagccttcacccagtgggaacaggtacaacctggccgggtggggggggactcctct

SEQ ID NO: 543328 - DNA, 254 bp, Homo sapiens
tgacttgaggcccatacttcactctttgaaacaagcagtcagcattctaagtaacgggtttctgttctgttggatgactttgaaattattctttgtttactgttggagttgtacaaatgttccttttaacagatgagttaatgatcttcatcatccaagtttatgaatgacactaatcacacatagagctcgatatatattttatgaataagagtcttgttattcacttaaattggtaattccattccatttat

SEQ ID NO: 543329 - DNA, 243 bp, Homo sapiens
aaatttttttttaaaaaaaaattttggccggggtgggtgggtttttccttttattcccccccctgtggggcccaaattggcgggtttcttttgggtccagcttttaaaaccccctttgcccccttttttaaaccccttttttttttaaaattccaaaaaatttttttttggttttttttttttttcctttttttcccccaaaaattttaatttaatttaaaatttaaaaccaaacaaaattta

SEQ ID NO: 543330 - DNA, 286 bp, Homo sapiens
tagagactaagcgcccatttatccataaaaaagataagcagacttttccccactgtactataaagttagagtttggggctgggtatggtagcttccgcctgtaatcccagcagtttgggaggctggagcgggcggatcacttgaggccaggagttcaagaccagcctggccaacgaggggaaaccccgtctctactaaaaatgcaaaaatcaagtcaggcgtggtggtgcagcctgtaatccctcccacggaggctgaggaatgagaatcacttgaacctgggagg

SEQ ID NO: 543331 - DNA, 1516 bp, Homo sapiens
ggaggagtgatcatggctacctcagagctgagctgcgaggtgtcggagcgagacactgtgagcgccgggacgcgccttctgggcacgacctggaaggactctgacaactgtcccacacagagcccgacggacgggctgactcccctgacctgacggacgcgacaacccaccacgacactgagaccctacccacacacgcacgcgggcacgccgcccacggccgctcggccgcaaccgcctcggaccctagcgcctggacgcgactcggccgcgactcgggggcccttcccatccgtgccccgggagagcgcgccatcgcccaccggacgaaacccaccaggacttggcaccctacacccaagacacgaggataaaaatcgtaccggcatgaccgcgccatagacagccaccccaccatgccccaagcccactcggggccaggacccacacccacatgcgccgcggcaagccgccgccagggacaacaaccacccccaatccccagcccatcacccagcgcacgccccgcaccgggccacacccgcggacaacacacgaacccacggcagaccctaggcgcacaccgcaggacctccggccccaccagcccaccagcgaccgcacggccagcgacagaagatcacgacgacaaagcccacgaccaaagccccccaccctggcgaccaccagccctaagcacacaccaaccagcaccccgcacacgcacaccccatcacgccacaaagggaacacaccgaaaccccacgaccaccgcacaacgacaaacaacacaaaagaccgaccccacacgacacgcacacacgccacaaccccggcgcccacccggccacacactgcgacagcacaccccgcgctacaggatacgcaccaggcccgccacgtacgaactgcggcaaccacccactcacaaatgggaataacacaagaaacaagcggcaaaagccgacacagtcaactctacgtacacaccagtgacaacaccgatacgcgcccccaaccaacaccacacacaccacggcgacaggacccaacaagccacaacccacaagccaaagccacaaccgcacaaccagcaagaacactctccatataaccacacataccctaaaaacacaacacgagaaaaccactaccacaacacaaccgaataactcaccactataccgtaagccttaaactgagctatcaaataaaaaattgataacaactcgccttatccccagcccgccagccagctccgcctacctcccctagcttctacgtcattacgtccgacctctacgtctcacattgcacttcatttcaatcctatctcatactaatcatcaacatgatactgacatctcaatctacataaaaaacactgacatcccaacccatcccctccatcatcactaccccccgccctacagcgccacactagccctccgcctccccctctccacaaaactcactcaccaaccactcccccactcccctctcacccctgtccttc

SEQ ID NO: 543332 - DNA, 291 bp, Homo sapiens
cctcaactcagcagattaccaacccgttagcatgaatagaaagtgcaccattcaataaaaatatcaccttgttctaaatcagggctaatctctgtcaagctgaattggggaaatctgtaaatctgagagtaaggataccttcctgctaaaaacacagaatgcatgttttaaaaaatcagtttacatatgtgacgcaaacaaaatggaaatattaaggaaataccaggaacagagggaatttcaaataagagtaggaaacaaacagactgacactctaattgcctatggaga

SEQ ID NO: 543333 - DNA, 212 bp, Homo sapiens
agtaccccgcagcatgcccatggccagaggggcgcctggcgctgtagcagtgatcctcccgcactatcacgtgcgtcacgccagtgacctgacgtagtggctggtcctgtagtagctgcgtgacatacgtgtgcctcgatgtgcacttggatgggcaccaccatcgtagtatgtcttgtgtacgtggctgtagaccgcgcaccagggtgtgg

SEQ ID NO: 543334 - DNA, 206 bp, Homo sapiens
ttccacacatgttcctattatcatcctaattcagctctgctggattgagctctggttaagtctgcaccctgttcaaaaaccagcagctgcaaaagccctcacagtagtcaaacatccttagcttgacatttgagggctctctggccagagcgcttaccatgctgcagacccttcctgcccatgatgccaccacaattcctgcagga

SEQ ID NO: 543335 - DNA, 355 bp, Homo sapiens
  misc_feature (350)..(350): n is a, c, g, or t
cggcacgaggccttcctgcacttcacaggaggcaaccatgagctctgtgtctcatctgcacctgggcacgtggtcatgttggataacccacgtggcaggaactaagggcacctctaggagctgaggtggtctctgaacaacaggaaattgaagccttcagtccaacaactgcaaagaactgaatcttgcccataagatgagtgagcttggaagtggatcttttctctggttaaagctcaatgcaaacttagccagccagacaccttgattagagcttggctgagacccaagcagaggactcagtgaaacatgcctgtgctctatttattatgtaagcattaaaaagctgntaaga

SEQ ID NO: 543336 - DNA, 180 bp, Homo sapiens
tggaccacacagccgggtagatccatcatggcggctcaggaactccttgaacagagcaagtttcctgaaatggcagactctgagcccacaaggaccaaagctgtacctagaggatacagcaccctgggcctcagctgtgcctttcctgcgagtgctgggtgtgcgcccccagcacatccc

SEQ ID NO: 543337 - DNA, 374 bp, Homo sapiens
attacagggaaagaatcccttatcccaaatgctgggggcccaaagggttttggatttcggatttttcttttttgggttttgggatcctcctaaatatataataagataatttgggggtctggcaagaaattcccttttgtttcatataccccttagacagggaggtttttccagggacgcctggattaaatggttcccttttgaaatccaggttatttcccggttgatgcggcaaaacccctggggtgaagggttttgggccattccttttgggggccattggactttggggtatatttttaagggggaaatggccccagcccaagggatgaaccttggtcgggctttcaataaaggctgcccgattttttcca

SEQ ID NO: 543338 - DNA, 420 bp, Homo sapiens
  misc_feature (2)..(2): n is a, c, g, or t
anggtactgttccaaacacctaaattaaattgtaattttgccacataggaaaataacaaaaacccttatttaccttattatattgtgaaccttccaggtttgtcctttatggcctgagagataaaacttgtgaaacatccttaataacctaagattatccttggccgacagcactttgggaggccgaggcgggaggattgcttgaggcccaggagttcaagatagtgagactctgtccctaggtggttatggtgatgtgcacctgtagtctcatctgctttggagttgaggctgcagtgaactatgatcgtgccactacactctaggctgggcgaaagagcaagaccacatcttaaagaaaagattatcctttttcagtacaaattggaagaaacatgattaaaataattattaagtgtt

SEQ ID NO: 543339 - DNA, 115 bp, Homo sapiens
cagaactactatgtctgtccaccatctgtgcagtaccactcctctgtgctgtccaactgtccagcctctgtgctgtccacctcctctgtgctgtccacctcctctgtgctgtcca

SEQ ID NO: 543340 - DNA, 241 bp, Homo sapiens
  misc_feature (230)..(230): n is a, c, g, or t
tcaataatcagagcgaacagagtcgtgaggctttgaatctcttagaaaaaagggaagacaggaagctccagaaacgaagagaccgaagggctgaaaagaagaagagggaggtggtggggacgggcgtctcccggttgaggagctccagctcttggattattttgttgcttgtggtccaccggtccgccgcagggtgtggccgtgaagattgagtcgccggtgcggggtgngtagagagcgg

SEQ ID NO: 543341 - DNA, 120 bp, Homo sapiens
atcgcgttttggctcctcgtgtggctcgtcggggagttgccattgccgcccggttctacggtattgacatctgggagccaagggaccacggtcaccactctcctcagcttccaccaaggg

SEQ ID NO: 543342 - DNA, 717 bp, Homo sapiens
  misc_feature (401)..(401): n is a, c, g, or t
  misc_feature (434)..(434): n is a, c, g, or t
  misc_feature (454)..(454): n is a, c, g, or t
  misc_feature (460)..(460): n is a, c, g, or t
  misc_feature (475)..(475): n is a, c, g, or t
  misc_feature (525)..(525): n is a, c, g, or t
  misc_feature (554)..(554): n is a, c, g, or t
  misc_feature (585)..(585): n is a, c, g, or t
  misc_feature (687)..(687): n is a, c, g, or t
  misc_feature (704)..(704): n is a, c, g, or t
aaaaactagagaactctcacctctctgaagtggttgtgtatgaaactgtttaaagccgaggatgcactcagtgacctcttcaggcaaccccagatttactcagtcagccatggcacacatgctagagaagtaaaaaaatgaattgagacttgttctgaaaactcttgagcaggggctcttaaaagttttttgtttaggaattatgtcagggttggggtctggagagcagataagtgttttgtgtgagaaaagtaaaaacttagttattttcttcccgtattcagtaatccttgcatttttttcctcctcctttatacatacatttttgccagttactgacttctctcttgtacacatttccgggttcctaaattaaccaagagtcctcagccaacaaggantccaattgacaaagccacaaggtctggaaggtnttgaagtaaggggcatttcntccccnatgaaatcagggcancagggggaagcggtttggggttgggccggaacaggaggagcaaaaggacnagagggccagaggaagaaagattgcaggntaagaaaacgggatggccacccctgagaagnggacaagcaaatttggggcttagagtagaattgaggaaaaacccagggcagaggccaggaatgctgtaggactgactgggaccatgattgatgtaagttganatgggttggttgatccntggaaggccaagg

SEQ ID NO: 543343 - DNA, 166 bp, Homo sapiens
tagagagcgtgttgcaatggacagttggcagcggctctagatgagccggagaagaggcctgcccttgggttgcggagtttccgctccgcaagatgctcccatgcgtccaatttgcacccgaaggcgttttcccgctcttccaagtggagctccttcaaggaaggct

SEQ ID NO: 543344 - DNA, 320 bp, Homo sapiens
gcgactctacacggatcccccccgagaagctgaggcgccccacagctcagagtccatatacgccagtgcacgttgggttattcttgcccatctgcaaaaagcacttcacttctgcctccaatctgtctcatcagaagtcactgtccacttgctccaacatcttctttccccctgcgaatcgccatgaccaccttggcatgctaccagctaagacctcattgcggcacgcggttgtcccgtccgcgttcctctccacatgatccacatactttcatcctctcacgaagcctcgtaattgggtcctattgctctcaatctcc

SEQ ID NO: 543345 - DNA, 207 bp, Homo sapiens
gtgggcgctggatgcaggattgtttgacgtccagagtttgagcacagcctcaggaaatagaccccaactctagcaaacatttaacaattagccaggcacgatggtgtgcacctgcggtcccagctacttgggaggctgaggtgggacagactcaccttgcgcctgacgacggtcacggcacgcagtgacgccgtgatcatgcccctg

SEQ ID NO: 543346 - DNA, 571 bp, Homo sapiens
aaggcccactgggaaatgtcagtgagggcacatgagaaaacactctaagaacctattcttccaaagatctttacagtatcttatgacaacacaggaaattatacccactccaactgcgaaagctgaaactactctgctttgtcacttacctacacttttgactttccaaatacatttctctcttcggatatgagctgcaaactccttatataaaggctccaactctgcagccctaattattctagttggcccaagaaaaatcctaattgttttatctaaggagacggaattttccaatactgaacaagcatgtgtgtgtgtttgctttaaagaagctgatttggtaataaaaaaaccctgaaggtcataaattcatgttaacacatccagtgtacatgaagttggcaccgagttaaaccatttggctactatatagcacggcaccttaaaaacctattttttttcccaaaaaattaaccttattcttctcccctgtaaaatcaaaacaccggtaaaaatgtgcccttcctccattttctgggaaatacctttctaacaaaaatatcctttt

SEQ ID NO: 543347 - DNA, 707 bp, Homo sapiens
cccgaattcggccattatggccggggattttgacgcacgccagtattaggcgatatctgatagaacaaagctctcatgagaactgagagcaggcgtgtgagcacggacagactagcttactctattctcggtctttaggaactaaacagtgattaagaattaatcctcgcccgtaactggcataatactaggttcaatagacgccgtcggactacgcattttcccagcgcagcaacacatccgctgactacccataacacgcaagcactcacttctttactgacctggcgagccccttccacgtacaactggacttcaaaggttaacctactatgcctacacgttctcccacagctcacctcggccaagtgtgctcttgcttagaatacacgccatccaagggccccatgatctcccattctatttagcgaacacgatctggcgcttctctactcctttgcagtccgtcgcgttttccttcttatacttcaaccattccccccgtcggccaacctgacaccacgacctggactaagtcctgtggaacacgggctcctcaagatccctcctttatcacactcgcctacctcctatgactcctctcttcaccagctacttaacttgcacagctttcactattctgtatagaccccttccgtctcaaccctcacatccttctgcagtcacctccttcgcccttctgctcc

SEQ ID NO: 543348 - DNA, 174 bp, Homo sapiens
  misc_feature (1)..(1): n is a, c, g, or t
nctattccagcaggactggccgttagctcctgtggggcgctggcttctgcttcggaattctgggatcttgagttccacacctgaacttcagaaggcctcacgtgttcccatttcacagatgaggacactgagggctcagaaatgtgcaggaacgtgtcctcagtcatgaagctg

SEQ ID NO: 543349 - DNA, 325 bp, Homo sapiens
  misc_feature (30)..(30): n is a, c, g, or t
  misc_feature (63)..(63): n is a, c, g, or t
  misc_feature (280)..(280): n is a, c, g, or t
  misc_feature (292)..(292): n is a, c, g, or t
  misc_feature (319)..(319): n is a, c, g, or t
tgaatatggggaatgacctgagagccacantcagttcctcaagggcagcccagcttggggctnacgcctgtaatcccagcactttgggagtccaaggcaggtgggtcagttgaggtcaggagtttgagaccagcctggccaacatggtgaaatttcatctgtactaaaaatacaaaacagccaggtgtggtggcacacacctaaagtcccagctacttgggaggttgaggctggaagatcacttgaacctgggaagcagagtttgcagtgagccaagatntcgccactgcantccaggctgggcgacagagtgagactntgtctc

SEQ ID NO: 543350 - DNA, 239 bp, Homo sapiens
tcattgcagccccttcattcccccagagttgcagctttaccagagtggagggtgagagcacaaaggcggggctctgtcttcaggaagaagagctttggcagaagcctgatgagagtttcaggttcacccccaggatagcccttccagaagcagaagggctgaggtggagaagctaggcttaccaagagtgtgtaagtactcggcttggatcaccgctctgtaccgctggtgaatcccgg

SEQ ID NO: 543351 - DNA, 217 bp, Homo sapiens
tgcaaagtgcactcttctatatctaccaataagctaaaactcacctgagttgtaaaaactccagttgacacaaaatagactacgaaatgtggtttaacatatctgaacacacattagctaagaacccaacggggattagataccccataatgtttagccctaaaacctcaacagttaaatcaacaaaaattgttcgcaagaaaactaacgaggccac

SEQ ID NO: 543352 - DNA, 571 bp, Homo sapiens
  misc_feature (320)..(320): n is a, c, g, or t
  misc_feature (359)..(359): n is a, c, g, or t
  misc_feature (377)..(377): n is a, c, g, or t
cttctccaggttcccaaaaatatcacccaggctcctgtattagtttcctatttctgctgtaacaaattgctacaagcttagtgatttaaagcaacacaaatacagcatcttacagttctacagactcaacaggggtctcactggctaaaatacaggtgttggcagagctgtgttccttctgggggtttttgggtgaatctatttccttcccttttctggcttctggaggccacctgcattgcttggttcatggccctgtgtgactctgacttctacttccattttgttgttgttgttacttcgtcccactctgactcacnctatctccccactttcaagttaaagtaagggccccttgntgacttacaacttggggncttccaattttaggaatttgaatggccaggggaattacaactccttccccccaattttccgaagcaattcctttacattcaacccaattccttaaccgcgaaaaggcttccccccttatatttccgggtttccaagttaaattcaaaggcaaatttaaaaccccaaaactttaattttccccaaaccaaggggg

SEQ ID NO: 543353 - DNA, 1013 bp, Homo sapiens
ggctcgaggaggcgagcaggttgggtgggaggcgagcggtggggcggggagaggggtgggagcggcggacccctgggtgagcggagagccggggtggacgtgtgggtggggggtaggaattccacggtgtggagggagggcgcgggcggaggcgcggtggagggctgggcggagaggggcggtagagagcgtggggcggggaaggggggccggcgggggtggtggggtgcgcgagaggagggggggggcggtttggagcggggagggagggagggtggaggaagcgagagggggacggggacggatgggagagcagggggagacggacgcgggggggaggtggaaggggaggagagtgggtccggggtggggggtgtgtggggcgcgggagtggcgggggagcacgcggcgggggtggagggggggggcggtggggtgttcggcgggggtggtgcgcgggggggtgtttgggaagagaggcggggggggggggtgggggcggggtgggcgcgcgtgggtggggggtgggtgggaccgctgggtggtgcgggggtgtggggcgtgtgtgtggtggggcaagtggtgtggtgtggtcggcgcgcggccgtgtggtggtgtggatggggcgtggggtgcgggctggcgcgggggtggggcgcgcgtgtgggctgggggggagcggaagaagagggtggtggttggttgcgtcagcagggtgaggtgagggggtgtggtggacaggcgccgctgtgggtaggcgagcgctgtgttgcagtagttgggatggtgcgcatggtggagggtgggccgcggggtatgcgttggtgtctggtggtggtgagcactctctctcgatggttggagggagagtgtatcacccttcctcggcttgatgaggaggtgcttactcgtactccgttttctcacttatgcagccccctgttgtgtgggggaggccgtgccggggtttgaaaatataaaaaaagggggggttaaaagccccacattgtaca

SEQ ID NO: 543354 - DNA, 185 bp, Homo sapiens
  misc_feature (79)..(79): n is a, c, g, or t
  misc_feature (91)..(91): n is a, c, g, or t
  misc_feature (129)..(129): n is a, c, g, or t
  misc_feature (155)..(155): n is a, c, g, or t
ttctaatcgattctttcaaagtgaagatcaaggtgcgccaggcctggagggaagcccaggctgagggtagcacctaaantgatcataactnacagcccctgtccaccctatgtggccccacatttgagntttagagatacaaccccccacccttntccggcatttttccctactcccaacccact

SEQ ID NO: 543355 - DNA, 808 bp, Homo sapiens
gacacagcagcctcctgaaaagtgcaggttccttctcaccttgaggaataatcctagaaaactcacaagatgtgtgaggcttaagtaggtaccgggaaactctgtgcctgcgcagtgaaaacttgtatgattagtagtgaaagaggtaggagtggggttgcgagcggaggaaagtggcgggcatggccgaacctaacatgatcatgagtgtagaatggggatgtgatcaccatgtgaagtgtggaaagtacctttagataatactgagatttcgttcatcagtgggccaggtaatggttgatagaatggtcgactgctagatgacgaggaaagtcaaggagcaccataacctgtagtagtgggggtgtcctggctgcatgtgcgagaagatgggatggaaaagatcatagcaccataagagagaaaaagcgagaggatgataaacgtggtggtggaatgcgtctagtgaaaggtgtcacttgcgaccgaggagtttatgaaagagcataagcacaagggtagcgtggagctggtacgtgaagttcgccattgaagtctaccaacgattctgtgggatatatcgttcaaaaagatatgtgttttccatgatttagcaagcaactaatttcatcccaagctgattttattcaatatggttacgtggttaaataaactttttgagatttaaaagacacaaggagattacgggaaaaaaaaaggggaaaaaatgggggggggggggcgaaaagttttaaaaactgtggggggggggggcaagaaatgaatgggaggggtggagaaagggaag

SEQ ID NO: 543356 - DNA, 842 bp, Homo sapiens
  misc_feature (196)..(196): n is a, c, g, or t
  misc_feature (327)..(327): n is a, c, g, or t
  misc_feature (336)..(336): n is a, c, g, or t
  misc_feature (380)..(380): n is a, c, g, or t
aataattaaaaagaatagtgggttctcctgggtaagggattccaggttgatgaaacagaacaagctttggctaatgagaggaagaagttacaaaaccgcagctcttgggtctacaaagaatcacgatgatgagagatggtggcagttggatattggatgagaccaaattggaaagacatggttttaattccaaagnaagaaaagagtaaagggatatgggctggctcctgggaaccatcaagtggttcctggctcccaactggcagggaaatggtggagaaaattagcaaattggctaagcagaattgggctccttagaaaatcaantggcccagnaaagaaactttggggcaatctgagagtctcagaggtatgaatgntgaatggccggcagaggccaaccaaatggccaatctcttaagaggggtgtggcaccacattctggagcttccaactgggtttctgggccaaaaaccacttggccagaacaaacttggctgtagaaaggatctcatgggcacaggctccaagttagtggtggccggttaggagagaaaccacggaagaaggagcagaccggggtgggtgtgacaggacatgagatccttttaaggaagatatgagaggaagaacttagaggatccagggagctttcccacaggaacgggtaaggtggaaaggtaacttctaagggaagctctggcggagaatccggggaatactccggaagccggcattacaatccgagggaacccattaccttccgtggaagaaaccccagggaaggggaggggggttcctggggcctggacaggcgcctgacaggggcgtgccagccgggg

SEQ ID NO: 543357 - DNA, 1246 bp, Homo sapiens
  misc_feature (16)..(16): n is a, c, g, or t
  misc_feature (232)..(232): n is a, c, g, or t
  misc_feature (294)..(294): n is a, c, g, or t
  misc_feature (382)..(382): n is a, c, g, or t
  misc_feature (821)..(821): n is a, c, g, or t
  misc_feature (873)..(873): n is a, c, g, or t
  misc_feature (954)..(954): n is a, c, g, or t
  misc_feature (1089)..(1089): n is a, c, g, or t
  misc_feature (1127)..(1127): n is a, c, g, or t
  misc_feature (1166)..(1166): n is a, c, g, or t
  misc_feature (1168)..(1168): n is a, c, g, or t
  misc_feature (1227)..(1227): n is a, c, g, or t
gagcggccccattttngttggtatccccaggaaatacaggacattaatggtcccgacgcaccccatatgccacgttattcgggggtctggaggtgtacgagagacggacggcatcgcgtggcgcacccactcacgccagcacatgtgagcgagccaaacaagcacccaccccacccaaagagagcgaggaacaagagcgacagagaatagcaacgagcacatacgaaacganaaagacttcattaaggaagataaagagcttaccctaggagtgaaagatatactatactaagntgaaaggaatagagcggagagagacacacacccccctcgcaactcacaacaggcacacggtggaagtggcctacaccgctcgacacanatggatatagagaataacaacgaattggcagtggctcgtaggaggagtgaggcggaggaacgatcgcgagagtaggactctactcagcgaatctcgacgccgcgatgccgcccactccactacctgccgcctaacgacatacgtcacgcacgacgatatcacgatatctgatggcgatactactacattatctaatattcgctatcgtctatatccttcttatattaatctttgtatcttctattgggttgttcattgtggtgtttgtgatgtgttaggaccattcgaatgaacgcggtatgtctctgcgtctcgaccagatacctctactcgcctctgctccaacaagacaagacagagagatcgcgacgcgcagtcggacacaaagctgacgggcagcgcctgcgtggacgcgcagacgcgtgacgccgtaccaccngacggtcacacacacatctgctctaccgcggctcttgcacgaagtagccgangtctcgcagcgcacaacgacatgactcttgttacaccactatacaacgtgatgtcactgacgtatccactctgataccctntctcgttctcaataatcgaacctgtagattgatacgcatccgcgccgtccacatctcttcatcagttacatactacacatgatatcgcgcgtgtcggcatactagtcgcagttcactgcagcaagagcagcatanctgcacggcgagatgacacatgctcgttcgtcggtgcntcttgtgtcgtattcgcgtaccagtgtgatgctctcttncnctctcaactgtcgtactgaacagcatcagcgccacacgtacctctcagagggacgtacncacacgtacaccgcgtgct

SEQ ID NO: 543358 - DNA, 150 bp, Homo sapiens
gtgtgctgaagaagaccactggccttgtgggattggctgtgtgcaatactcctacgagagctaagaatattgtacacaagattctgatgtcctgaggaatcctaaaatgcagcatatagaaggtatacagaccagatacaaatgagatgc

SEQ ID NO: 543359 - DNA, 174 bp, Homo sapiens
gtcaataaaggctctctcgggaggctgaggcaggagaatggcgtgaacccgggaggtggaggttgcagtgagccgagattgcgccactgcactccagcctgggcgacagagcgagactgtctcaaaaaaaaaaagaacggactgtacgggagatgtattagatacccaaggttt

SEQ ID NO: 543360 - DNA, 224 bp, Homo sapiens
tagaaatcctgtacttgttcatgcccaatttgtgtttcagaatgtagaactttattcagagcttaaatgaataattagcttacccctgagatgcttttattttcaataagaaaatatgaaaaaatgtgtaccaaccaatttaatgttatagaaaggaaccattcaaatttatgagttcatattccataatatatgtcatactattacaaactcaaagtacatct

SEQ ID NO: 543361 - DNA, 130 bp, Homo sapiens
cttttaaaggttttaaacctgcccaaaaattaccttgggatttaaagtttccctctgtctcctcctctaattaaacttgttatttgtcatgccccagcattggaaataataaaatttcttgttttgtgta

SEQ ID NO: 543362 - DNA, 308 bp, Homo sapiens
  misc_feature (205)..(205): n is a, c, g, or t
  misc_feature (235)..(235): n is a, c, g, or t
  misc_feature (261)..(261): n is a, c, g, or t
gggaagttaagtaacttgctccaggccagcctgctggtcattgatcaccctggtttcaaaccctgtttttagctccgagcttcctagttgggacttacttaatgtcacctgcattagaatgagttgtttacagtacagtctaggggcatcttatagtgatgagacactgcctttggaatatgcaagctaggtcagtctcgtctantacttattctacactttgagcagttactgnatctgtatacggagtgtgatagtagntctacattgtgagacaatgacaatgagtgtgatagtagctcctacat

SEQ ID NO: 543363 - DNA, 1337 bp, Homo sapiens
  misc_feature (217)..(217): n is a, c, g, or t
  misc_feature (284)..(284): n is a, c, g, or t
gaccataaacgtctccgccaaaacacatttatacccgcagatctcatagttatagcgcaagtgagtagatactcgaaacgctgtcgcaactacgattatatataccgtatatgcgaccatgatgcatgagaataaataaccaagtcgtactataccaaggactaaccccattagacctactgctatatacgagattgagcttggaacatgaactttngcatcgtgaagatgccgagatagcgtaacgaccccccctagagaggcgatgatcgcactctgacctnactgaacaggcttagagagcacgacgcccagatgtatgtccccctgattaccggcgaatctctataactgtgagcatgggcgaacaacatgcataactcgaatcccttggcagataccgtgcgtttggtacctagatcatccgaaatgcgttgggttcctacattgtcttgagataatgaaaccccatgagcacactcgctcgtgaaattcccctcgtatgtctcatacactcagaaaccttgtgtaggtcccacacttacgagaagcaagagtctctattgtcgggcactacgtacgaggccagaaagagttccctatgcctaacaaagcacgtaggttacaaaacttgattctttacccacgcggcccaactaaaggttatgtggggcctaaaaggaattgccccgaccccacacctagatgtgcagcgcgacactatgcaccgtggccaaggggtctttccggaattacccccacaacttattaaccccttgagaagaaacattccccccagagaacggagttcacttgagcattgggaaaagccttcgcgtatcgaacaatggcccaaattttgggcggaacccccaaccttccgtggattttcaacccccccttgaaattataagaaacagggaacagcctccacattcgggtttcacagagtttgattaacactggttaaagcccaattggtcaatcacccgccaagtttttccattctccatatccccggctccatttagaaggacccccgtgtccgtgttacccccgcacgtgttaaaccatattagtcccacccgttgtgtacatcctttcgggagcaaagattcacacccccaggctcccccgaatttacaattccttaattccgggaattctaagagaacccccaaagtgacgtatgcgtagcatagaagaactccttggatattacacaacacgcgattagccccttttccaactatcaaaaaagtgcgatccttagagccccacaactaagtaggtgttgtattcgtagaatgtacggaacaaggaaataacacacatat

SEQ ID NO: 543364 - DNA, 260 bp, Homo sapiens
cttaaggcactcatggatgaacacaatgcagctctccgaacagcaggatttcccaacggcaccttgggaaaaagacccagtggcagcttggcgaaaagacccagcgctccgctttagaagcaacgtgtatcacgccaactgagcatggccgctcgtgctcaacgcgtgggaccatcccaactagctccgccaatgtcacacagcgaagacaccctttggctgcaaacgcaccttctacacgcttccagcagcaactcacg

SEQ ID NO: 543365 - DNA, 987 bp, Homo sapiens
ggagctcagtgggcgggcagggggcgtggggaagtctgcatgccgagagtccagagaggaggaagctcctgccggtgagcgggctggaggaagtgagcagcggggtcctgcctcccggcctgtccccgaagaccccagaagaacccggaattgcttccaatacggaatccagggaccaccctttgcacgtcagtaggcctattgtttccctgcgtggacaggcggttgggcttgaggaagggcgatgggagccggagtacttgtacggaaccgtgctgcagctccccaaaaggggagttggagccccccaggggagggcaggagctcctcaaaaggaggaaagcgaagacaaataccttgccgacccaatttccgcggaaagggaccccaaactagttgtgaagcaccgtgccggacagggttgttgaaatggaaggtgcatcaaagggccacttcttctccccggaggccaccttggtggttcacgaagccgctggagggaggacattttcggacgggggttaatccctaacacagcgttattttcccagaaggctggggtgcgctcaaaagctgggaagcaggaggcaattcacgccccggacagacaagcaagaccagacagcaaacgtcacaggcgtgctgaagggccgtgacaccgggaggtctggcagcctcgacagagtgccggccaaaagtggagcgtaggagcagcatcttcaacaagggactgctgcaaccaggcgctcctggggggccggcaaagagctacaagcgaccagtccctccacacaagtcaggtggcgccaccaatcggcacccaagggccgagcccaaagggggcacagcaccgcaaccgacgaaccggcgaccccaaagacggtggaacaacaacaggccggaacgacccaacagagctagcgcaacagagcggcgggcagcaaaggccaggggagcaccggcgcacagagcgcgcgagaagacacc

SEQ ID NO: 543366 - DNA, 1554 bp, Homo sapiens
ctgaacctgtgtgctgctatgtgatgactttctgagactgatgatgcagactgaattttgtgctcacagcctgctcaagtgagtgtggatctgtgtgttttgtgccccgcaagcaccctgcatcactgccatgtcccatcattcactactgcctgtggagcggattgtaatatcaagcataccaacagacaccacgacgatgtgggtttgatagactttgaggtccatgcatatatggcttcaagtggttgtgggaaacttgtcatcagatgagaggttgggcaatctgagaggcatgctggatggcttggtgtgaccaccccaacggcataatcatggaggacaagaacccatatgatccatcatgggtgacatgactaggtgcaccttgacatactcccaacactgtatcgttctttgagcccgagtagtgggatatatataataatttgtggatgtggtatatggatggagggacatttaaatataatatagaagaaaagagagaaaaaaaggatacagtacaaaaagatatacagcgagaaagaggaaagaccacattcagaacatggagtataagtaggataacataagggtagctgacacggggaggacagcttaaactatcaccagtcaaagaccaacaccagcactagggctataggtgacaccggcacaacaggcgattgcgatgacacacctatgtcgcagctatccataaagctcaccctacgagagacgatgttggaccaccgacgggtcacgccgcaaagcgcagtaccagtccatgagcacaccaacaaaattggatagaggacaagctacaataggcattcgaacataatactagacacgtgtgcaagatatacgcaaggagatagcacaatattacgacaatagaaaataagttagcaccacaaggttgggtatctgaatgacacaaaccaaatatcagttcgacaacggcacactacctcttggtgcaccagagaggaaccaccaacaagctagccgcagggacacacgtatattacacaagaaaggcaggataaaaatatagacgaagataggtgagcaccgaacaacagaaagaccaaaccacaaacttcagagtaaacatgaccggcgacgtgtgcagcggatggagagaagacagaggacgagacactacgaagagcaagacaagaaagagacgaggcaagacgacaacacacacacgaccggggaggcgggcggcaaggacacaccaccgcaagccgccaacccaccataccaaaacaaagaaggatacacaagaccaccaacccacacgacagaatcgaagagaagaaagagcagcgaggaggagaagcaaccgacgaaatgagagggaagaatgagagagacacgaagaaggtgcagacacacaacagacgcgggaatgcacgagacgacgagagacgccgaaacgcggaaagcgagaggacagacgagtggaggcagtggcgagacacgccacgcagcaacaaaacaagaaagggacgcgcgggggcaagacgacaccggagacaacat

SEQ ID NO: 543367 - DNA, 217 bp, Homo sapiens
tccaaactgcccccgataacgctacgttagctgggccctgggccagaggcagaaaacggacggacgaaaaggagatgggtctcactctgtcacccagactggagtgcagtgagtggtgcgatcattgcttagtgtactccagtctgggtgacagagtgatcttctcgcctcaggctcctgagtagctggagctacaggtgtgagctacccagcatgg

SEQ ID NO: 543368 - DNA, 175 bp, Homo sapiens
taaaatagctttggaggtaaagggtgcatttcagcacagtgagcatggcctcctccagatgagtcgtgggtcacacacatgaagctgtcctcaatgctcttgatacgaagaaatgctcatattctccaaaacactctacagaagaatacagtgagataccgagcaaaatacgtaa

SEQ ID NO: 543369 - DNA, 445 bp, Homo sapiens
  misc_feature (27)..(27): n is a, c, g, or t
  misc_feature (172)..(172): n is a, c, g, or t
  misc_feature (348)..(348): n is a, c, g, or t
  misc_feature (409)..(409): n is a, c, g, or t
  misc_feature (420)..(420): n is a, c, g, or t
ccttcaaaaaatctgcctgacccctanctgctgctgctgctcactttaattcttgtaatggctttggtaggcatacttggagaacatatccccacattaggaattgatttaaacctgagagtttgagggctttaatcctttaaaacttggagaagctggctgggcgcggttntcacgcctgtaatcccagcactttgagagaccgaggcgggcggatcacgaggtcaggagatcgagaccatcctggctaacacggtgaaaccccatctctactaaaaatacaaaaaattagctgggcgtggtggcaggcgcctgtggtcccagctactcgggaggctgaggcagganaatggtgtgaacccgggaggcggagcttgcagtgagccaagatagtgccactgcacttcancctgggtgacngagtgagactctgtctcaaaaaaaa

SEQ ID NO: 543370 - DNA, 106 bp, Homo sapiens
ccagaaaaggcacttaacaaaatcataagttaatattccgtgtcttttcacacttttaacatatattgaacctgaggccaactaaaatttccatatgggtaccgag

SEQ ID NO: 543371 - DNA, 256 bp, Homo sapiens
atcgagctcggcaccctgtgtaggctgcagtgcaagctgtcagtagatctaccatctggggtctgaaggatggtggccctattctcacaggtccatgaggcagtgccccagtagggactctgtgtgtgggctccaactccacatttcttttctgcactgccctagcagaggttctccatgagagccccacccctgcagcaaacttctgcctgaatatccaggcgttttcatacatcctctgaaatattgacttctg

SEQ ID NO: 543372 - DNA, 1260 bp, Homo sapiens
taacatgtactagtataatttattctatgcttttaataaaataaataaagctttagaaaaaatgaaggtgtgatgggttccagcacaggagaggtgtccgggctgaggcattgcatttggtggaagacttcccatgtggggaggagagtgagaggagagctagagggccctgtgcctttcttcccctgtgtcatggaccaagcatttccacagtcttgcacttgttgccagaatagaagtgaagggtgtaaacatgtgggccctgtgcaggcttcctatagctctcgtgcttaacatgtggggcccccttatgaaacccatatagcttgtggtgtggccacctgtggcctgtggacctatggtgaggtggtgacagggggcccccccttgtgtttggcctcgtgggtctctctcacacaagagaggccagggtcgtgtttttgtgtccccccaccaaccccacacaaatttgtggtcccacactccacgggggtctctctctcccacaacatgagttgtggggggcggggaggaggaggagggtgtcccctctatcacgcgggtactagggacaaacaaaagtctgcgcccgtgagagagagacgaagcacaaaagcccccagcggtgaatgcaaaaaacaacaagagtgggcgcggaaacagttgtgtgggggtgcacacactgagcgcacatgtgtgaaaggagcccgtggggggaccaccaccccgggggggggcccaccacgcgaaaaatccccgcggagaattcaccaccataatttgttgttatgcgaatactaaggggggggcccccccgaacctcagctggagtaatacaacacacacactttccaaagaaaacccctgttgtgagtaggaggcaccccaaacacccaggaggaaatacccaccgggagtgaagcaacccaatcccagttggtcgagctggagttgaccccccacaactagcccgcccgagcaaaaatgggcgactgttggggggtggtctaccccccacttaataaacgggggcttccagatggtgcaccaaaaacaccgagctcgggtgggcataattcacacgcaaaagaaacaaagaaggagcccccaccacgaccagcgggagggggacaatccccccaggaaaaagaagagaggaaaaatactactcagccgtaccgacgagtgtagacaataacacggaagagagaacacaagaagacaagtagttgcaaaacagcggagcaggggagctgcccc

SEQ ID NO: 543373 - DNA, 315 bp, Homo sapiens
  misc_feature (140)..(140): n is a, c, g, or t
tttttttttgggggggggggggggggacatttttcccccgggacccccttttcccccttggccctttttggggccccctttaacccagttggggcaaaaaaaggggggggggggggggggggttttccggggtttttttncccccccggcgcccccaaaatttttttttaaagccccccccccttccccccggggttttttttttttttttttttttcccccccccccttttggggccccccccctttttaaaggctttgggggggggggttttttttttcccccccctaaaggggggggcccttttggggtgta

SEQ ID NO: 543374 - DNA, 149 bp, Homo sapiens
gtacatgacatctgccgtgtgccatgtgaggatccagcaaggaatgcccttatcacaccagatgtgggcaccattctgcttgagactttccagcctccagaactgtgagaaatacatttctgttctctgtaaaaaaaaaaaacagaaaa

SEQ ID NO: 543375 - DNA, 845 bp, Homo sapiens
agcgggagaagagcgtctagacccgtggagcagaggcggccatcgagacccaaccaaggcgtcggtcccctctggcggctcccagttgctcccaagctcgacagcaggcgcgcgtccccttcagctaggctcgcatcgcgtacggcgtcgtgcttacccactgctgtccgtgctgctgccactgggcggttgcgcgtctggcggcgctggacggcagatcgagaccggaccgtgcggtcaagggcacggtagccacgcctagatatgcacgcaattgcaagggataggagatacctgcgagatagccatggaagcagaacgttgccaagagatgaagtgtcttccccttccaagccctttaccgaaggcgaatgccattttttcctttgcctatgcaagacaaggcagacaaaggcgagtaaatttttgtgaaatcgtaacccaaacggggaacttggagcgtccctcgcggggctatataacccgagaaaagcgcacccgcgctaagtccttctaaccaggaattgtggcttagcggacttaatctagaggcgaattcgcttggccccccaaatggggttatacactttgtacactttgactagaccgcctagcgtacacgagtaatggcggaaccctcccgagacgcgtgagcccttggtgaaagcgggccatatagcggattaatgttccgccccccatttgttacacgcggagatatatcgcccaataggagacggaaacggcaaaagagacaactcgggaaacgggtggtaacgtttttacacacaggcttcgagcggcgcgctttcccgcgagccacaacactgtgaaaacatccccca

SEQ ID NO: 543376 - DNA, 201 bp, Homo sapiens
caggatccttccctggtatcccaccctagagagtacgatgtctggcatttgaggaagtaccactttaggccgggcacggtgctcacacctgtaatcccagcactttgggaggtcgaggcgggtggatcacctgaggtcgggagtttgagaccagcttgaccaacacagagaaaccccgtctctgggtggggataccagggg

SEQ ID NO: 543377 - DNA, 465 bp, Homo sapiens
taaaagataatcacccaccataagtataccaaactgctcttatcaactgcatactaagtgatatcaatagaagggtgaccgtataaaaatactgtagacaattgatagaataacaggttagagagagatatcccgaggcaattactaggatcatttgcaaaatgtgagactgtggatatttgaaatatcacagtaacaagatcatgcttgttcctacagtattgcgggccagacacttaagtgaaagcagaagtgtttgggtgactttcctacttaaaattttggtcatatcatttcaaaacatttgcatcttggctggctgcatatgctttcctattgagcccaaaccaaatcttagaatcacttcatttaaaatactgagcgggattgaatacttcgaagcagaacaggcaatgtgcagccctcatttatgagaaaaccctcaggaaactcccaggctgatgc

SEQ ID NO: 543378 - DNA, 467 bp, Homo sapiens
ttcatgccaatgctggttctggtcatgtatgacagcaggtgtatctcatagcagtattcactttcatgctgaacctcataatgcgtgtgatcagagagatcgagactcttcaggtcttctataccacagctctgggcaagtggcagggtggcgtcagtcacagggtgcagatgtgtgtggctcttgacacagagctcatcttccctcaagtcataaactcaagaggtatctgacgggtagaatggctgattagggtgtccatgaacctgtcagctagttagcttaaggtacactaatgaaagttaggagagctgaccagcatcccatctttccgatagagtattacatgacatctgtcagcagccttcttgacttcatgtcatacatgatgcctgacttaaggacagatgatctagtagcccagatgtatgctcagccgcttgcttcatgacagaccacgctcagtc

SEQ ID NO: 543379 - DNA, 710 bp, Homo sapiens
gtatttttggtagagacagggtttcaccatgttggtcaggctggtctcgaactcctgagcttgggtgatccgcccacctcggcctcccagggtgctgggattacaggtgtgagccactgtgcctggccttttttgtgtttttagtagagacggagtttcgccatgttggccgggctggtctcgaacccccgacctcaggtgatcacttcagcctcccaaggtgctgggattacaagcatgagccaccaagcctcgcatatccagtggcttttgatggctgaagtgcaagtcacaccccctctctgaattgcaccaggcctacaattcaccagatttgccaggctgggtggaaggatatgtaaatctgactcaattcacagcctctcttaacacttcaatcaaaattgcatctaattgaggttcattcataaacctcattgacgtaaacaactgcaaacatggaggagccctccccaaagcttgataattacttcacgatgaaaactcagctgtcagaacatcattgtggctatgacaactatgagagaagctggtttgcccaggttacccatgttaccagatgtcactggtgcttgagtgtcagcttcaaatgagcctcaggagcataatgagaaaaggcatgagaatatataaatgggtctgataagagaatgtctacatgactaaatattaaaactttaaacccccaa

SEQ ID NO: 543380 - DNA, 1050 bp, Homo sapiens
gcctcgtggccgattcggcacgatggcctgcaaactcgagcgtgcgcaggggcatgctgggagccacctgcggaaggtggtcctcccagtattggaccccgtacaggaagctccgggtgcccaggctgtggtgcacaggaccgcaggctgattgccgctcaggaggtggctcacactcatcgacaagagtgggcttggggactctgccctcgcctcgcccatgggcgcatggggccaaagcctgagactgaaggactgttggacctcagtcttcctggagcagaggaggagcaggaggccattgctggcgtcctccaacgagatgcccgcctgcgccagctggaggacggggcgggtcagcaagctccgggcctcagtggcagaccctgggcagctgaagatcctgacaggggactgggttccaggaagcacgctcccagcggcaccacaatgcccagttcggctctgaccttgtccgagcgtctatgcgcaggaagaagagcaccaggggagaccaggctccaggccacgacagggaggctgaggctgctgtgacagagacacggaagagggggccagagctcagggctcaacgagagactgaggcccgtcaggagcaggctcagggagactgagagcttcagcatcctgaggaggcgatccagtgccagtggcgatcctggacacaggacgagccacaaggtcatgcgccgacgagcgtagaccaggcccggagcacgagctaaaggaaaagcagcgcccaggaccagcaggccagaccaggacggtcccaaacggagacagggcaccagccccagggccgaaccaaacaccccggagccgcaccccagggacaaatacaaccagctagagccaaaatagaccggagacagggagacaggagctcagccacgagaagacaagaccaaacgggacagagagaaaagcaccaccagacggacaccagcacaggcactcagacaaccacccaaagcgacgaaaacacaaaagaccccacagcgaacgcccaagacaaacaaaggagccaca

SEQ ID NO: 543381 - DNA, 183 bp, Homo sapiens
tactcaggaggattgggatcacggaccctcatccattgagggctgaacgcaaagacccacgggggggggcacagtcggtgagcggtgaaggaagctggccatgtagatagccgagtagggggacagacacacacagaggaggcccacaagaaaggggagagaccacagtgagttgggcgcggg

SEQ ID NO: 543382 - DNA, 388 bp, Homo sapiens
ccacatagaggtgcataaagtgaaataacttgtgtcacgtggtttcacgttggtcattcctggcccaatcctttccccaatacttacagcttaatggccaacgttccttggaaaagttaggccctcaatttatagattcaataccagtggcccgagtatggcacaggaagtaaccaattatctgaatgcaaacttcttaagccttgggggaagacacttcaccttctccaatgcaaaggggcttgctgtgcttcacaggcaatgtgtgcttgcgcatttaatactctgtgcccgtgtgtgcacatttttctgtggaactctgtgttaagagtctctctgtgagttaagagagcctcacacctcgcgtgccatattcgtacagcccggg

SEQ ID NO: 543383 - DNA, 328 bp, Homo sapiens
ggaagatcctggtggtgatgactgagccaacacctaatgtggaaatgagaggacagcaagattgtgggtccagcctgtggtgtccacaatgccccaggcctctgagcaccgcctgggcctgtaccctgagagccaccttgttaatatccatgccccgatgtgggatccaatgctaccattttgcccaccagggccctgcagcaatggacgcgcatgaaacccatgcctctgtggccaagaccccaatgttactgaccctctgcgctccccgtgccatggtcttgcctagatgaactggctcaatgaaacgtggagcttgggactgggg

SEQ ID NO: 543384 - DNA, 271 bp, Homo sapiens
taaagacacagagttcttgctctgttgcctaggctggaatgcaatagcatgataatagctaactacagcctcaagcttctgggctgaagcgatcctcccacctcagcctcccaagcagctaggactacagacacatgccaccatgcctgcctaatttttaaattttttggtagaggtggggtctcactgtgttacccaggcttgtcttgaactcctagcctcaagtgatttttccaccttagcccccgcaaagcactgagattacaggtgt

SEQ ID NO: 543385 - DNA, 351 bp, Homo sapiens
  misc_feature (5)..(5): n is a, c, g, or t
  misc_feature (68)..(68): n is a, c, g, or t
  misc_feature (122)..(122): n is a, c, g, or t
  misc_feature (125)..(125): n is a, c, g, or t
  misc_feature (147)..(147): n is a, c, g, or t
  misc_feature (160)..(160): n is a, c, g, or t
  misc_feature (163)..(163): n is a, c, g, or t
  misc_feature (180)..(181): n is a, c, g, or t
  misc_feature (186)..(186): n is a, c, g, or t
  misc_feature (206)..(207): n is a, c, g, or t
  misc_feature (219)..(219): n is a, c, g, or t
  misc_feature (223)..(223): n is a, c, g, or t
  misc_feature (227)..(227): n is a, c, g, or t
  misc_feature (231)..(232): n is a, c, g, or t
  misc_feature (247)..(247): n is a, c, g, or t
  misc_feature (250)..(250): n is a, c, g, or t
  misc_feature (264)..(264): n is a, c, g, or t
  misc_feature (313)..(313): n is a, c, g, or t
  misc_feature (336)..(336): n is a, c, g, or t
ggggnatatactctgggggcatttgcggttcattttcagtcatcaaataacatacatcacttccaaancgtagcctcttgtgtgcagagaaattgccttcccacggcattcacaatgtaaanggnccttttggattaaagggtcagnctctttctatgtnacnaaaagtggaatgccagnnacagngggacttatttttgtgcagnnaaagcgtctggntgtntgcnaagnnttctccgccctcccngcnctttacatgctggnacctaactcaggtgctgggtcaccagcacgggggggcctctgataaggnaaactgtttaaagggtacctggnggctaaaagtcaggt

SEQ ID NO: 543386 - DNA, 113 bp, Homo sapiens
agaggatccgagtgtcgcctcatcattctatctgttgcggaatttaaaaagctagattgaacacctgatcttaacctcgagagccttaatcactattgttttggagagacact

SEQ ID NO: 543387 - DNA, 301 bp, Homo sapiens
cgttggggacgagccccaagttgagaacaagtaagtgaaccaattgttgtatgaaccacttgttacggaaacagctaatcataaacaacctgtggtgtacatatgtttttccctaaaaacgtagcacccttcagcaggaccctataaaactttcctccagcccttgcctctttgcaggtagccccttctctgctgagctgcccactgcaacatattttcacaatttctctaataaatctgcccttctttacctacaactatcttggtaaatggctttaccacctgcaaaactgaccctagg

SEQ ID NO: 543388 - DNA, 270 bp, Homo sapiens
agggcccccccctttttcctttttcccccgtgggttaaaaaggggggttaaaaatcctttccctttttggggccccaaaaccccgccccctcccctggaggccccgaaatttattttttttggggggggcctgtgggggtccccggatttagtttttttggccccaagggcccctttggggtattgggggtttttttccactcccgggggtttcccctttttttagggggggcccgggggggcaaaaaaaatttttttggccccctggga

SEQ ID NO: 543389 - DNA, 169 bp, Homo sapiens
  misc_feature (13)..(13): n is a, c, g, or t
atgagacagctgngtactagtgagacctctctataaaattaaaactggccgcgtgtgggtgtgcttgtggtcaccgttatgtaggaggctgaggaaggaggattgcttcagccccggagtcgaggctgagtaagccgtgatcacccactgcatccaggctgggacagag

SEQ ID NO: 543390 - DNA, 151 bp, Homo sapiens
ctagctcggtaccctaactccattttaacttattacctcttaaagaccctaatatggtttggctctgtttccccatccaaatctcatgttgaattgtaattcccagtgttgaaggaggggcctggtaggaggtgattgaatcacggggggg

SEQ ID NO: 543391 - DNA, 144 bp, Homo sapiens
ttgatcccaatgcagcggaatcggaggcagtggcccaaggcatggcgcagcagacaatgagtgcatgtggtggctgctgcctgcaccagcctcagtggcagatgacacaccaccccccgatgctgtctggaacaatgacgcggt

SEQ ID NO: 543392 - DNA, 158 bp, Homo sapiens
tcgatgagacttttcatttttatttttctcttttattatcagcaggtcgaaaagaaccttgatcactttttatgattgccacttatgctttagtgccagatgcctttggagcaggtgcttggtgggatgtagctttttgacccttctgtcgtcttctc

SEQ ID NO: 543393 - DNA, 563 bp, Homo sapiens
gcttattgcatgtcttccaattaccggtctgcttagtggctaaggctgtcccctctcaccctagtttaagcaactaccggctgggactcaaaaagtatcaccaaaaaaagagttggagcaaaactacccatgtgtccctcaccttctgatttctcaaactgctccagcagactggacaggtccgatgcctcaattcctgtggaggcacacaacacaggattgaaaacgagcccctatcaacttagtacacaggtcccaggaagcccccaaatcatctcacttctccctttccactccccctgccctctgtactaagtgaaccaaggtagcagcacaaagcatgaaggattcaaaccaacccagggctctgcctctgaagaaccctccacagccaggtacggtggcacacacctgtgcctataaatcccagctacttggaaggctgaggtgggaggaccacttgagcccaggagttcaagtccagcctgggcaacacagtgagacctcatctcttaaaaacaaaaacaggccaagggcggtggcttgcacttgtaatcccagca

SEQ ID NO: 543394 - DNA, 991 bp, Homo sapiens
  misc_feature (336)..(336): n is a, c, g, or t
gaaaataaaaagaatccagcatcatcacgaaagaacctgtgcgtgaggggggaggagaaagcagtctctttctacaaaggcaatcacaacgaacttttgctgccaggatgcccttgacttgggctgaaagtgattctctgttgggcaagattgctggattatatgctgaggatgttaccactccaacccacaggatgctcgaggagagtcacagtcgacgtggtcgcccgagcgagttcggtcctgtgtcgactggcacgacctccgcaaaggatgtatcccaatctctacagtgtcagagcatggtaggaagagcggctacaagaaaagcactanttgtggataagcatatgcttgcagccttgaatgaaggagagccgtagtgtcaagcccatgcgctggttacccaaggcggcgcttcgtgaagcgcgatcagaaagcttcattgtgggcaaagtcggggagaacgggtatgtggagatagaggatgacattggaaggagggcagaaatgaatgaacttatggagcagacctcggagatcatcgacgtttgccgagtcaggaacagccaggaagacgcgtgcactatcgagatttccaacgaaggcagtgacctgtcagtggtggagcgtgcagaagtctggctctgcctaaaagtccccaaggccaacagggagcaggaccgaaagtcagcatccggctcttccagcagcagaagcacccgcagggcagcttggacacaggggaagaggccgaggaagtgggcttaaagggggagaggaagtgaacgtgtagctctctgacaaagtaagtaaaacgctccgggaaagaagcaccatgggatggtcttcgcctggtctccaagagcattccaaggggttgctgggaccagggccgaaaagtccctggacgttccggattgcctggtgaccaggtgccaggacaagttgcggcaaggtggttctcctgggcaagagaagaaggagaaag

SEQ ID NO: 543395 - DNA, 262 bp, Homo sapiens
cgccgttattaacctaatcgcaaagaagatagacagtgtactagaagagaggcgggtcaagaagtagtgaagaagcatactcagttcataggctatcccatcaccctttattttggagaaggacgagagaaggcaattaagtgatgatgaggcagcaggaagagaaaggtgagcaccgaagaggacgataaagatgatgacgaaaagcccaagatcgaagatgtgggtacagatgaggaggatgacagcgattagggttagt

SEQ ID NO: 543396 - DNA, 375 bp, Homo sapiens
ttagcagattcttactccttatttactagctagaattacaaaagcagatcagtgtatagttatgcatagcttaacgatgaggataccttctgagaaatgtgccattaggtgattcattgtgtgaacatgatagagtgtacttacacaaacctagatggtgtagcctgctatacacctaggttatatggtatagcctattgcttctaggctataaacctgtacagggcattactgtactgaatactgtaggcaactgcaacacaatgataagtattatatttgtgtaactaaacatatctaaatatagaaaagttacctttaaaatacagtattatcatcttatgggacaactatcgtatatgtgatccatcagtg

SEQ ID NO: 543397 - DNA, 198 bp, Homo sapiens
ccagggcacatagtatgctatgcatccatttgtcgtgtgacagcagtgaagtcagagtaacccgcgtcaggtccagagcctttgttttcctctgcggattcccttgggagcatttctgtggaggataaaactcgcacacggtgccttaaaataaatggctgtggggaatgcttgtgtacatcagctgcgtggcattcg

SEQ ID NO: 543398 - DNA, 967 bp, Homo sapiens
  misc_feature (31)..(31): n is a, c, g, or t
  misc_feature (86)..(86): n is a, c, g, or t
  misc_feature (101)..(101): n is a, c, g, or t
  misc_feature (117)..(117): n is a, c, g, or t
  misc_feature (147)..(147): n is a, c, g, or t
  misc_feature (150)..(150): n is a, c, g, or t
  misc_feature (220)..(220): n is a, c, g, or t
  misc_feature (231)..(231): n is a, c, g, or t
  misc_feature (287)..(287): n is a, c, g, or t
  misc_feature (289)..(289): n is a, c, g, or t
  misc_feature (292)..(292): n is a, c, g, or t
  misc_feature (296)..(296): n is a, c, g, or t
  misc_feature (299)..(299): n is a, c, g, or t
  misc_feature (320)..(320): n is a, c, g, or t
  misc_feature (349)..(349): n is a, c, g, or t
  misc_feature (354)..(354): n is a, c, g, or t
  misc_feature (409)..(409): n is a, c, g, or t
  misc_feature (451)..(451): n is a, c, g, or t
  misc_feature (463)..(463): n is a, c, g, or t
  misc_feature (477)..(477): n is a, c, g, or t
  misc_feature (481)..(481): n is a, c, g, or t
  misc_feature (502)..(502): n is a, c, g, or t
  misc_feature (506)..(506): n is a, c, g, or t
  misc_feature (510)..(510): n is a, c, g, or t
  misc_feature (522)..(522): n is a, c, g, or t
  misc_feature (524)..(524): n is a, c, g, or t
  misc_feature (531)..(531): n is a, c, g, or t
  misc_feature (535)..(535): n is a, c, g, or t
  misc_feature (542)..(542): n is a, c, g, or t
  misc_feature (579)..(579): n is a, c, g, or t
  misc_feature (591)..(591): n is a, c, g, or t
  misc_feature (598)..(598): n is a, c, g, or t
  misc_feature (677)..(677): n is a, c, g, or t
  misc_feature (704)..(704): n is a, c, g, or t
  misc_feature (723)..(723): n is a, c, g, or t
  misc_feature (742)..(742): n is a, c, g, or t
  misc_feature (767)..(767): n is a, c, g, or t
  misc_feature (774)..(774): n is a, c, g, or t
  misc_feature (781)..(781): n is a, c, g, or t
  misc_feature (785)..(785): n is a, c, g, or t
  misc_feature (790)..(790): n is a, c, g, or t
  misc_feature (833)..(833): n is a, c, g, or t
  misc_feature (877)..(877): n is a, c, g, or t
  misc_feature (888)..(888): n is a, c, g, or t
  misc_feature (906)..(906): n is a, c, g, or t
  misc_feature (936)..(936): n is a, c, g, or t
accacccagcacagggcaagacccagggccnggccaggcgagcgcacacaataagcggggcctgagccaggaggcaggcggggggnggggggagacaggcngaacggccaggccacngcaacagtgagagacccggggagcccctcngcnagctcagccaggaggaaggagagaccaaggcacagagcctgaaaaaagacatcctctcccggcctcccancccaaagcccnggccccgaggccagtgtagacagaaccaggaaagccaaaaacaaaaggcaccgagnangtnagtncanggggagaacgcaggcaggggngggaagcgcccacctccaaccccgggccngggcnacggggacagtgcgggcgccagcggcgtcaggacaccacccaccaggggcaggcngccagtgactagcacagggatggcagcggcctcacggagtangcgggccccacngtgagcgacagggngggngaggaggccctgggggggacnaggnggcnggaagagggggncncggcctnggcngagccangcgaggcatgtgagaggcagcggaagacgagggagcnggcactgcaggngtggggngggtggggcgccagaagcagggatgcggacccaccgggctctgggctgggggcactccagaggtccgggctggcctgcncttcgtccaggtggttccagttctgcnggtgttccaggcagcgganagggacctggtccagtgtnactgtgaagttctgtggggctgcgnggcctgnggatganaccnctgtnaggttagggcagaagacggcatagtcaaactggcagggctgcngccgcctcagcagggccgccgggtcccggtccccggtagcattnaagagcaagantcgaacctcggggccacngctcggcctctcgcggccctgcagcgcctngggggaaccagcgcacgcaggcctgcgcgct

SEQ ID NO: 543399 - DNA, 168 bp, Homo sapiens
agcaccaccaggtattaaggaattgcgacaataatgaaggcttcccacaagagaccaattacaagggtagcatgtacgctagcttgacttttgtgacaatcaaaatcacaaggacgaataaggaaagccaaaccttaattctgccaaggaaggctgtcaaaggctttt

SEQ ID NO: 543400 - DNA, 1492 bp, Homo sapiens
  misc_feature (243)..(243): n is a, c, g, or t
  misc_feature (253)..(253): n is a, c, g, or t
  misc_feature (505)..(505): n is a, c, g, or t
  misc_feature (606)..(606): n is a, c, g, or t
  misc_feature (831)..(831): n is a, c, g, or t
aaacaaagaatcaggctttattttggttatttggaatacaggttattgtattggtagacattctgtgttagtcttcattaatttcagtagtggccaacacacagaaatttaaaagtagaaacaaaagtgagggcacactttgcctccgtgtccttggcttgtggccccttccaaccttccaaaaagaactgtgtccttcccacattgtggtcattattcctttctccctgtgtccttacaganaaagaacaanaaacacaaatgtgatgtgcccacaaaggaaaaggttccacagagagggcctcttctctccacaggcaagtctcacgtggtgggaagtagaaagcaagagaacacactgtgtgttcacctgtgtggggttagaggaagtggcgacgacaagaccacaccagagggtcgtccaaatcaccccacagagagagtgccacacagagtgtgcgcgacagtgtggagaaaacgccacacccagagggtctcccaattnaccagcagcagggagatggccgccagcgtgtgtgtgtcgcacaaccgagtgtgtacgacgcctaaaaacctctgttgtgccaagtggggtgtgagacgaancaacactctcatcaccacacccagagtgggggagagacaccccgagagagacacttttattctctctttcacccgagtgtaaaatccctctctgagagtgtgtctcaacaagggccgcatatctcagagagttatcatgagggacgcgaagcccctgttgtagagaggcacaagagccccagggatgagggaaagagcccctgtgtgttccctcttctgtggggnggggagtttggctatagacttttccccaggagagagaaagggccccccaaggaggggcgcacccaggatatctttaccttcttccaagaaagatgaaggcggggggctctacaaacgccggcgggggcgacacaagaacgggcgggggggatactctccgatgataagagtaaagaggcccggtgtgctccacacacgaggtggcttcccacagaggcgggggaaacccctccaatacccgacctgtgtgtgtgccccaaaccctgtgtgtttttcccccccaaggaggagggacctttattaaacagtggttgtttggaacagtcatctccaccaaatcttggtagtaccccctttggagaggaaaactttggcctcttgggggaaaaaatttttgctctccaaaacaactcccaaactgtgtttaaacaacatggttggcgaacacacacgggggggaaaaacttctcgccagacaacaactaaacactaaagggggggtgcatcttttgacagaaagccgtgtctttctagggaagaacccagcctgtgtgacaaatttcttcaccaccatatatgtcagtgccaccgacggcgtgatcacaactgtgtcgttcttacactaacgcagcagacccacacgagcagcatgtgcgtcact

SEQ ID NO: 543401 - DNA, 168 bp, Homo sapiens
tacctctctcccacatgggcggcggtgctctcctctaggtgctgctcgcggtgctgtttctggtcacccggcggggtcagcatttgccgcgttccttttactttttttcccctttccttctgcgcatgcctgtgttgggttgcccgtgcgggtcatcctgccttgttg

SEQ ID NO: 543402 - DNA, 887 bp, Homo sapiens
  misc_feature (689)..(689): n is a, c, g, or t
  misc_feature (726)..(726): n is a, c, g, or t
  misc_feature (749)..(749): n is a, c, g, or t
acaataccaaaagaaccaaaacaacaagatacccacacaacaaaaaaacacaaccacactagaccacaaagacaaagaaaaaaccaaaaacaaaaagaagaaaaacgcacccccaagaaccagacccggagggcacgatccgcatcgtacaggcatagaggttctgcccgttgctgagaggacgcgtctagtcctgaaggccaagggaatcaggcatgaagtcatcaatatcaacctgaaaaataagcctgagtggttctttaagaaaaatccctttggtctggtgccagttctggaaaacagtcagggtcagctgatctacgagtctgccatcacctgtgagtacctggatgaagcatacccagggaagaagctgttgccggatgacccctcatgcagcacacagcttgccagcacagcatgcatcttcagcagttgttttctcaaggtgccatcccttgcgtcaggcaagctttcattcagacagccacaaatcaaagacagcactatgctggccttacaaagacagcaatttcgtcaacagcacatttaccaagctcagcaggaggttctgactaatcaagcacagcacgaccttcttggtggcaattctatctctcatgatcgattacctcatctggccctggtttgaacggctggaagcaatgaagttaaatgagtgtgtagancacactccaaaactgaaactgtggatggcagcatganggaagatcccacagtctcagccntgcttactagtgagaaagactggcaaggtttcctagagctctaattacagaacagccctaaggccaaaacataagggctctaaagggaacagagaacagcaataaagctaaaacagaaattttccatcactaaaaaaa

SEQ ID NO: 543403 - DNA, 318 bp, Homo sapiens
ctggccactttaggactgacactgatctcttatcctagtatcctcttatcatttctattgccacaagcgtaacctccgtcggagtcctgcttcattcattaatcatccaaccacctcaattatctatcaaccttgctatggtcgtccccttatgagcgggcgctgtgattattggcttacgcgtctaagattaatcattgccctagcccatgttcgttaccagcgaaggcacatcctactccccttatcccgcatactatttattatcgaaaccatcagcctactcattcaaccaatagccatggagtacatggggca

SEQ ID NO: 543404 - DNA, 577 bp, Homo sapiens
aaaacgtgggccctttttgacactcctgtgacctttaatcctttggcagcctccttatagatgcttgggcgctgttccaaccaaccgcatggttctgccgaacttatatagagtacaattgtgtgccccgcgatatttatgttcgctcataaccacatttctccgcgccatcgcaataaattaattactctcttgcaagcgcttcagttaactcctccctcccagtctccccgaatgtgtttccaatgccagaatttctcaccacgaactttatctcgaacaccagcatttcatcaaggacgccggagtggaaccctgtgagaaggtattgcctctcattatcccgtccaggacaagagttttcccacgatcccctggcgttgagggggaccaactcattgcagcctttcctctgaaagggaagatatttttgttggaattgttggagaaaaatcgggtgaagtatctggtctctcgaaaaaaggtctcacggcagctccgtttatagcgtgcggaactatccacgacggcgccacgggcattggtgccccacaagaagcacgtctcgtaagacgga

SEQ ID NO: 543405 - DNA, 1021 bp, Homo sapiens
  misc_feature (165)..(165): n is a, c, g, or t
  misc_feature (444)..(444): n is a, c, g, or t
  misc_feature (1006)..(1007): n is a, c, g, or t
cgatagaaacaccatcattctagggtttccaaatccacccaaaggtccagatggagcaagaatggtaccattccatttaacatggtatatccatgttggttacattcacagcaaatctttggacaacagggctgtgaacagagttccactctcaacattggaagnacattggatcctagacatattttccaattcatatccttctttaacattaatggagataagatggtagcattataggtggtaccataccaaggttggaccattcctggattccattccaacaatagattaccatcccctttggcttgggttttgggatggtcccagaagaacataaaatttaatacccattccataaccatagatattttccagataacaaagcaattcatagcagccaatggaaacaatccagacagatagggtccagagaagcccttnattaatcctccttaaattataccaccaccatattattaacccgtggcatattattcttccttaacagcaaaccaacattcttacaggtaatgcgttaatttcaacccaaatggcagcaacaacaactctctaatcacaaagtatatccagtttgccacttatcagaactaggaaagggtatatattcaacaaacataggttggtaagccacaaaaggtttgcttatactggactgagccgggtattcatctccttggaaggcacgcattcaattacggggcttataacagaatccatcggggaacttcttcattttcagttctggataattcccacagctgagacccacttccgaaatgggggagccaatattcgaagccacggtgaatatgcttccagttcttcccggttccaaacgtaaacgggtatccaacgtggaacgggcaaagtgatcccatcgatggttcgaaattatattgaaaggaactactaatgggcgcagagccttcctgacaacgcctgataggtttcgattttatttttattttttaataagattgcnnctcacgacgcgacc

SEQ ID NO: 543406 - DNA, 293 bp, Homo sapiens
tgagtgagcacagctcataatgagagggacacaaaaggtcccatgctgagagcagaagaagtaccctccatcggggaggcgtagaagtctctccaacaccaacagtaagagaaacatgcttggatgacgatttggtactcccatatcactgtctactgtattggctacagtaaccaactgtttgagaagaaaaggaatagagtacagggaaacgagagaaaaactctctccctgtcatactatatgtataggaatgtccatccttatgcccataataactccaaaaatacttg

SEQ ID NO: 543407 - DNA, 663 bp, Homo sapiens
gctaaacctagccctaaatccactccaacttactaccagataaccttagccaaaacatttacccaagataaagtataggcgtatagaaatagaatacctggcgcagtagatatagattaccgcgaagggaaagatgaacacttataaccaatgccataatatagtcaacggcatctaacccactatagccgtctctgtcagtacatgacattgatctaggaaagtaacgttgtgcaagggagagccaacaagtctaagacccccgtacaacacagcatcgagctacctatggaaccagctaaaagagcatacccgttctatgtacgcaaaatgagtcgggaagattctgataggtagaggagataaatctaccgtagcctggtgtatacgctggtttgtccatagatagaatcttagttcaacttctcaaatttgtcccacagaagccctctaacatcctcctgtgtaaattataactgttagtccaaagaggatacagctcttgtggacactcaggaaaaaacgctgtgtagagagagtacaaaaatctaaatacccatagtaggcctaatagcagctcaccaaattaggaaagcgttcaagctctaaatacccgatgtacctaaaaaaatcccaaaaatatgaactgaatctcctcatacc

SEQ ID NO: 543408 - DNA, 290 bp, Homo sapiens
taagagcaagagtgaacgagagagggagggagagagtgagagcgagcgagatctttggagagatttttttatgggcccccaacttctgtcttgaagccagacaatcgacttcagctctccctcccctccctctttctataagatcagctcccactcgctctcctagtccccttcccctcccctccaggaggaaagccccccgaaaccaacaaagatgagccgagagaaacaaacaaaacaaacacaccgggccaggatggagatcgacaaaactttgcaaaagcaaaaac

SEQ ID NO: 543409 - DNA, 561 bp, Homo sapiens
ggcggggcgcggtggctcacgcctgtaatcccagctctcagggaggctaagaggcgggaggatagcttgagcccaggagttcgagacctgcctgggcaatatagcgagacccctgttctccaacaaaaaaaaaaaaaaaaaaaaaaaaaaaaagttgtgtgtggggcggctgtgggcccgggaaaagttttttgaacccattggggcgggggggggggccccgtttgtgtttacaggtgcaccacgtgggcccaaagcgcggtgtccccaaaaggagagaacccggggccagcgagcaaaggcgcgggtgggcttctccccaatataaaaaaccgcccggggggacacacggggcgggtttctggtgacacaaaatctcccaagaggggaggtccaagagggcgccaaaacggggggctctataccaaacggggcgccacaaggagagcccgggaaattccaattaaccccccgcctgtgggggggggaaagcaaaaaaatcacaaaacgaaacaatcaacacaaaaaaacaacaaagacacaaaaacaagaagcaaagat

SEQ ID NO: 543410 - DNA, 930 bp, Homo sapiens
  misc_feature (696)..(696): n is a, c, g, or t
tgcccggttggcactcccgtctctgggggcatgagcttcaccactcgctccaccttctccaccgaatctaccggtccctgggctctgtccaggcgcccagtgtacggcgcccggctcggtcagcagcgcggcagtcgtctatgcaggcgctgggtggctctggttgcccggtatctcctggtgtcccgctccaccagcttcagtgggcggcgagtggaggtccgggggctcgtgtgccaccggagtatagtccggggggttctggcaggaatgggaggcatctcagaacgaggaaggagaccatgcataagcctgaacgacctgtgctggctcgtcttaacctggacagagtgaggagcctggagaccgagaatccggaggctggatgagtcatataatcgctgtggagctagcttgtgtagaagaacgggagccctcatgatcaggagacgtggcagcccatatacttcgaagagtcatcgtagggacctgagggactcaaatctgtcgcaagatacctgtggaccaatgcccgtatctgttctgcagattgacaatgcccggtcttgctgctgatgactttagaagtcagagtatgatgacagagcctggacatgtcgaccactcatgtggagtaacgacagtccatggagctccgactaaggtcattgatgacaccagatatcacaacgactngcagctggagacagagatcgaggctctcaaggaggagcttgctcttcatgaagaagaaccacgaaagaggaagtaagaaggcctacaagcccagatttgccagctctggggttgaccgtggaggtagaatgcccccaaaatctcaggactcgccaaagatcatggcagacatcgggcccaatatgatgagtggtcggaaaaccgagaggagctaaacagtactgtctcagcaat

SEQ ID NO: 543411 - DNA, 1026 bp, Homo sapiens
  misc_feature (1025)..(1026): n is a, c, g, or t
acatcacgggttctcgaatgcggcccttcagactggtgcagttcatcatcatggagacccgcaagaacagatggcacttggcccagcgcacagctgcatgtcatgaacaacaacatgtcggaagaagatgaggacttcaagggtcagccaggcatctgtgggctcaccaatctgggcaacaacgtgcttcatgaactcggcccttgctattgcctccacaattgtgcctacagctcacctgagatacattccttcaacaatagcatgctacctggaggagcttcaaggttccgacaagccattgggcatgaagggtgagatcgtcagaggccatatgcagacctggtgaagagctagagcgtgagtctggccaccaccgtccattgtgccacatgtgttcaagaacagaggttggccatttagcatcccaatttctgggctaccaacagaatgagtctcaggagctgctgtcattcctcctggacggggctgcatgaagaccttaatcgcggtgaagaagaacggagtatgtggagctgtgcgatgctgctgggtgatccggatcagtgcatgtgtggcacatgatggcgaatggctaaaagcacaaacgggggaacgatatctgtgatcgtggaacactttccacggctcttcaagtccacgctgatgtgccccgattagaggaagtgtatcttgtgaccgttcgaccccttttgttactctgtgttccctggctatcacccacatgagggtcttggaggtctcttttcccatggtccgcgctcagccgagcgctcgtctggtcccgaaggcaaaaccggtcattgtgggccggccaccaacgtcttccctaaaagagaagtgttggtctcgtccgtctttatttcgctttagaggctacgttgggccgggattccataggtggcaggccggccagaccgggctttcgggccgctcgggacttccggttcaccccttggcgcgcgaggagttctcccccaggcgagctccgcgtaccctactcnn

SEQ ID NO: 543412 - DNA, 371 bp, Homo sapiens
aaaatatcataggcacctcaaaggcgtgtacaactgttgaggtgacatttttgagaggaagagaaagccggccagagcattaagacagataaaatgagaaacacagaggccagtgttaggtggagaactccgctgcttcagaaagagaatagcagcgctcgcttaccgtgggaacacggccaggtaacaaaaggggggttggttttttgtgttgttttgttttaccatgtggtaataagatagttgacataagtggtcagaacttcgctgaatttgtgatgaagcgagttgttaagcgtgtaaaagtccgaatgaagagtcgtgaagaaagacaggtatggcgatgagcctagacattgttcaaaaaaaga

SEQ ID NO: 543413 - DNA, 115 bp, Homo sapiens
ttcccgggttcaggtgatcctcccgcatcagccttcctagtagctgggactacaagcgtgcctcaccatacctggctaagtgtagtatgtaaggtagagacaaggtagagccgag

SEQ ID NO: 543414 - DNA, 188 bp, Homo sapiens
tgtataaaatgttgagatagccatctcatgggcttattatggtctagtggctcctggtgctataagtagcagaagtgagtaactgcaacagaggcagtatggcctgctaaactgcaaggcccagaaaaaattggctgaccttggcttcagagaaataaaatgactatgaataaaatatattctatgtg

SEQ ID NO: 543415 - DNA, 598 bp, Homo sapiens
acacttacgacttctagtgtagtccacatctggagcatatgtcatgcatacgctggggatgctactgtgtgctgaacattatatttaagaaatgtctttgatcccatgtgtatggaccccatctattccctgtctccttgtttcctaagtgctgatagcatcatcattgttctactactgctgtgataataatgaaatgtttccatttttacatattctttgctttattcactcctgtggtgtgtagggacattatacatgtggttgcccagtgccatgaggaaggattggagagccacttgaggtcatatgttaaggtatgtaaaacacactgttctgatcacttacatctgtggctctccagttttccttctaaggacttattttttcacaagcctggttatttgaggatgtgcctgtcacgtatgctttctcttctatttctcatagccaatgcttgtacctcaatagggcaggtacgaagagggacagccattcactaatttactttattccattccttcaattatgtttctttgaatgggtttcccatataatatgactcaatgtggaagtttaaagaagaatttaagttgtt

SEQ ID NO: 543416 - DNA, 656 bp, Homo sapiens
ggcatgatcgagactcggtactgatggagtgctggttgagaaaaaggaagatatacattgttagtgggcatgtaaattacttcaaccattgcggaagatggtgtggtgattcttcaaaggcctaaagacagaaataccaatgggatggacccagcaattccattactggttatataccccagggaatataaaccattctattataaagacacatggatgtgtatgttcactgtagcactattcacaatagtaaagacatggaatcaacttaactgcctatcaatgatggattggataaagaaaatgtagtacatacacaccatggaatactatgcagccataaaaaggaacaagttcatgctctttgcagggacatggatgtagctggaggccattatccttagcaaactaacacaggaacagaaaaccaaacaccacatgttctctcttaaaagtgaaagctaaatgatgagaactcatggacacatgagaggggaacaacacacactgggacctagttgagagtggaggttaggaggagggagaggattgggaaaaataactaatgggtactaagcttaatacctgggtgatgaaacaatcggtgcaacaaacccacatgacacaagtttaactatgcaacaagcactccaaca

SEQ ID NO: 543417 - DNA, 155 bp, Homo sapiens
  misc_feature (31)..(31): n is a, c, g, or t
  misc_feature (55)..(55): n is a, c, g, or t
agtggacactgggcttgaacatcctacgggnggctctgaatggcttctgtcagancacaaaccgttgacccaggatatgtccactcataaggccattcagactgagaaagacctgcagatacaaacggtctgtgaaacaattcacaatctggttg

SEQ ID NO: 543418 - DNA, 365 bp, Homo sapiens
  misc_feature (133)..(133): n is a, c, g, or t
cccacctctttcatccacataccttatccattcccaacaaagtttagcctacatggaaggtgtttaggcaaaggtgggccgccttttccccttgtccttatttaccgaccccgccgggcatttaacacccacntggacttcagcagagtggttcggggcgaaccagccatgggccggtcacccaccagtcccgggttgggttttccggtccggtccacgggaaagcaggcctccagttggaaaggccaggcctggagcttgccttttcagtatttgcggcagtttcagttttttgtttttttttttttaatcacaaaacaatttttttaaaaaaaaagctttgaaaatggatggtttgggtatta

SEQ ID NO: 543419 - DNA, 1161 bp, Homo sapiens
taaaaataaatcatggccttaatttgggagtaacacaaaaagaccctacataacttcacattttagaaacttaggttgggtgtacattaacaatactgaattttgtgagaaagtataagcgtgtcaagctagctattgtctaaatacggaaatagaatatttatacacatagtggtttaaaccttatacacatgtggccctcaacaacgtgagaggacacatttataattttgcgtctctcaaatatacccaacggttagtgttattatagcaaactctaatctccgtgggttctcgtgctccacagaagacaggaaaatctccatttcttataagccattctagtgtgtgtgaaggtgggtcatcttaacacaaagtggtatacattatattattctatacacgtgagtgtgattgtgagtgaagtgggtggaggtctcaaggggcaggaacaaagcgaagtgaactcataaactggcgcttggatccaaacgaggctatcctagagaactatggttctcaatgtcctggcgcgcaaaatattctctggataaatacctataaagtggggtataaaggggcgaaactttctatgcgcgaacccaatatgaactatgcgaatattacacatcagataacctctttaacacaagaggctaacaaagtcgtacttttaccccccgcgaaaaaagcacaacgagaagaacggacactatcgaactacagtgttaccatcacaacacgtgggagatcactgatccagtgcacaacacaaggcactactgtgtagggatacaatactcaaacatccaacgcaatcattagacgaagcaaacattttataaccttcttggggggatacgcgtaaatactgcacgaatcattaatgggaagttagggtccatcacagggtattactggcaaatctgacatgggttaccagggtacgatgggcccgaacatctcagacctcagaagcaggtctagggtaacccactcctagggaagcactgggcaacatccagccccggggacaatccggaagtcgataacaagagcctgaaggaactagaacgcaccggaaaagccgcagaagaagcactacggcgaccacacaaacacagcaactaccaggcaaacagcgaacacacacccagataa

SEQ ID NO: 543420 - DNA, 200 bp, Homo sapiens
gcgcgagctgcgtgggtgcctgtagtcccagctactcgggaggctgaggcaggagaatggcgtgaacccgggaggcagagcttgcagtgagccgagatcacgccactgcactctaacctgggcgacaaagtgagactctgtctcaaaaaaaaaaagagcttcggcttcacctgaagtcaccagcagctcgcccctgagtt

SEQ ID NO: 543421 - DNA, 156 bp, Homo sapiens
gtggggtctcccctcccagtttggtcttcagctcattgtgtgtcagatatgttcaaagccactttcgtagtctcattttgtgtcacctggagttttttacaccctcaggtgagttttagctttattggggagggggtgatctagcggtgagggcgt

SEQ ID NO: 543422 - DNA, 406 bp, Homo sapiens
tggccccgggatatgagaaatatgccctggggattccgggaccggcctcaaccaactttttccgggggatttggggtggatttgggcaagaaaccctaatctccctccaaaaacggtgggctctttaaaaaatttcctggcttttaatacccttggtgtcaagaaaatgggggtcccagcccaggtgaatggccccaagctttggtaaccgggttttacagggggggggccccccccccaggtttttttgggttgggtttcccctccccccccccccccttaaaggcaaaccattcacccccgccaaagggggttgccctaaacagggacccatgccctcccctgttcccttgctagcggcaaaataaacttgttgttgccctggggggctcccggtggtttccca

SEQ ID NO: 543423 - DNA, 150 bp, Homo sapiens
gaaagttacaatagcacattgctgcctggggctacatctgggactgaatagcagcaatatggccctaggggactgtggataatgccactcatgctctatactctagatctcttccagagatcgagtatagcaagatcactatctataata

SEQ ID NO: 543424 - DNA, 434 bp, Homo sapiens
ccaccccctccaccctcccaggttttttttgcaccaaggacggcctccaggttcagcacgggccccctcagcaaccccgcagacgcaaggcaacccttgatggacgccatccgctccggcacaggggctgcgagactgaaaaaggtgcccttgcttgtgtgaatgaacagaggccagagaattgcagaaacccccctgtaatatgcccccaggggtccctcaaggaggtttgcaaagccaggaacatcaagttttggggttacttttttgtttacaggccaaaatgggcccagttgattttcggtgtgttcctgtataacggcttgaaaggaaaggagaaaatgctgggtcgctgcgcagctcgtgtgccaaggaaatgtgttttgcctttgaaaattttaagttgctaataaacgatttttgttggcgggtta

SEQ ID NO: 543425 - DNA, 422 bp, Homo sapiens
acttagaggaccctttctggtatcccacccctgcaagctttcatgtttttctatacttcaaggaatacatctttggcactgaactttctttatagtagaaaaggaagataatgggtaagtgtccttgttcattgctttggatcctcagacatgggtttcgcaactcaccagagttggcaaacaaaaatgtgagggcctggttgactctaacatactcctaacaattatcttacggtggagaggactaaatcctcacccagagcaaaaaacaaaaaacagcccaacagtaacacatggcaaacacaactggtaggatgttcccgtttgagaagggataccacggattcacctcacagattcctcctgtcctctactggcgtgtccgctacccagggcgggcaccgagcctcgaaacatcgtaa

SEQ ID NO: 543426 - DNA, 277 bp, Homo sapiens
  misc_feature (255)..(255): n is a, c, g, or t
cctgtatgctgggattatcgaaaggactacacgaggcagacaagtggcacccactcacagaatcagtgtgtgttattcacgatgtagccagcagttgagcctaaggaccttctacctacctggtattggcatttgaggtcggaaaccctctactggcccataagccaggaccagtgaatagagaacacagttccttgaagaactggcagcaaggcttgaggccttatgtatgtagctgagtcagtcaggtacatnatgctgtctgctatcaacagga

SEQ ID NO: 543427 - DNA, 901 bp, Homo sapiens
gcgcgctgtctctcatgagtaatgccatgtaattatggaaggtccacgtgggcggatcatcctgatcgtcggcatgatgtagcaggaccttggttacacagggtgcaatgccctgttcacttacctaaatagtagcagaaatacttaggcatgatgctggtgagcgagttgcatgggaaatcttacagacgtgacatatggagacggctcgagtacaagcgtcgaaatctgcgttgtaactcgccagggaagggtgagagaggttgcagtgaggcccacgaatccgcggaccatttgcctgtccgaacctcgtggctaaacgtacagctgatatgctgtcgtccaaaaagaaaaccccgaacagaagcaatcttccgagaaacagaggacatagcaaagtatatcagtgccgggtgatatcaccgtgcagcacgtttcccaatgatccaggtcttatgtcgtgtaacatctagtgccttcatcctaattgctgtttcctcattagcgctcagaagtccgtctaagacgaagacgacagtctcaatctttggaacacgtacataagtatgggatgaggcgccttggatgcttaatcaagattatcatatttcccgatgggtgaaaagaaaaatagaggtgaaaatcaaaaggagatatttcaggtcaccctcagtcaggtctaaatactttgttatgctgtaggtgtgtaccgttgtccaatccactgggggaagtatattctaccaatacctcactttaagatcagggaccaactcatgctatgtaacggaacccatttactttccatggggtctaaccctggtttttgggagcagactgtcagaaagttcccgcggtctagttgtaggacaaagacagttcccgtagagcttaaagagcc

SEQ ID NO: 543428 - DNA, 170 bp, Homo sapiens
cgaatactttgtctgtggctacaagaacgttatgggggccgccgcactatctggagggtcctcagtcgcattgagcagaagacatctgccgtacgggaatgagaagaagattgagatggtccgtgcgtaccgggagaagatagagcatgagttggacgctgtgtgccacg

SEQ ID NO: 543429 - DNA, 139 bp, Homo sapiens
cagacacacacacatacacacacacacacctacgctctgcacataatttgtgtgaagtcatatgacagattctataggaattgataagcatttgcttgtgacaaatagtactggtttgactgaatctgcctgtcgacgc

SEQ ID NO: 543430 - DNA, 135 bp, Homo sapiens
cccgactacccgacagcatgagggagatggggtaggtggagttgagggagatggggtagtgtggagttgagggaactgggcagtgacacagtcacattctgtctgggctagtctgggggggtacctgagctcgaa

SEQ ID NO: 543431 - DNA, 137 bp, Homo sapiens
  misc_feature (38)..(38): n is a, c, g, or t
ctcccaacgaatgaggaattgagggctgcaattgcaanatgcttaggagaaaaatggtctcaccctccatcatgcataaaaacagattgtctcagtttaccttagctttgaaaatgccatacccatgggagcaattt

SEQ ID NO: 543432 - DNA, 318 bp, Homo sapiens
  misc_feature (86)..(86): n is a, c, g, or t
  misc_feature (151)..(151): n is a, c, g, or t
  misc_feature (293)..(293): n is a, c, g, or t
  misc_feature (317)..(317): n is a, c, g, or t
gttctatcaagttacttgccttgatatcatcacatgctttgctgtctgcttaaaatatgagttcatccccctcatacttatttgtnttagggacccaattggaccagtgctggcacatgcccttcaaggtacaatttctgaaaagagactncgctgccaaacttatgtgtgcctttacctcagtccccccagtataaggggtgacttaatcttgataaatgagtgactgagcaccatgctagttaaatattgagaattaaaagcctgaacccaatggctctattttttttttnccaccttctgacaagcaaaaattnt

SEQ ID NO: 543433 - DNA, 337 bp, Homo sapiens
ctttctaactagttctgtgacgttgaatttattgtaccagttgtgcattttccgaggcaagaagtagtcagggtcaattaatcctggctttttctgcacaaaatacaaccagccttgttgttagaggtaacctaacaagtggtaatagctttaatcttgtttacacgaggtttctctgtagtattggtgatagcggaattagttgaagaggctgggtattttgttatcaacttcgattagaagggatccctgcatcacatatttaaagtgtgtcctcccaccacaaagggatccgtgcacgttaacgattactaggactatgcagaaacctcgtgta

SEQ ID NO: 543434 - DNA, 377 bp, Homo sapiens
tatttttatcctcagggaagggtagggaaaaggagaggctgataaggagggaagtgctggaacttgattttctccctccctagcaagatacacggattccatttagagataggctggcctcaatttgtcaagcttcagcgcctcagcacaaaatcttacacccttcatcctgccggaggaggctgagaagaggaagaggggaggaaaagtgctccatcagagaaggcttttaagccacaaaagtcagcaaaaatacttctgttgggacagccactgctaccagggttctgccaggaagggctggaggctcaaaacatgttgtgtgaacaggaatctcaattcagatgggaagcatttttttaaaggatggcatattc

SEQ ID NO: 543435 - DNA, 459 bp, Homo sapiens
  misc_feature (130)..(130): n is a, c, g, or t
  misc_feature (132)..(133): n is a, c, g, or t
  misc_feature (137)..(137): n is a, c, g, or t
  misc_feature (145)..(145): n is a, c, g, or t
  misc_feature (148)..(148): n is a, c, g, or t
  misc_feature (153)..(153): n is a, c, g, or t
  misc_feature (170)..(170): n is a, c, g, or t
  misc_feature (194)..(194): n is a, c, g, or t
tggacgaggatgtctgaagagcagatgcccttggagctctctatgagctctgtctcgtaggggctgccacgtgacacaaaaatgccccggctcatcttggcagggtcaagggcccagttggagatgcccncnnagcngacctttnttntgggnggcgggatcgtcttcantgcatccgtcttccagcagcgggngcagagtcttcaggggcattttgggtgagtcttccgccagccccacctcatctaacaccaccacagagacgtactgctgcaggtccttcccctgctgaaagcgggcgcactgccggaaggtgctgatgatgccctgtggggtggagtgcgggctgcactggaaggacaccaggtggacctgcttcaggctgcggaagagatctgagtaggcagccgggccctgcatggcgtctgccacgatggtcttgacggtgcgttggcccaa

SEQ ID NO: 543436 - DNA, 326 bp, Homo sapiens
  misc_feature (253)..(253): n is a, c, g, or t
ctagagatcccgggagccttatcctggagatagatccctgtcgagggcgtgattctacaagtcatcactcgtgccgctttgaggaatgtgtcagactcttctgagacctggagcggtgagaaagcctgcggatgcaagctggaaaggccagattcatgattcgtcctggggggagggtccactcgcatacccaaagtgcagaagttgcttgcaggacttcttcaacgggaaggagctgaacaagaggatcaancctgattgaggctgtggcctatgggtctgctgtgcacgcgggccgtgttgatgggggacaaactgtgagaaag

SEQ ID NO: 543437 - DNA, 669 bp, Homo sapiens
  misc_feature (494)..(494): n is a, c, g, or t
tcccggcctcaggttaattggtacaaatagcaaaggaggaccccagccccatgcagatggtagcccaggggcggggtgtgggggttcggcaccagtccttcgtggtcctcatggtggcgcagagatatctactctggaaggcctttggtagggcgcctggggtactgttgggggaagcctcgacgtctgggaacctggcaagcggggggctgcagcctggggcctgggttgagatccctgggcctgggccctggggccttggcgccttttggcgccggtgaaaacaaacgcctttagagcgccccccctttggggggacaaatataatcggggggcgcacccgaaaaagaccacccgggccttctcaccacaaaaagcttattgggagggggtgtgggccgccaatctgggttagcgcgacaagttatcaagatctccagacgcttgggcgtggtatagaacaccctgtgtggggaaactcctggggcgcttanacccctcctgtgggggcgcttacacagagggggccctttgaaataggcctttcggcacggtgacacatcatgggcctgggccattggtgcggcctgcaactcttctataagggcccctttatgggatggggcattcgtgggccaaaggcgcatgtgtccttcagggaacctgggg

SEQ ID NO: 543438 - DNA, 284 bp, Homo sapiens
  misc_feature (18)..(18): n is a, c, g, or t
  misc_feature (50)..(50): n is a, c, g, or t
  misc_feature (65)..(65): n is a, c, g, or t
  misc_feature (168)..(168): n is a, c, g, or t
  misc_feature (172)..(172): n is a, c, g, or t
  misc_feature (283)..(283): n is a, c, g, or t
ttcttttttgtgacggantcactctttcaccaggctggagtgcagtggcnaatctcagctcactncaatctccacctccccagttcaagtgattctcctgcctcagcctcctgagtagctgggactgcaagtatgaaccaccatgactggctaatggtggttttgttnaggnagcctgtttgtttgtttttttttttttttggcagcaggtcggtgggtgggcaagtgtttgtagagacagggtctcacattgtgcccaaggctagtctcaaactcctgatgng

SEQ ID NO: 543439 - DNA, 244 bp, Homo sapiens
  misc_feature (27)..(27): n is a, c, g, or t
ccccccttttttttttggggggaaaantttttttttttagggggggccccccccccccccgggggggggcccccccccctggggggattttcccccgggggggttttttttttttttttttttacccccccccccccccaaggggggggggttttttccccggggggggttttttttggggggcccggggtttttttcccccccccctcccccttttttggggaaaaacccttttttttcccca

SEQ ID NO: 543440 - DNA, 1426 bp, Homo sapiens
  misc_feature (128)..(128): n is a, c, g, or t
  misc_feature (155)..(155): n is a, c, g, or t
  misc_feature (160)..(160): n is a, c, g, or t
  misc_feature (257)..(257): n is a, c, g, or t
  misc_feature (263)..(263): n is a, c, g, or t
  misc_feature (269)..(269): n is a, c, g, or t
  misc_feature (306)..(306): n is a, c, g, or t
  misc_feature (433)..(433): n is a, c, g, or t
  misc_feature (950)..(950): n is a, c, g, or t
  misc_feature (956)..(957): n is a, c, g, or t
  misc_feature (974)..(974): n is a, c, g, or t
  misc_feature (978)..(978): n is a, c, g, or t
  misc_feature (992)..(993): n is a, c, g, or t
ggcttgagtctatggaggaaaaactccgcggggtcctgcgattcccatggccgcagccgcctgcggcaccaaggccatggccctcttcaagcgcaccttggtgctgagtcccgccgcggcgcccatgngcccgggcgcaggcaccgccccgcggngctgntgcttgcctcctgccgcctggccctgcaaggactggcctcgtgggagagggcggcaggctgtggagccgcctgccccagtcccactcccactcccantcccantcccanctcctgctcctcgacgtctcccaccgccgtgtgtgtngtctgcccgcaggactcgctcagcagcagcctgaaaacttgctacaagtatctcaatcagaccagtcgcagtttcgcagctgttatccaggcgctggatggggaaatgcgcaatgcagtgtgcatanttaatctggttctccgagactctggacacactggaagatgacatgaccatcagtgtggaaaagaaggtcccgctgttacacaactttcactctttcctttaccaaccagactggcggttcatggagagcaaggagaaggatcgccaggtgctggaggacttcccaacgatctcccttgagtttagaaatctggctgagaaataccaaacagtgattgccgacatttgccggagaatgggcattgggatggcagagtttcggataagcatgtgacctctgaacaggagtgggacaagtactgccactatgttgctgggctggtcggaattggcctttcccgtcttttctcagcctcagagttgtgaagaccccttagtagggtgaagatacagaacgtgccaactctatgggcctgtttctgcagaaaacaaacatcatccgtgactatctggaagaccagcaaggaggacagagagttctggcctcaagaggttggagcaggtatgttaagacagtnaggggnntttgctaagccggagantatngacttggcgtgcanngcctgaatgaacttataaccaatgcatgaccaatccagatgtcatcactacctttcgagactcagaaaccagagtgtgtttaacttctgtgctattccacaggtgatggccattgcacttggtcggctgttaataataaccagcaggtggttcaaggggcccgtggaagatccgggagggcaggcagtgaccctggtgatgattgcaccaatatgcagtggcaagcatcaatatacgatttggagggaattacatagatccgatcggcctctttgcaaacaggatttcccatcgagagaattccaaggagggtccaaaccaaccatacggtcgcgtggggcggggacgcacctccgacaatgtagacagacttggggcacaggtttacaaacacaaaaatcgcgtcggcgcggtaccttcgtcgcatgtgaag

SEQ ID NO: 543441 - DNA, 640 bp, Homo sapiens
ccccaccccccagagggctttttgatttttcgacttgtctttaagggccagtttggtggggcaccagaagtcacccagcccccttatttccagggtttttgggatcaagttgcccaaatgtataaagggttccaagctttaagggatgccgcttcattcgggtttttgtaccccccccccatggagagtggtttgggatattctcccaggtcccccaaccccaaggaggagttttttattggtggaaaaatgcaggatgggtttttgcccatccccacccgcagttttgtgggtccctggaacagccttagtttagttcagggccgggggtttcccaaaacctaccctgttgggtgtgaggaaagcccagggttttcctgtttttccctcccccgcaaaatgcaaagggggcctcattgtttgtgggggggccagctcctccaagggttttaaaaggggtttcagttccgtccccttgcctgccttccttgggagccaggggtgggcccctggcagtcccttgggttccaaaaagccttaattctgcccggggggggaggttaagcctggccaggggcccccctgtttcccctcccttttttttttcgggcaatgaaataaaaggtttcccccccgccga

SEQ ID NO: 543442 - DNA, 1263 bp, Homo sapiens
  misc_feature (72)..(72): n is a, c, g, or t
  misc_feature (136)..(136): n is a, c, g, or t
  misc_feature (270)..(270): n is a, c, g, or t
  misc_feature (787)..(787): n is a, c, g, or t
  misc_feature (793)..(794): n is a, c, g, or t
  misc_feature (811)..(811): n is a, c, g, or t
  misc_feature (815)..(815): n is a, c, g, or t
  misc_feature (829)..(830): n is a, c, g, or t
cgcctggggaccgcagaggggagagtcgcgcccgggagtccgccgccggcgccaggatggagtgcgtgaaangccttggccaccccgaagagttctacaacctggtgcgcttccggatcgggggcaagcggaaggngatgcccaagatggaccaggactcgctcagcagcagcctgaaaacttgctacaagtatctcaatcagaccagtcgcagtttcgcagctgttatccaggcgctggatggggaaatgcgcaatgcagtgtgcatanttaatctggttctccgagactctggacacactggaagatgacatgaccatcagtgtggaaaagaaggtcccgctgttacacaactttcactctttcctttaccaaccagactggcggttcatggagagcaaggagaaggatcgccaggtgctggaggacttcccaacgatctcccttgagtttagaaatctggctgagaaataccaaacagtgattgccgacatttgccggagaatgggcattgggatggcagagtttcggataagcatgtgacctctgaacaggagtgggacaagtactgccactatgttgctgggctggtcggaattggcctttcccgtcttttctcagcctcagagttgtgaagaccccttagtagggtgaagatacagaacgtgccaactctatgggcctgtttctgcagaaaacaaacatcatccgtgactatctggaagaccagcaaggaggacagagagttctggcctcaagaggttggagcaggtatgttaagacagtnaggggnntttgctaagccggagantatngacttggcgtgcanngcctgaatgaacttataaccaatgcatgaccaatccagatgtcatcactacctttcgagactcagaaaccagagtgtgtttaacttctgtgctattccacaggtgatggccattgcacttggtcggctgttaataataaccagcaggtggttcaaggggcccgtggaagatccgggagggcaggcagtgaccctggtgatgattgcaccaatatgcagtggcaagcatcaatatacgatttggagggaattacatagatccgatcggcctctttgcaaacaggatttcccatcgagagaattccaaggagggtccaaaccaaccatacggtcgcgtggggcggggacgcacctccgacaatgtagacagacttggggcacaggtttacaaacacaaaaatcgcgtcggcgcggtaccttcgtcgcatgtgaag

SEQ ID NO: 543443 - DNA, 116 bp, Homo sapiens
ttactcaatttccttccataaaatatttttctacctctatataacttctttttttatttttttgagatggagccttgctctgtggcccaggttggagtgcagtggcgcgatctcag

SEQ ID NO: 543444 - DNA, 1828 bp, Homo sapiens
  misc_feature (144)..(144): n is a, c, g, or t
aactatggtggttagtcatgcttctcgttcacgatggttatgatacgggctctcttgttttgttataatcaatctaatggttgtttggctgttgcgctcgtcctctctcgtccttcgttgaggtcatcattgtttttccgcccngaccacacaatgggtgttctcgtctcccttttgtatagggaggatgtggttgggtggtgacattatcttcttgcgctgcgcgtctctccttgaagtaagtaatgtgtcggtgggtcctatccacttcgtcctgtggctctcgcctaaatcggttcctccaagacgacacgcgtgcttctgttgggtggggggcccaaccacagggtggcactacaatcattctggggggtgttaaccacacaattatttggacctcgacgaattgtttctctgccccccccacggccgttcgtggttgggagaataattaatagtggggtttttttggcgaacccttctttcttccccccagcgtggtaaattttcccagttgtgtttccccgaggaggccgaacaattggtgctcacagcggtctccttttctatgatagcccccctatatttctgcccgtgttatgtgtgtcgccacaggttccaaatttggggagagcgccaaaattgtggggggtccacatgatgcgcgtggtctccccctacggtgctccaccatggtcacccccttctgcggtgttgaagtagtccacaagggttgtctgtggagtctccccccttcctgggggggtttgtgggccacaatattgggaaaatagttggcgcgtccccacatatactgtcgccaaatctaatcctctcacatgggatatatttggtcgttggggccccctttgttggggggcacggggccctcccccacaagtgccgcgtaaactaccgccacaggtgggttgacacaaacagggtgttttcaccagaagagtttaaaattgccacccgggcgcgtctttttttggtgtgtgattttcaccgcggttatcatatcttgccttcgaaatttgggagagggagaaattcccccacaacaaattggtgggggtatacacattataattgtggctgtgaataaagccccctcttgtggaccccctcttgggggggctgctccccaacacacagcttcactagtatattggggtctctctctctctcactcgggatctcgccccacaccacactttttgagaggccccccccctgtggtgaaataacactttctgtattttctcacgatttggggagatctccgcgcgtataaaggagaaatattgtctcgcccgcgatatatgggggttctctctctctcagagatgtccccaaattggagcccaaaagcccactcgtctctcacggcgcacgctcccatcgagacacagaatatatttctacagtgagaagctgtacccacaaagtcacacaaggtggccacacagggagagtttcctggtgtctgttgtcacaggacacacaaagggtgcacaatccaccacaaatgttgtctccctgtaaccctgagatgtgcttggcacatccacaacacactcaatgtccacaggaacacattggtgccacaagagagcttgagaccccaagtctcgagagccactgaatgtaacttctggggagagcttataagtttgaagaaagagagaaacgtcctcacagcccacaggtggaaaggtggccgtccacatatagacctccctatcgtattgagacacccgcttttttgaaaaggggtcccagccacccctcctcggtttttttttccaataaaagtttagaaaga

SEQ ID NO: 543445 - DNA, 741 bp, Homo sapiens
aacatggggattacaggtccctctctcaacacttgagggttacaatttgagatgagatttgggtggtgacacagagccaaaccatatcaccctctgtcacctctcctattcaacacagtactggaagtcccagccagagcaatcacgcaagagaaagaaataaaaggcatctaaataagaagagaggaagtcaaattttctttgtttgcagattacatgcttgattctgtatccagaaaaacccatagtctctgtccaaaggctccttgatctgataaacaacttcaggaaaaccccaggatacaaaatcaagatacaaaaatcactagtagttctatacaccaacaacagtcaagccaatagccaaatcaggaacacaatctcatttacaattgccacaaaaagaataaaatatccaggaatacggctaaccaaggtgaaagatctctaccaagagaactacaaaaccctgctcaaagaaatcagagatgacaccacaaactgaaaagcatgctcatggataagagcatggataacgaatcagtatcatcaaaatggccatattgcccaaaggaattctataggttcaactgctattcctatcagactgccaatgaccatccttcaccagacactagagaaactattttaacatttatattggcccaaaagagctcaattaaattcaaggcatctaaggcacaagaacaaagctgggactttgttactgacttcaactga

SEQ ID NO: 543446 - DNA, 1426 bp, Homo sapiens
taccagggggaaaataactttaattggaaaccccaccaagctgcaaaatctgtccctggctataaagcctcctttcttctcctttgtgcaacttcggctctttctttcaggtggccccattaaatgtgcttttctttctctcctctccagtggctctgagaagcgggccatgtggccaacacttgtggagggtgggtgctcaagtagaactataagggcatcacatctctatctctctcacaagaggcccccgcccgccttctcggctctgtgcaccaccacgcacaagagagacttgtggcgagagggtgtgtgacgcaccccgcgactctctcgtgtgagtctctcccacaacacaacacacacggctctattctcacgcacatgtagcacccaaaaagcctacaatgtgagggtctcgaccttctcctcacgcaccatatacgagtgacgaacccacaccacggccgccaacccacacgaaacgggaggtgtgagaacgtcgccctcctgttgctgtagcaccacgacaatatagggagacatacaatcatacagacatcagacgagtgacgcagagagaccaatattgagcctcctccagtagtagaaatctccacagcgctctcgttcgccgcagcggctcacctcttagtagcaccatcaaagacgacgaatagccgcacccctaagtgacgcacaaacactctctcatcatatcataacaaattctctactctacgccatagtagagtagaagaacactcttcctcgaacggccgtacgcgcagcgacgaacacacatagagaaaaccgcccccctattacatcatactaggtaggaacgcctgaccgaaggagccgcggcagtagatgacacaccacacccagatgaccacgaactaagacggcggcacatacataccacggccggacgacgacaacgcaccggcgggcaatgatcgaaccccaaatgtaggaccccccaccgaacgcaagaaacattcatagcgatggagcggccacacaagcccatatttgtgtcacagacccacgagaacggaggctccaaccatctatccgccgcagctggacggcacgatccatccatagatgagagacggagggtggacgtaccaaacgaccgctattcactccccttgctagacgccagcaggctgcacggcgaccaagacgagcggaacaccgccgttggtcgtgagtcgaacacccccccccccctactgtcgatagcagaaacaagcgtcgccattcatgactgcgcccccaactacaataatgaagaaccaacacaaacaccccccgccagcacgaagatgacacaacacgcactcccacgaaaaccaccacagttacgccaatcaacaacatccgcgcgatgcagcacagccacacaaaccaacac

SEQ ID NO: 543447 - DNA, 530 bp, Homo sapiens
gtggtggcactgattgatgattgtggcagacatcatcttcatagagttttcatgagtttaaatgggatcacatatgaaaatgcttaacatagaacatggtacattgtaagtgcttgataaatgcaaaccactgtagctgttacctgctgtatctacctcaccgggcagtcgtgaggatgaaagggaggctgtgttggggaagtgctttctaaactgtgaaatggtagccacacacttctcttgccttcagagatgggatggttggaagctatgggcagacgttaatggtatccccaaataaggggcctgagaatacttacctatgtccacagaaggtagctgtgttgaggcgagtgtcaccatgggtagctggaaaacagtgcaaaatgctctcagctaagggttaattgtagtcatgagggcaaactctggcatggtatgacttggggcacccttggggacagggagaaaactgatttttcagaaagaggctttagaggaaggatcatgttaaatggaacctgcccact

SEQ ID NO: 543448 - DNA, 234 bp, Homo sapiens
gtctcctatgtctctacaaaaaaaaaatagccaggggtgggttcgggcgtgcttggcactccagccggggcgacagagctgggagttttctttttttggagctcggtctctggtctttttttttaaggccaggcaggggggctcaggccggtaatcctagcacttgggaaggctggggggggaagggtcgctggaacccgggagttggagaccagccggggcaacatagtgaga

SEQ ID NO: 543449 - DNA, 232 bp, Homo sapiens
atattttagatctctctcagacgctcagcgagcttgaaacgtgtgactgatccgtgcgctgctatcatccgagacctgcgatcgctctctgctcgccctacgcatccgttacataacagacgacgatcaccgagtctccgtcccttatcatcaattctcttgagcaccaatggtagtgtacctacgagtacaccgactacggcggactaatcttcaactcatgtcatccatt

SEQ ID NO: 543450 - DNA, 372 bp, Homo sapiens
gccaggtgactgtttttgaagtgtgattttttcattataaaaactcatgcagaattcacacatacacaagtagagagaataatataataaacataaagagcctccatatagtcatcattgatttggtgatttaaaaaggagtaggctgggcacagcggctcatgcctgtcctcccagcactttgggaggctgagttaggaggttcgtttcagccggagagttcgagaccagtctgggcaacatagtgagaactcgtctctactaaaaataaaaaattagctgggggtggtggtgtgcatctgtagtcccagttactccggaggctgaggcgggaggatcgcttgagcttgggaggctggggctgcagtgagc

SEQ ID NO: 543451 - DNA, 237 bp, Homo sapiens
  misc_feature (124)..(124): n is a, c, g, or t
ggaggtagagtagaagttatgtgtttatgcggggaaatgcatatcgggggcacgattatgggggaatagtcagtgccaaagcctccgattatgatgggtattactatgaagaagattattacanatgcatgggctgtgacgataacgttgtagatgtggtcgttacctagaagttgcctgctgcccagctcgctcgtataaggaggcttagactgtgctagactccaactcagatca

SEQ ID NO: 543452 - DNA, 309 bp, Homo sapiens
aagatcacgccactgcgctccagcctgggcaacagcgcaagactcagtctcaaagaaacaaaaaacaaaacaaaaaaacaactcttgaacactgcaattgtttcccctgcaagggatgggctgatttccttatattcttccttttaaccagctattcgtataatattacctagaaagcttgacagggtgtaatcatagcctttgtcccgggaacttggagtcccctgtgatttattagttgtaacagctattatcaacaccctttcttttaaacttacctgttgtctgcgatggcaataggagattttg

SEQ ID NO: 543453 - DNA, 132 bp, Homo sapiens
tgtcttttagtagaggacagcttgtggaggccgtggtctcctgcagcagctgtcttgtgcaccgtctgcatctcctcagacttgagctgcagcagttgggcctccggtgggagcgttctccttctcacgctc

SEQ ID NO: 543454 - DNA, 116 bp, Homo sapiens
  misc_feature (50)..(50): n is a, c, g, or t
cagatgatggggatcgatgagaccgtaaggtcctgcggactgtttatatnatctggtatgttttcaagagtcttagacacatgcgatatatatagctataatgtgcgggtctttat

SEQ ID NO: 543455 - DNA, 1271 bp, Homo sapiens
cttcaccaccaaactaaaatgttgcggagatctgatagtcctgaaaacaaatacagctgacagcacaggctcacagctaacggccaacaaactgctgcatacctcacagagcttagagagagggcactgggaccacgttactctccacaagaaaattcacaccaaccacagctgcctccttcactacgcttcacaacttcacatctctctctaactccacagcaactaaccccacagccaacacacctctcagcatgccacccctctacctgatccctgccacgactgcacctgcgcctcctgcacgccactaccttacgctcctcctccctgcgcgcacacacaacgctcactacctacccactcgctccgcacacccagcacacgcctcccacccaactgcgcccacacccacaccccaacccaccagcctgcgccctctgcaccccgcacgcacaccacgcacgccacccaccgcacacgcacacgcccaccccccaaccgcactcgcgccgccccccacccgagccctctccccccagcacacccactacgcgcgcattccaccccgcccccccacgcacgcgcccgcactggccaccacggccacacccacgcccccacgcctcacgcctgcgcccgctcaccgaccccaaggcctgccccaacccggcgccgccgcacccacacccccactctcccccaccgcctgccacccgcccccacaccccacgcccccccgcccctccgcccccaaccccacgtcacacctacctcccgacgggcgcctgcacacaccacccacacgcccacgcaacccaccccaagcctgcatcccaccgccaggcaacccgcgtaaccaccccaacccctggcacccacagagccagccaccagccgcggaaccctcccacgcacgcccgaacccgtccccctccaccccccccgcacgtcctcaccaacggccaaaacccccccccaacctgcccacgcaccccgcacccgcgcgagcccccacccacttgccccacaacacccctgtccgtcacccccccctcatgcacccccgcccctggcttcgcgccccttttgcttaagccttccgcacactctcctccacccgccccctccacacacggctctcctggcggcattcccaccctgaccatccctccccaccgaccgcgcagccctccccacgtccctcgcacttgccgccctacccctctcccgcgaccccacattccccccccccccctcccactccacaa

SEQ ID NO: 543456 - DNA, 116 bp, Homo sapiens
gaacggatttcagtggccacaagaatgaccacttatatgatatacagcattttctaaaataacaagaacaccaagaaaccccatttaattcttcttcttcttctttttatatgtaa

SEQ ID NO: 543457 - DNA, 231 bp, Homo sapiens
gggcgctctgaggatcccggcgctacggacgccacgcagagggtggacgtcagtaggtttgcagtgttgccttaacccaggttttgcccagcagggcgtggtagagctcactgtctcccaaaatccctaccaccctgttgtgtcatgcagcaccagcttgttgcctgtctggtagcgaatctgcaacgcatcgcgcatgccgatgttcgagtccaccagcgtccgtagcgg

SEQ ID NO: 543458 - DNA, 147 bp, Homo sapiens
tctgtgctgctctctgggaggctctcaatccccagcctcatccagagttgcagccgagtagggactcctcccctgtcctctacgaaggaaaagattgctatgtcgtactcacctccgaccgtactccgtggatctttatggtgagtt

SEQ ID NO: 543459 - DNA, 807 bp, Homo sapiens
atgaccccaatacgcaaaattaaccccctaataaaattaatttaaccgctcattcatcgacctccccatgccatccaacatctccggcatgatgaaacttcggctcactccttggcgccatgccggatgctccaaatcaccacaggactattcctagccatgcactagtcaccaggagccgcaagccgtcattgttcatcaatcgcccacatcactcgagacgtaaattatggctgaatcatccggtacctgtcacgccaatggcgcctcaatattcttgtatctgcctcttcctacacagtcgggcgaggcctatgattacggatcgatttcgctactcagaaacctgaaacatcggcattatcctcctgcttgcaactatagcaagagccttcataggctatgtcccgtcccgtgaggccaaatatcattctgaggggccacagtaattacaaactgtagtatccgacatcccatgacagtgggcagacctagtgcactgaatctgaggaggctactcagtagacagtgccaacctcagacgattctgtactgtcaattcatctggccttattatgcagcctagagaaagcaacgtctatttggcgaagagcggatcaaaaaccccttggattacgccatcggataatactcaccttgaaaagtagagccccgggtatttcctctaagaaacaattacggactgtggcaatttgcacctaaacccaacgatgttaacagtaaaagtggcacccttgacgctgaccttatactatcgggatcacgtacaacacaaaacccacaaag

SEQ ID NO: 543460 - DNA, 953 bp, Homo sapiens
ggtaatctcctggaaagctaccatgttcctgaattgattaaggatgctcacttgttggcttgagagtaagaactttacgactttcaacaaaactgtgcaacttacatcactctgaattggagtccacacttgaacacactaaaagctgaaaatcaacctataagagactgtcctaaatgcacctcagtattagtgctttgttcagaagagaatatgcaaaaagcccttgcaatcgaaacgcaaaatatgaactccgacatggttactggtggctatgcagctttcaactaacatttatagctgctcgacatgcataccagtcagaacgatgccttgcaccttgacacagaagaatttgaccgcttcacattcatcttgctgtcgctctgcaccctggccacgtcactcgtcccccttgctccgcatgtatttgcgccaccctgccctgcgcccggcctcccccgcactgctcctctcgcctgttctcgaccctgcacgcctgcacccgcccaccggactgtcgcctccctctccctctctatcatccacgcccctccactcccctttctacccctcctcttctctcaccacctccctccccacccctcttacagacccgcctcacaactacgactccaccccaccacccacttcgcactcaacccccaactcacacacccctctaacgcctctcccacacactctctctcacccaccctccttcggctactacccgccccttggcctcctcccgctcgctcccctcccctcgcgcaaccttcttgctcttctcttcttatttttctgttggtcctcttttttcgccgtctcgcgccgcgctcttgccccttgctcttcttgctcatcagccttttgccggctcccttcctctctcccgcactcttcaatggcgtgccccgctgtctctctcacactgtggctctccccctccg

SEQ ID NO: 543461 - DNA, 346 bp, Homo sapiens
gctcacggtcctgctgatatgtgacatcaccccggaggcccatgtaaattcctctcttgtactctctcttattccaacagcgccttaggaaatgactacgctgaaatttttggtgggcaggttctcttgctaggtttgaggttgggctgaagatattcctgaatgcaatcatcccaggtgccacactaagaaaatgatccagttgacagctacccctgtgagtgcacttgttgatgagccagtgcatatccaagctacaggcctgattccctttcagatggtgagttttcaggcatcactggaagatgaaaagcggagacagtgttttatgctcaagcccactata

SEQ ID NO: 543462 - DNA, 478 bp, Homo sapiens
tctagaggaccccgcacgaggggtgtccaggtgctgatgaaagagcttgacagcagctttgttctaaaggagcttaaagagaaagcagtggccgggcgcagtggctcacgcctgtaatcccggcactttgggaggccgaggcgggtggatcacgaggtcaggagatcgagactatcctggctaatgtggtgaaaccccgtctctactaaaaatacaaaaaaaaaaaaattagcggggggcgtgggggggggctggtagtcccagctactcgggaggctgaggcaggagattgtcgtgaaccggggaggcagagttggcagtgagcagagatcgcgcccttgcattcaagccagggggacagagcaagattcggtctccaaaaaaagagagcagtgaagaaggaagtagagccgcttggcctcccttttggtctcataggcttaaaggtctaaggatcagggcaccagacctaattggt

SEQ ID NO: 543463 - DNA, 225 bp, Homo sapiens
gcagaacacaggtgtcgtgaaagctaccactaaacgccaaaattgggaaaggaaaggactcatatcaacaattgtcgtcattggcacgtagattcgggcaggtcaacaactactggccatctgatctataaattcggtggcatcgccaaatgaccacctgaaatttagaggaggcttcttacatggggaagggctcctccaagtattcctggcctttgataaact

SEQ ID NO: 543464 - DNA, 238 bp, Homo sapiens
cacacctggctaattttttaaattttttttttataaagacagggttttaccatttgccccagctggtttcaaacccctgggctcaagcaagcctcctgccttggcctcccaaagtgctgggattacaggtgtgagcccccacacccggccttatttcctaacattttgatagcacaaaattttgaaaacccacttttgtgtacgttatgaagcataaaaaattaaacagtatgcccca

SEQ ID NO: 543465 - DNA, 833 bp, Homo sapiens
  misc_feature (27)..(27): n is a, c, g, or t
  misc_feature (92)..(92): n is a, c, g, or t
  misc_feature (124)..(124): n is a, c, g, or t
  misc_feature (129)..(129): n is a, c, g, or t
  misc_feature (136)..(136): n is a, c, g, or t
  misc_feature (169)..(169): n is a, c, g, or t
  misc_feature (207)..(207): n is a, c, g, or t
  misc_feature (237)..(237): n is a, c, g, or t
  misc_feature (242)..(243): n is a, c, g, or t
  misc_feature (249)..(249): n is a, c, g, or t
  misc_feature (252)..(252): n is a, c, g, or t
  misc_feature (273)..(273): n is a, c, g, or t
  misc_feature (278)..(278): n is a, c, g, or t
  misc_feature (290)..(290): n is a, c, g, or t
  misc_feature (308)..(308): n is a, c, g, or t
  misc_feature (323)..(323): n is a, c, g, or t
  misc_feature (329)..(329): n is a, c, g, or t
  misc_feature (333)..(333): n is a, c, g, or t
  misc_feature (364)..(364): n is a, c, g, or t
  misc_feature (378)..(378): n is a, c, g, or t
  misc_feature (393)..(393): n is a, c, g, or t
  misc_feature (397)..(397): n is a, c, g, or t
  misc_feature (399)..(399): n is a, c, g, or t
  misc_feature (418)..(418): n is a, c, g, or t
  misc_feature (429)..(429): n is a, c, g, or t
  misc_feature (447)..(447): n is a, c, g, or t
  misc_feature (453)..(454): n is a, c, g, or t
  misc_feature (472)..(472): n is a, c, g, or t
  misc_feature (476)..(476): n is a, c, g, or t
  misc_feature (483)..(484): n is a, c, g, or t
  misc_feature (514)..(514): n is a, c, g, or t
  misc_feature (629)..(629): n is a, c, g, or t
acagccaagtcagtagatgggcaagtntcacataaatacaagaatgtttatagaatgtttagcatatcatgttaatggacaatagttttccnttctctacagaagtatgaatgaaatgccaaanttgangtccctngtttttttcataaccagcttagtgaggatgttncccactgcctcacatctgttggtcagttgggttttttntgctgagcattcataatttgtgtttttttnatttnntgtttnttntgctggttctctctctgtganttttntgatgttctttncatgggctttttttattnttattgctgcaagtnttcttnagcnttcttgacaacaggtttttttaaattttttncgggttgtgctttnttttgttcatacttntgtnanttttttttgtccatttgtnattttattggntgtgtcctcatagatgtnattttnntgtttcattgctattatntgtnagatttnnaagagtgttagagcatgttcaatatttgcnttcgagtgcatgctacacagttggcttgcttccattagatctacggcagtcataaatgggtgcgatgctgttactcgatttaaagcaagcatcaatagcatgtgtaatgaccgcngttttttgctgatattgaaatgcttctgtagtacttcttgcacacttctatcttctgagagatactgaacattttcattccacttctcagcaaaaaccttgtctggaaactctgcaggtagagataactgttctttaaatattttaacatactgtggaaaaccaaatgaattcattaagtgtatctgccggtgagaaatcttga

SEQ ID NO: 543466 - DNA, 132 bp, Homo sapiens
aagtcccccctttgtctagtagaaccaccgtacataggaccgggatcttgcttagatcttgcacatcattttgggaagtggattctactagcaaggtgtgatctagtacctcatgctgtggcagaaacctga

SEQ ID NO: 543467 - DNA, 226 bp, Homo sapiens
tataagatatctaaagcattcttttacagctccgcggctgagtcatgtaagtgaacatggatcgctagtctggtgtccgtaggctattcctgttcgatgactagtagctggtatctctaccagtatagaaatgcccagagatttcacccgatacgtcatgaacaactccgcatgcatattctggagggttctgtcacatggtttcatactacatgtagtctgttct

SEQ ID NO: 543468 - DNA, 88 bp, Homo sapiens
aggggcagctagaggatgaggggggaggatatttagcactggggcctggagctttttccccacttctgtaccctatcacaccccatcc

SEQ ID NO: 543469 - DNA, 715 bp, Homo sapiens
  misc_feature (47)..(47): n is a, c, g, or t
  misc_feature (58)..(58): n is a, c, g, or t
  misc_feature (132)..(132): n is a, c, g, or t
  misc_feature (139)..(139): n is a, c, g, or t
  misc_feature (162)..(162): n is a, c, g, or t
  misc_feature (170)..(170): n is a, c, g, or t
  misc_feature (214)..(214): n is a, c, g, or t
  misc_feature (226)..(226): n is a, c, g, or t
  misc_feature (344)..(345): n is a, c, g, or t
  misc_feature (364)..(364): n is a, c, g, or t
  misc_feature (366)..(366): n is a, c, g, or t
  misc_feature (402)..(402): n is a, c, g, or t
  misc_feature (408)..(408): n is a, c, g, or t
  misc_feature (431)..(431): n is a, c, g, or t
  misc_feature (433)..(433): n is a, c, g, or t
  misc_feature (441)..(441): n is a, c, g, or t
  misc_feature (455)..(455): n is a, c, g, or t
  misc_feature (494)..(494): n is a, c, g, or t
  misc_feature (497)..(497): n is a, c, g, or t
  misc_feature (516)..(516): n is a, c, g, or t
  misc_feature (527)..(527): n is a, c, g, or t
  misc_feature (534)..(534): n is a, c, g, or t
  misc_feature (537)..(537): n is a, c, g, or t
  misc_feature (586)..(586): n is a, c, g, or t
  misc_feature (588)..(588): n is a, c, g, or t
  misc_feature (604)..(605): n is a, c, g, or t
  misc_feature (611)..(611): n is a, c, g, or t
  misc_feature (614)..(615): n is a, c, g, or t
  misc_feature (645)..(645): n is a, c, g, or t
  misc_feature (649)..(649): n is a, c, g, or t
  misc_feature (686)..(686): n is a, c, g, or t
tcccctttcttaaaagacaagctagtatactggaaaaagaaaaaaanaataataaaanaaaaaccaagacaactttagtaccctcaactttatttgggaaggggagggggaatcctgggtcgcccccccccnccctgcnccgcccggcggcgggcggaagcncggcgccncgcgcccccccctttgtgggcgcggggagaggaccaggggcggngggggggggtcnggaggggggggggggggggggtgggggggggggggggggggcgggcctggggcccggggtgcggggggggctcggggtgcccaggacgggaaaggggcagctagcattgcgtgcatgnngtaccagggtgagagggcngnggcccaggcagactgtcggttacacatgttcaaaangggggnagggccggggctgctgcgcttcncnaggtcttnctcccttgggaccnggtctcccatctgaccctccaggccttagcttgcctcanatntcagggcaggtatccaccnaaccaggctgnaggggangangagggaagccgggaatggggtaggaagaaagctagaggtggcctgcaancngggctggggcccccgnngggggncannataaatactatgggagtttagccaatcccnagcnccgctgtgtcttgtgctaaacattcctttctctccgngcctctgtctccctctgtccccctaccaa

SEQ ID NO: 543470 - DNA, 240 bp, Homo sapiens
tccctctcagctccaaagcaagatattcttagaaagatgaagcatccctgctgtgcacagtggctcacacctgaatcccagcacttcagaaggccgaggctggtagatcatctgaggtcaggagcttgagaccaatcctggccaacatatgtgaaatcctgtctctactataaatacaaaaaattagctgggcatggtggtgggtgcctgtaatcccagctacttgggaggctgaggagg

SEQ ID NO: 543471 - DNA, 105 bp, Homo sapiens
cccttactgttccctaaatcatatttatatatatgccacggactatctgaacacgttactgagagcctgtcccttcaccgtgtgaatcttggacgctcacacatg

SEQ ID NO: 543472 - DNA, 765 bp, Homo sapiens
ggaagaagtctctattgagacaattgaggctggcttcatgaccaaggacttggctgcttgcataaaggtttacccaatgtgcaacgttctgactacttgaatacacttctgacgttcatggcataaacttggacgaacacacttgaagatcaaactagctcaggccaaactttaagttcatacctgagctcaagaaggataatcgtcttttggtaacctaggtctacagggtttacattttctgtgttaccactcaaggatacaaggcacaacctcaatttggtaattggtttagaagccagagtttatcttttctataagtttacagccttttctatatatatacagttatgtgccaccttggtgaaacaatggccaagggacttttttacaacttgttatttattttctagtaccaggctaggaatacggttagtactcactggtattcacctgtcactttttctcatgtttctaatttataaatgacacaaatcaagattgctcaaaagggttaatgatagccacaagaattgttcccttagcatatgcatacagtagaaaattgacgtgactttccgctcctgtcatgacctggggacaaagggacagtctggggtctagattccgtttagggggggagagtggagattaactgtcattgactgacgacgtgcatggactcaaggtgagattgcagcttaggcagacttggatgttcatcagtaaacggtaggccgacggagtggaccgaaaacaacaagg

SEQ ID NO: 543473 - DNA, 987 bp, Homo sapiens
  misc_feature (261)..(261): n is a, c, g, or t
  misc_feature (294)..(294): n is a, c, g, or t
  misc_feature (370)..(370): n is a, c, g, or t
  misc_feature (372)..(372): n is a, c, g, or t
  misc_feature (386)..(386): n is a, c, g, or t
  misc_feature (389)..(389): n is a, c, g, or t
  misc_feature (393)..(393): n is a, c, g, or t
  misc_feature (412)..(413): n is a, c, g, or t
  misc_feature (427)..(428): n is a, c, g, or t
  misc_feature (444)..(444): n is a, c, g, or t
  misc_feature (456)..(456): n is a, c, g, or t
  misc_feature (468)..(468): n is a, c, g, or t
  misc_feature (471)..(473): n is a, c, g, or t
  misc_feature (475)..(475): n is a, c, g, or t
  misc_feature (477)..(478): n is a, c, g, or t
  misc_feature (488)..(488): n is a, c, g, or t
  misc_feature (492)..(493): n is a, c, g, or t
  misc_feature (498)..(498): n is a, c, g, or t
aaactcctactcctcatgtacccattctagtcgcaatggcaatttccgtaatgcttacgaacggaaaaattgtaggctatatacaactacgcaaaggacccaacgtgtaggcccctacgggctactacaagccttcgctgacgccatagaagtcttcactcaaagagcccctaaaacccgccatatctaccatcaccctctacatcaccgtcccgatcttagctctcaccatcgctcttctactatgaaccccactaccgnatacccaaccccctggtcaacctcaagctaggnctcctattaattctagccacctctagcgctagccgttatactcaatacctctgatcagggtgagatcaaaatcaanantagccctgatcggngcnctgngagcagaggcaaacaatcnncatatgaagtcacnnctagacatcatactantatcaacattantaataagtggantcnnntnanncctctccacncttnntcacnacacaagaaccaccgtctgatatactacctgtccatcactgaccgctctggccaataatatgagtaatatcgtccagacatagcagacagacacaaaacgcaaccccgctttcgcaacttgccgaacgagggatgtccgacactagtgtcatggacttacaacaatcgaatacgccgtaggaccacttcgaccgtatatcttcatcgactcgaactacacacaacataatcactacatacaaccaccctcaaacacctacaactcttcctaagaaaccccaaatgacagcactcatcctccttacctctacactacatctttatgtacacccctataaaccgtaaactattttagaccaacactggcccattcttgccattcgaacaagaatatccccagaatacagactatgacccaacattcattcccccatcctatgcaaaccacactacttataaatcaccatacgaattaacacaatcatttgt

SEQ ID NO: 543474 - DNA, 339 bp, Homo sapiens
  misc_feature (110)..(110): n is a, c, g, or t
  misc_feature (195)..(195): n is a, c, g, or t
tctaggatcaattcctcgtatagatgatgcactctagtgtccccctggaggaagctgggagatgggaaggggtctggaccaatttccccgtttgatgatgcactctattncccctggaggaagctgggagatgggaaggggtctggatcaatttcctcgtttgatgatgcactctagtgccccgccctggaggangctgggagatgggaaggggtctggatcaatttcctgatttgatgatgcactctagtgtccccctggaggaagctgggagatgggaaggggtctggatcaatttcctggtttgatgatgcactctagtgtcccctccttgtccag

SEQ ID NO: 543475 - DNA, 148 bp, Homo sapiens
ggatcctttcgacgggtcttactatattgcccaggcttatcttgaacgctcaagtgatcctcctgcctcagcttcccaaagtgctgggattacaggtaatcccagtgctcagccccaatgtttaaaagaggactggccacttgttggc

SEQ ID NO: 543476 - DNA, 357 bp, Homo sapiens
  misc_feature (48)..(48): n is a, c, g, or t
ggtcctgcaagcgtgtacccaaagacacttatgatcaaatattctcgnaagtcaatcgtataattcacaagactgattactttaacttgaaattatagcttaagttaaaatataccgtgagcagtaagaatctccacaggatgccgtgcctcatagatctgtcctggtacttgtcattcccgatcaggagaagctcaatggacactgactcgacccattatgactctcaagcgtagggtcccattgctttgcttccgatatccaaggggaacaagaactacccatctcttacaaaaataagcatgtcaacattgttcagtacatttttctacacatattgggtactacgctttggca

SEQ ID NO: 543477 - DNA, 864 bp, Homo sapiens
ctcagtagcggaggctgtacaggcttgcatagtgcttgagatattccatcgtgcctggctcacataaggcgcttcctggaattcaagtcgtgctgtcctgaacgcgggccaggcagcttgcggcctgagggcgtttatggagtgatcacgaactgaggcaaagtcgtttgggcatcctgcaggcaacatctgtcagtccatcctggctgagtcctcggcatggtccccgcggcaagcatcattgcaattgaaaagtacggaaggtaagtactagcaatcgaatgcacacgagatgagcagcccagaaagcgtcccgatcggcctctgggatcgtaccctcgatgtgacctggttgggttgtacacgacaccgattgcgacaggacctggctgtccttatacgtccttggattcagcgtgttcgtatatgacaatgctagggcactttcagccagagcattattcgcaatgagtgactcactgatggcccagggtgcagtctgcatctgatgccagaggcgaggcaacacgctgtcccgttctccgagagtgctatcttgcttgcttgggacgacagattgccatcgaacagaccgggcaggaaaagccagtgcggcgcccatttggagcttggcccttacttgcccgtagcacgcaatctgccaactggtggccacgtgtggtctcgggtcgccaacgattgactcgccctggaccctaaacattgttacccatcacaatctccttggtaggccttgaattcaaggggaacccaagagtccacatgatggtgcaccgttggggagggacaaggacgttgcaggggcccattcatatacggattccgggcgttgaagggacttct

SEQ ID NO: 543478 - DNA, 924 bp, Homo sapiens
gctatgttgaatagtctactgtgctgtggttgatgataatgtgacgtcagtcgttaattgcttcaccagattgaccagagctctcatggacctcgcttgggcctgagtggcgcctgaaggctagcctcaatccccttggtgcctgtttcagctcaaaccaggtgcgacttctcgttgccttccggatgaggctccacaaagagactggctatctagagcgaacatcctagaaatgaatatacacagccttacacttgaacatgagatgccttctgctgcctggatgtggagaacagccagagttctgagagtgagacgacaggcatatgagctctgtaaagaggggaataccataatgaaagctattgagaaggtacagtgaaaattgcctactctgtcgtatagtaagccgggaaattctggccactgtagcacggcaaacatgaagacagcttcttggctagtagagagagataccttgagatgccaatgttatcacattgaatgtccacgttgaaaggagcttgtcagcgaggaaaagatcccttcagaaggcttggagtggggaaaaatgaagcgtagacatggcagtttcctaaccatgaaacggggctccaagggtcgcacaagagggcgactcccaaggggtagctattaagattccccagccttgggacgaggaacaattctagccaacccctccctttaccagggattggcagcctacaggcaattggctccgtggcaacacggaaaggtttggccgggtcgagcgcacagcttgaaggcgaggaaacttaaccaataaaacaaagctcaaacacgggcaaaacgtgggaaccccttggcttgaatctttacccggagaagccccttgggccacctggtcctttggccccggtccttgaaacccaatattggcca

SEQ ID NO: 543479 - DNA, 538 bp, Homo sapiens
gaaacaattcttcagccaaatgtaaggcaccacctgcgggcaaagcagggcttttccatagtcttagctttccgattttaactccatgggtccaaggcgggagaccatattaattttggtaccaaaaccctactagtttaccaaagggctgaaagggagataaagaggagttgggttaatgggtacaaaaatcccagttagatgaaaggaataatatagatagtgttcagtagcagaatagaatgaacataaactattagtttaaattatgtgaaattccttctatttgatcatattttacaagaaaaaacatcaattttatataggccactttaatacccacccgtatgaggtgtataaggtaaggttaccgacctgagaagctgattaacattggttgaacaatcttattcattagagaacatggtgcttagggtctaaaaccttttgaaaggtctgagaactctttaaaaaaaggaaagaaagaaagaaaagaggaccccctatcaaaataaaaaaatgcaaaatgagaaataat

SEQ ID NO: 543480 - DNA, 409 bp, Homo sapiens
ccttgctctctgttacacagagcatatcagggctgtcctgtgtgggttccagatgagggtctgtgtcccggaagcttgtgttgagagcgtcaaggacccaccccgcttgctgaaccctcacaggtcttggggttgtgcagcctggacttgtagcacacatgtgctgaagcaaagcttcgcggactggatgagccacctggccacagtccttccatggagggcctgtcgtgacgctctaaggagagaggcacaggcctgtgtcttcacttaagccacacagtgatgaggaaaccacagatggagctctttggcgataatactgactctagcccatgagtggcttggccaagccgaggaagggtaggttggcttgtcgagcccttgagcgctgggagaaggggtggggggg

SEQ ID NO: 543481 - DNA, 887 bp, Homo sapiens
gtctgatggtggcaccccttcctgcataccattttgaacatgtaacttttgtatgaaaaaaattcgagcacagtatgatacgttgcccaagtacagaacacctaccagaataaccatctccgattgaaaactccgggaccatcttctcgctcatctactgtttctggcagacctgcccagggaccggggccgcggtatagctccttcttgcgaaccaacgatgagctcccagattccgtgcaagaataattccaccgtaggtgttagcaccagctgtaaaaagccctggtccaatccgtacctgtaggacatccatacacctagctctctgctgggctccatatggcgaccgcgatgatgtggctctggaatgcgtagagaccaattcttccgcgaaattggcgagtgataagtcgccgagggcatactgatcgtctcctgaatatgcgaaacagcgtgccggccgagactctcttccaggacatcaatgaagtccagctgaagatgagtggggaaaaaccccagacgccttgaaagctgccatgtgcctggagtactcctgcttgagccaggcctttggatctatatgccctggttcgtgcccgaatggacgcaccatctctgtgactttccatggaatactccacttcctagataaagcaagtgagctttattcaagaagatggtgaccacctgacaactccaaaggatggatggcggaatttaggttggcagactattcttccgacaggctcactctcaagacgataaaacttatgaccagcggttctgaggcctgccagtaaacggtctgcaaggcatctccagcatcagagtgtctataacttacagctgccacggaacaactttggtcaacaacacaaaac

SEQ ID NO: 543482 - DNA, 1103 bp, Homo sapiens
ggctcttctagtggttctaagaggcggaggctcgggctgccttggtccccagcccactcgctcagccctgaggtttccctctgcttccccaggagcttgaaggcaagcagtccatggcgggaatcctggtagggagagtaatgccccatacctgtgcccactgtctccctgtgccgggggcgcctggaggcaatgccagctccaggacagaggctcaggtgcccaacgggaaggcagccaggaggctgtgtcattgttcaagtcaggcctttaccccaggccctcgcgcagcaagtgcctccacgggcagccctggggcccccaacccacgcactgaagcaggccggcatgtggcatgccatggcccttgaccttcctgctggtgctgctcaccctggtccacgctctgcattacggcttgcacagaaacttccgacggcggggagagcatctactgggggcccatagctggacaggccaggaacacaggtgggcctgctgttgcagatagcggaggcctgcctggcagctccatcgaagtccgtggctcaaagtcgctcgctgccgggaaaaccgcttcctacccgggcacgacgcccttgaccggggtgcccggggaagcgctgagcaggctcgggaggtggaggcgcctggtgtaccttgcaacatgagtgcgcgtggaggtatacgtcaccaggagaccgcggaggggccagaggaaacttcatgtgccagcgtatatgtacacgagtcggccagggacgccattcccttggttggtgaatggcgcgccggacacttgggccgatgccacgtggcgggagtctaacctacgcttgtggggcttgatgggcagtgggcgtgccaggggcatcataacggtacccagacagtatgtcttccatggccacgctccgctgcatcattacactactacttaatgtagtgaaaacaagagatcaacaacaactatgggcgcatcaacccgagttcgagcacgagttactacatgggcaggtgctatatgttgccgctgcacaactcttgtcaagtggtaactggcgccccatatgcagtagaatccagcacgggacccgattgat

SEQ ID NO: 543483 - DNA, 1034 bp, Homo sapiens
  misc_feature (16)..(16): n is a, c, g, or t
  misc_feature (76)..(76): n is a, c, g, or t
  misc_feature (140)..(140): n is a, c, g, or t
  misc_feature (153)..(153): n is a, c, g, or t
  misc_feature (157)..(157): n is a, c, g, or t
  misc_feature (167)..(167): n is a, c, g, or t
  misc_feature (732)..(732): n is a, c, g, or t
ccaagcaggcgagctnccccgggaggtgcgcacggcccaggcccggtcctcaacccttctgcaacaagggcccagncccgggccccaggacaccgtagagcggcccttctacgacctctgggcctcagacaaccccctgnacaggccgtttgnttgnccaggatgantttttcctggagcagaccaagaagaaaggagtgaagcggccagcacgcctgcacaccaagccgtcccaggcacccgccgtggaggtggcgcctgccggagcttcctacaatccatcctttgaagaccaccagaccctgctctcagcggcccacgaggtggagttgcagcggcagaaggaggcggagaagctggagcggcagctggccctgcccgccacggagcaggccgccacccaggagtccacattccaggagctgtgcgaggggctgcttggaggagtcggatggtgagggggagccaggccaggggcgaggggccggaggctggggatgccgaggtctgtcccacgcccgcccgcctggccaccacagagaagaagacggagcagcagcggcggcgggagaaggctgtgcacaggctgcgggtacagcaggccgcgttgcgggccgcccggctccggcaccaggagactgttccggctgcgcgggatcaaggcccaggtggccctgaggctggcggagctggcgcggcggcggaggcggcggcaggcgcggcgggaggctnaggctgacaagccccgaaggctggggcggctcaagtaccaggcacctgacatcgacgtgcagctgagctcggagctgacagactcgctcaggaccctgaagcccgagggcaacatccttcgagaccggttcaagagcttccaaaggaggaatatgatcgagcctcgagagagagccaagttcaaacgcaagtacaaggtgaagctggtggagaagcgggcgttccgtgagatccagttgtagctgccatcagatgccggagactcgcccttcaataaaaaattttttttagctggaaaaaaa

SEQ ID NO: 543484 - DNA, 1081 bp, Homo sapiens
  misc_feature (16)..(16): n is a, c, g, or t
  misc_feature (76)..(76): n is a, c, g, or t
  misc_feature (140)..(140): n is a, c, g, or t
  misc_feature (153)..(153): n is a, c, g, or t
  misc_feature (157)..(157): n is a, c, g, or t
  misc_feature (167)..(167): n is a, c, g, or t
  misc_feature (546)..(547): n is a, c, g, or t
  misc_feature (549)..(549): n is a, c, g, or t
  misc_feature (618)..(618): n is a, c, g, or t
  misc_feature (624)..(624): n is a, c, g, or t
  misc_feature (629)..(629): n is a, c, g, or t
  misc_feature (667)..(667): n is a, c, g, or t
  misc_feature (681)..(681): n is a, c, g, or t
  misc_feature (693)..(693): n is a, c, g, or t
  misc_feature (701)..(702): n is a, c, g, or t
  misc_feature (720)..(720): n is a, c, g, or t
  misc_feature (723)..(723): n is a, c, g, or t
  misc_feature (725)..(725): n is a, c, g, or t
  misc_feature (746)..(746): n is a, c, g, or t
  misc_feature (748)..(748): n is a, c, g, or t
  misc_feature (761)..(761): n is a, c, g, or t
  misc_feature (766)..(766): n is a, c, g, or t
  misc_feature (769)..(769): n is a, c, g, or t
  misc_feature (772)..(772): n is a, c, g, or t
  misc_feature (774)..(774): n is a, c, g, or t
  misc_feature (780)..(781): n is a, c, g, or t
ccaagcaggcgagctnccccgggaggtgcgcacggcccaggcccggtcctcaacccttctgcaacaagggcccagncccgggccccaggacaccgtagagcggcccttctacgacctctgggcctcagacaaccccctgnacaggccgtttgnttgnccaggatgantttttcctggagcagaccaagaagaaaggagtgaagcggccagcacgcctgcacaccaagccgtcccaggcacccgccgtggaggtggcgcctgccggagcttcctacaatccatcctttgaagaccaccagaccctgctctcagcggcccacgaggtggagttgcagcggcagaaggaggcggagaagctggagcggcagctggccctgcccgccacggagcaggccgccacccaggagtccacattccaggagctgtgcgaggggctgcttggaggagtcggatggtgagggggagccaggccaggggcgagggggcccccccctcgcccctccccgcccccctcctccccccccccccccgcctcgcgcccccccnncncccccccgccccccccccccccccccccccgcccccccccccccccccccccctccccctccccccccngccccnttccnccccccccggctccccccccccccgccccgcctcgtcnccccctcccccccncctccccccccncccccgcnnccccccccccccccctcnccncncccctccgccccccccccccncnccccccccccccnccccnccncgnancctgcnnctcccccagccccgaaggctggggcggctcaagtaccaggcacctgacatcgacgtgcagctgagctcggagctgacagactcgctcaggaccctgaagcccgagggcaacatccttcgagaccggttcaagagcttccaaaggaggaatatgatcgagcctcgagagagagccaagttcaaacgcaagtacaaggtgaagctggtggagaagcgggcgttccgtgagatccagttgtagctgccatcagatgccggagactcgcccttcaataaaaaattttttttagctggaaaaaaa

SEQ ID NO: 543485 - DNA, 204 bp, Homo sapiens
acctaggtttctgccattcggggtgaccctgtatttctttcgggtgcccattccattggtccagttaatacttcctcttaaaaatctccaagaggcggggtctccagatcccatttagaaccaaccgggtgctgacaacgcttgtagatgagggccatcatcctaagcccaaagtagaaattggtcgaaggtagtaggtagaga

SEQ ID NO: 543486 - DNA, 675 bp, Homo sapiens
acgaggggtggtgtggacgtgggtgatgtggacgccacggccccgagaagctgattgttggcgtggatgagaaactgaatcctgaggacattaagaaaacacctgtaggtccacgcccctgaagacaagaaagaaattctggccagttttatctccggactcattcaatttctacagaggacttgttacttcacacgtaccatcgagaatcttattccccattgctagtgaccgaacagatcggagatctatgtccatatgacataggcggccaaagagtggacagccaacatgccagaacatacaatctctgcaaaagtgaacgatggaggatgacactcagagattcccgatcctcacaccattccgagagccgggacaggcactagtccgagcagagaaaagccctaaccagtatgacaagaaacacatacgcaattgcccacaaaaagatggcgggcaaaggcctgtaccacgcactggaaaccgtatggacttgccaaacacgccccaaatagggtggaagcgaaattcctcgggaaaacccaaataggaatgagtgccccgtgcatgccacatagagagccgcccattcatttgactcaccgcactgatttacaagcgcaggtaattaccacaatatccatgctaggaaatcctaagcgacgagcaatg

SEQ ID NO: 543487 - DNA, 974 bp, Homo sapiens
tccctggctggttctggaggcacggcgcaccgcggtaagaggcttcagacgctgtcagacgatgcctcgcccacggcgggtcaggtcatctcctggatctatgccttgtggtgcttcatgcacagaatattcccagtatatctcacatgacatttgaagcctggagcctcccaacataatagacagactgattaacaataatgagtatgcagggacagcatacaggattcacaattatcagtgagatttcacgatcctgaccgtccaaactgctagatctacagtgagcttcggatatatcacatgctgctctcctgctcctgtctaactgtagaataactgaaggaaattagattttgatgcttcggaacgggaaccgagtttctgtaactgctgaaggaatagaagctgtggcttcatcttgttcataccttacactgaaagcttctttgaaaaagatgctgcaatctcactgacgaccggagtcgttgctcttgcactcagttgcctgctgctacagatcctcgatttgggtggctgcttaagtattatctgatgtgtccttactgcatgaggagacctcactgcccctttctcgcagtgtgtcgacttttcagctactcaggtttctcgacagtggtgtgttgccttgttgtggaccttgtgcgaagaattccggggttctctgggccttgtgtcctctgctggtggtgctgtgcgaagctgtctcatctactggctcgatacgtctttctcttcaggatgcccgtgtagagaatatgccggaggttgggccgtgtttggccccaactacgcatgagggcgtttggctttgccagaacggtgggagttccctcttccggacagccttgatgtttttgcgccgattttggggtcccgccggtgttttgggtcccctgaaaggcgggtctcccccctatctatatttttcccgttccgctgttattttcccc

SEQ ID NO: 543488 - DNA, 1030 bp, Homo sapiens
  misc_feature (766)..(766): n is a, c, g, or t
gaataggaatgaccaaggtctgacttgatcaatacaccttggtactatcgccaagtctgggaccaccatagcgttccatggaagctttgcaggctggtgcacatatctctatgatatggccaatctcggtgtggtggttctattatactgcttattgtggttgctgagaaagtaacatgtgatcactcgagaatcataacgatgatgagcaggtactgctatggggagtcctcaggcaagggggtatcattcactacgatgatggacatgattactagtgtgaactcgtatggagtcagtagggaactaaaagtaatcctacagcgctgtagaagtaagaccaaatgtgattacttggaggaacgaacgaataaaggagattgtgaagaaaacattgctcagatttattgtggatatcccaattactctctatttgtggagaaggaagcgtgataaaagaattaaggcgagtgaagaggctgatgaaaaggaagacaaattgaagaagaaaaaagaaaaaaggatcgagaaggagtcggaagacatgatcgtgagaatttgaaagatgttggtatctagatgaggaggaagataatagaagggtggggacaatgaagaagactgactgaagatgacggaaaggtacaatcgatgcatgaagagctcatcaaaatgaaatttcgcatctgggcagaaatctccgagatattactaatgaggagtacggagattctataagagttgacaatgactggaatatcacttngcagtgaagccatttcgaggggcagaacgttggatgccaagccctccattcggccccgaagtgccctatgatcggtgcaaccgaaaaaaagaacagttcacagaatgcgcggctcccagataaggagagcaagccgaatcaacacagggggtaaaggaacccaaacacacgcaagaagacacagtcgaaaggcaacaagacgacgcaagacacggccccgaggcaaacaaaaagaaacaaacaaaagaaccgtaaagaagccac

SEQ ID NO: 543489 - DNA, 628 bp, Homo sapiens
ggacagagcactagataccctgtgtatctgtgagagactatgtctgcacacaggataattagaccaagcgtatgcatgcagtggaccttaaagaggaaagcataatctgtaaccgagtctcagtacttgctgtctatatagtgtataagcacatgcataaagatccatcacacaacaattgatatatgcttatgagtcatactctgtatcccacggatcacgtgcaatatcactatgcactaaacagatagctgcaccacgtctataatatgtgcccttagctgtccagcactacatccatgaatcttcaggcagaacaaagatccaagtcgatgatgttacagttggctcgctgcaacgactagttagagatcacatgtacatgaagatggatatgacacaggcataaggcgccactattgatacagcgagctcgtaagagagttactggcatagcattagcaatggacaggtctagcgtctatcatgaggaggatgccagatgtgctcatatacacacagtgagctgttacatagctctaagatggtatctaatttgagacctactacctgatgctcttggagacactctgcgtacatggataactcatgcttatcgggccagtgt

SEQ ID NO: 543490 - DNA, 104 bp, Homo sapiens
cagaacagaagccaaaaacagaagataggaattcgttacctttggctaccaaatctatctgcgtttgtgcctatttttttcccttaccagaactgacttggaag

SEQ ID NO: 543491 - DNA, 332 bp, Homo sapiens
taatggattgggagacgtgtggcagaaaaactgagaggttgaggtgatcccattcgtaggcccagacctgtcattccagttgggagaggtcaccctggccattttgcccctgccagcatcccatcctatttctctctcccagtctttttgcctgggaaagcagccgacattcccagggctgtccagtgagtggtgttcagtgggcttcagttccaaggaatccagggggatctgtccattggggtttctctattgtgccttcagaaacccgatggaggcaatgtatacacacatattatacttccactttaaaaacctacgcaaagccgaga

SEQ ID NO: 543492 - DNA, 368 bp, Homo sapiens
gttctaggcctcgccagtgcccagtagaagctccggctgatcacggcatgcttctgcagctggcaccgagttctgagatcgccccgaatgtcccacccaggttccatgtctgctaactgcctctgataaagtcataaataaaagcccaaaatggagcgagggggcaatgggagaggcagcccagcaagaaagacggccaaggttagttcttccagcacggaggcaaactttccacctccggccgcggctggctggacccgactgaaatggtcccctcagtccttggggtcaacggggagggcactaggcagccgagtgggagggaggcatgaggcaagcctggactacccatggcctcctgtcccctg

SEQ ID NO: 543493 - DNA, 465 bp, Homo sapiens
  misc_feature (10)..(10): n is a, c, g, or t
  misc_feature (24)..(24): n is a, c, g, or t
  misc_feature (45)..(45): n is a, c, g, or t
  misc_feature (247)..(247): n is a, c, g, or t
  misc_feature (424)..(424): n is a, c, g, or t
  misc_feature (445)..(445): n is a, c, g, or t
ttcctcgaantttggggcccctanttgtggtcctttgtgtaatgncaattttgccccaaaggggaaaaattgccaccctgttgcaaacatatgatcaactcccttgaatttacccatgtggaagggattacaactaggattatatatttcaatattgcctattgaaagacattgatagactgggtactgtggctcatgcctgtagtcccagcactttgggaggccaaggcgggtagatagcttgagncccaggagtttgagaccagcccaggcaacatgatgcaacccctcctctacaaaaaacacaaaaattagccaggtgtagtggtgcacacctgaagtcccagctatttgggaggcagatgtgggaggtttgctttatcctgggaggctgaggctgcagtgagccaagattgcaccacancactccagcctgggcgacagngatgagatcctttctcaaaa

SEQ ID NO: 543494 - DNA, 670 bp, Homo sapiens
ggacgcgtgggtcgaccaacgtcgtcgtacgacccacgcggtcgagtctccttacaaggttcctgaccttgcggtagtaaagaatgtcactctctggcaggcccaggagccaaaggatattttgggaaccttgaccaagagaggagtgtatccaatttatacaggaattacaagtgcagtctgattgtgaatccttgtcttggttcttaccttgagagttttaaaagttgaatgtgaaattccttatgaaaaagttccaacaaagccaaactttaaaagagcctatatgtggtcaatcactatttttgctgtactttatgcaaataatcaggccaaatataataaaactaaaacttattttgcaaataaattggtcctgttatgatttgcctttaatagaaaagggggactggagagagaagaattatgtttcagaagaaaatgatagcatacctgttgttagattctagctttgtccattgtttttaagttgtaattatttgcctacatttgaactaaatcttgaattctttcctggctacaagtctccaagctaacatttaaattttttctctcctatgtttctgacttggaataagtagaagttaaaactatgctttttcttgaagccctgcagactggagcaagacaacttgaataaactatggga

SEQ ID NO: 543495 - DNA, 955 bp, Homo sapiens
gggatcagcctgagcacgtctccatactgggagaggcttctgggtcaaaggaccagtctgcagagggatcctgtggctggaagcgaggaggctccacacggtcgttgcaactaccgaaggcaggatctgggcatccaagcacggccatgatccctccgagggctcttctgggatgttggcgtgtctgagttgcaggaacccaagtgcgtgatagcgatggtgacatgtcgtgactggccgattgggggacgccgagcaaccagggccgcgctgagtagatcttctagcacgagtgccacgtgtgtggcatctgtgtgttgacaaccctgtgtggacctgacttgatgccagctgtcgtctgccggggccctgggcttcgagaacagtcacccaggctctgggcagatgtgccttcgggcaatgatcaggtcccatcatgctgggacgatgtccagtgcacgggaagccgtaggcctcgaactgggccgagctgcgatgtccctgtggctggcctgaaagagcaacatgtaggtcacgagagagactgcgtggctgtgtgtcctgtacctaatgaaaccagtgagcgaccctacatcctggaagcgtctctcatgggaagcgtcgtacgcgaggcaccgtatgtgccagatcgtattgaccagccaagaggggctgcgaccttgttcgttcagcgtgaatgtgcagggtcgaggacgccctgggcttctgtggccacattggtctagtccgtgaactgacaatcgtgggacgggccatgcggcctgttggtaatcgcagctcggggtcagtccaattgttcacctatgcaggtgtgcgattgtgaggttgtgttgcccactggttcagggaacgttctcacgggaattacaagctccctaaaggattgaacagtacctgtttgaattcaaatgtcccgaaaggctgcctttccaag

SEQ ID NO: 543496 - DNA, 331 bp, Homo sapiens
gctcagccacatgttgatgccgaggctcccggcgctcgctgctcccgcggccgtgccatgccctcctacgcggtcaccgtggccactggctgccagtggttcgccgcgcactgactgactacgatttaccgtcagcctcggtgggctcgtgcgggctgtatgcgagaatcacctgcgtggtacaagccctttctacaactgacttcgatgcgtggctgcggtggattcatactgacgtgagttgtggacgcaggtaactgggcgatgatccagcctgggtcagaatcggagaagcgcaagtacgtggcttgaatgacgacgtggtacctga

SEQ ID NO: 543497 - DNA, 215 bp, Homo sapiens
gggaccctcaaattaaacagcctcttaccttgcgagccgttttccccaggcctgcgtccgagtcttcgccgcttgcggccccgttccgacgcggaagattctgattgcagccatgagcagcattgagtgcttcagtgttggacgacttggccattgggcccgggatgtcctactgtgggaggcgtggtcgtggatgagagccgtggcagagtggt

SEQ ID NO: 543498 - DNA, 1133 bp, Homo sapiens
ccgagaactgtgctggtgaaaaggacagaccccggagaactgtactggttgaaagaggagtgacagaccccgagagctgtgctggtgaagagggacagactcccggaacgtaacttgctgcgtgggtggatggaggagtaggagcctgtatgaacgtgtatcatggctgtgtgcatgagagagacaccggcggaacgtgttcgtagtgctcttacgggagcgcaaaagaggctctcgatcatatagagagatggctgagaggatgagacgcagagagccacccgtacgtatacgtggatcagctggagattaggacgagagaggggaaaggacggcaggagtagagccagtaactggagtgggtattgagactgaggagtgagatctcacgtcgaatgcgcacggtaaggtggcaaggggcgagagactcaagtatcctccttggcaaacgtgaggtaggcgtaagcatgaagagggggccaccaaagaaagcgcctactttgggagagcgtgagcgtcggtctgtgcgatgaaagtgcgcaagtagttggttgagacaccggcccatagggccaatcatttgtgcatggcactgttggttgagccacagtgtgtaaaaacggccgtggacactttcaccgatacggcatgggtttgggcatagcacagagggggccagaaggtataaccaagaaagagatccataaagacgttctagccagcccattgggaagaacgatccaagaggcaaaaggataaataggcaagacaaaagtacatcaaaagacagagctttgtaagtcccggacacagatcgaggacgttcgcgagagccgaccatatcagaataatagatacctaatgagtttgggccttggaaggagcaccaaagtaagcccacatagtacgcttacctcataaggatatggaacgtatagcctagtcatggtatggaagcgaagaggtccatgtgcggggaccacattatcaagatgaccgcagagaatggcagaagatacacacacatggtatgaatttggacatagcttcgccagaggagttgaactcagggggggaccccaggaagccattattcataacaatggccttggctttagtaatatagaatcctt

SEQ ID NO: 543499 - DNA, 198 bp, Homo sapiens
acacggatcacacttctaatgacatcgaccgacggtcggaaaaatcggtttccagctcaatttccgggtaacgccgaacaaattccgccaccaccggattcaacagtgccgcccaccagcggcaaactgacacgcagcttgccgcgcggcgcgctgtgcgtatcgctgatttcccgttccgccgccgccaattccccg

SEQ ID NO: 543500 - DNA, 1100 bp, Homo sapiens
cacccagtacagacatatccacaaggtctgtaaatgcatgctagaaaaatagggctggatcttatcactgccctgtctccccttgtttctctgtgccagatcttcagtgccccatttccatacagggatttcttttctcatcagcagtcaattcatcatgacacagtttttcatgcacctccctttatggtcttgaacatactttttgcacaccagcaatttcctttatatttcaacacaacaacaaacagcagcatggcggtcttcactcatgttgcccagtgctggtagtcggaactcctgggctcacagcgataccattctgccttggacctcccgaagatgctgggattgcaggcataagctaccatgcttgggcctgaacataatctcaagaggaggatttataaaaccattttctgtacaatcaaatgcttggtgtcatatttccccatttgccaatgtagtctcacttaacaaaaacccaccacaggaaaaacaacatggcatcacaccctccaacgtgcacttacacatagaggagcaaacgagcagcataacacaacaacaccatacatcacgggacactccacacaagaggagacccaacaagaaacaaccatggcagacgggataagacaaagaatcagggccacccacagcacggacacaattgtccaggagaaacccatggtgtggccgctatctgcatgggcgacacccacacactgtatctcagacgacaatcccgaaacctcacgacatctacactatcccgcacccacgcacactcggtgttgatacacaattacacgagcattgagtaccttcgccacttactcgaaagaccccaaggcaccacggagagaagcagaaccaacctagaacaccacaccccaaagcggaacacaacaaccaaggggcccagaaggcacccccacaaggacaccgtaaaaacacagcaaaaaaaagacccaccgaactaatatgagacacaaaggaaagcaccaaaagacggagcaccacacaaccaccgagacacaacggcaccgagaaacaccaacgaaaaaaaaacagcggcaccctacggcaacacgcat

SEQ ID NO: 543501 - DNA, 125 bp, Homo sapiens
tctgacatcgctgatccttttccttcagctccattgtttggtctctggtttgcatccttcgagtaagccatgtagaacagacttgaaaagtttaggaaatcatactgtggtcgatgcgtggtggg

SEQ ID NO: 543502 - DNA, 301 bp, Homo sapiens
actcaggttctatcaaacattaatcaaatggttaagaattgtgatagggccaggtacacctgtaatcccaggacgggacgccaaggcaggatgattgcttgagcctgggagttcgagaccagccagggcaacatggcaagaccctgcctttaccaagaaaatattgaaaaattagctgtgtgttgtggtcatagtcccagctactttggaggctgaggtagagggatcgcttggccctaggaggtcgaggctgcagtgagctgcaccccagcctgggacagagcgagaccctgtctcaaag

SEQ ID NO: 543503 - DNA, 298 bp, Homo sapiens
tactgtaattggtgtgagtgtgttcaagcgactgcatgtgctagtccacatgacatgattgacattcacattcttggggagccttgcagttaaggaatgacacagggagccaagagagtggcttattcggttggattctgaatcacaatcaggaaatagtctttatctggtgcaaccataaatatcatttttcttgaagcgaattcaaaggaaggtaagatcgttactggaggtcgatgtcacgcacggtgctccgtgcctatcaggatgaagctgtgcatgaggctggccatactgg

SEQ ID NO: 543504 - DNA, 1263 bp, Homo sapiens
  misc_feature (620)..(620): n is a, c, g, or t
  misc_feature (663)..(663): n is a, c, g, or t
  misc_feature (768)..(768): n is a, c, g, or t
  misc_feature (775)..(775): n is a, c, g, or t
  misc_feature (795)..(795): n is a, c, g, or t
ggggaagcgggtgcttttcatctgagcctgcaagaggggggtccaggcatcgaggcgtggggagtcgtgggtatgagccccgtagtccatgccaagaggccacagtgacataatggtctcacgtgtgaaacatggctacagattggctgggaagtattgtagtccagtcaattgtggagatagcttgggtgtcatatcagggcaagagtgtcagctgtggatcaggtcagccagaccatctctcgtctcacccgggcttttcgcataatgtgatgtgatagtgtcttgtaccagaagtcaccttctaggggcaggtgacattacggagttaacaagattctgtgatgataccaggcacctggagacaaccaaggttttggaggaccttcatcagacagaattaggccccgtctggtgctggctgccaagtgggcatcaatcagaattggcacaggcaaagtttgtcaaggaagccagcctcttccagcagtgccccctcagaatatccctaagaggacagatgtgaagagccaggatgttgccgtttccccgcagcagcaacagtgctcaaagagctatgtcgacaggcacatggaatccttgagtcagtccaaaagttnccgtcgtcggcacaactcctggtcatctagtagcaggcacccnaaatcaggcaactcccaagaaaagtggtttaaagaatggccagatgaagaataaagatgacgagtgcttcggggatgatattgaggagatcccagacacagattntgatttngaagggaacctggctctttntgacaaggcagctgtgtttgaggagattgatacctatgaaaggagaagtggtacccgttcccggggcatcccaaatgaaaggcccactcggtaccgccatgatgagaacatcttggagtccgagcccattgtctatcgacggatcatagtgccccacaacgtgagcaaggagttctgcacggactctggcctggttgtcccaagtatttcctatgagctgcataaaaagctgttgtccgtggctgagaagcatgggtgggactggtccctgccctcatccttagcctgggccttccccagaggtattaaagagaagtatgattcctctgtcttcagttcttttcaggggcatcctgcccatagtacccagttcccaaggggcccccagtcacgtggtgaagcctagcactcatgcagctcttagggaaccaaaaaccagcactgaaataaagctgaatgactgactga

SEQ ID NO: 543505 - DNA, 130 bp, Homo sapiens
gtaggtcaattgattgtggcaagtataatagaaaaataattgatttattcttgtgtttctcttttctttcttttttttttagactgtgtcttgccctgttgcccagtctggagtgcagtggtgtgatctc

SEQ ID NO: 543506 - DNA, 490 bp, Homo sapiens
  misc_feature (90)..(90): n is a, c, g, or t
  misc_feature (94)..(94): n is a, c, g, or t
  misc_feature (98)..(98): n is a, c, g, or t
  misc_feature (106)..(106): n is a, c, g, or t
  misc_feature (109)..(110): n is a, c, g, or t
  misc_feature (140)..(140): n is a, c, g, or t
  misc_feature (146)..(146): n is a, c, g, or t
  misc_feature (170)..(170): n is a, c, g, or t
  misc_feature (173)..(174): n is a, c, g, or t
aacaggagtgccaccctatagacctggcctgcagtgtattttgtccccctctggagcctgggacttggtgagcagtgggtaagagatctnagancaanaggtgcanggnnattgtctggtatagggtgcaagggattgcnagtatntagctgatactgcttcttcacctnctnntccaggttgaatcccaaaaatgttcaccagaggcctacagtggctctactgtgtggacctcatgtgaagggggctcagggtatcagctgtggaaggcacctagccaaccatgatgtccaggtcatccttttcctgcccaattttgtcaagatgttggaatctatcaccaatgagctgtcgctcttcagcaagacccaaggccaacaagtgtctagcctcaaaggtgagcacttaggcagggctgggctgaaggcctcctccctccttagcagtttgatggtctcgtcatgccacccagtggcgacaggtggaaagg

SEQ ID NO: 543507 - DNA, 114 bp, Homo sapiens
  misc_feature (12)..(12): n is a, c, g, or t
gggaacgttgcnagaccctttgcgtaacaccaaacccgcccgcttatgcgcccttcgggggcgcctgagggggattttttcttcccatcgggggggtgtaaacacataatcata

SEQ ID NO: 543508 - DNA, 3738 bp, Homo sapiens
  misc_feature (620)..(620): n is a, c, g, or t
  misc_feature (663)..(663): n is a, c, g, or t
  misc_feature (768)..(768): n is a, c, g, or t
  misc_feature (775)..(775): n is a, c, g, or t
  misc_feature (795)..(795): n is a, c, g, or t
ggggaagcgggtgcttttcatctgagcctgcaagaggggggtccaggcatcgaggcgtggggagtcgtgggtatgagccccgtagtccatgccaagaggccacagtgacataatggtctcacgtgtgaaacatggctacagattggctgggaagtattgtagtccagtcaattgtggagatagcttgggtgtcatatcagggcaagagtgtcagctgtggatcaggtcagccagaccatctctcgtctcacccgggcttttcgcataatgtgatgtgatagtgtcttgtaccagaagtcaccttctaggggcaggtgacattacggagttaacaagattctgtgatgataccaggcacctggagacaaccaaggttttggaggaccttcatcagacagaattaggccccgtctggtgctggctgccaagtgggcatcaatcagaattggcacaggcaaagtttgtcaaggaagccagcctcttccagcagtgccccctcagaatatccctaagaggacagatgtgaagagccaggatgttgccgtttccccgcagcagcaacagtgctcaaagagctatgtcgacaggcacatggaatccttgagtcagtccaaaagttnccgtcgtcggcacaactcctggtcatctagtagcaggcacccnaaatcaggcaactcccaagaaaagtggtttaaagaatggccagatgaagaataaagatgacgagtgcttcggggatgatattgaggagatcccagacacagattntgatttngaagggaacctggctctttntgacaaggcagctgtgtttgaggagattgatacctatgaaaggagaagtggtacccgttcccggggcatcccaaatgaaaggcccactcggtaccgccatgatgagaacatcttggagtccgagcccattgtctatcgacggatcatagtgccccacaacgtgagcaaggagttctgcacggactctggcctggttgtcccaagtatttcctatgagctgcataaaaagctgttgtccgtggctgagaagcatgggctgacccttgagcggagactggagatgacaggtgtgtgtgccagtcagatggcactgaccctcctcggaggacctaacaggttgaatcccaaaaatgttcaccagaggcctacagtggctctactgtgtggacctcatgtgaagggggctcagggtatcagctgtggaaggcacctagccaaccatgatgtccaggtcatccttttcctgcccaattttgtcaagatgttggaatctatcaccaatgagctgtcgctcttcagcaagacccaaggccaacaagtgtctagcctcaaagatctgcccactagccctgtggacctggtcatcaactgcctggattgccctgagaacgtcttcctgcgcgatcaaccctggtacaaggcagctgtggcctgggccaaccagaaccgggcaccagtactcagcatagaccctcctgtgcatgaagtcgaacagggcattgatgccaaatggtcactggcactgggcctgcctctgccactgggggagcacgcaggccgtatctatttgtgcgacattggcattccccagcaggtcttccaggaggtgggcatcaactaccactcgccctttggctgcaagtttgttatcccactgcactctgcttagagggttcctgcgcaggcaggactctgctgtcccctgctgctcctgataacaaacgccttaaggatatgaagcttcatggaccttgttaaagttttttctcttttgggtttgtttcttctgtgagagaacagaacttacttaaaactgacctgtcacttgctcttagccagggaagtctttcccactgggttccgggctgggtggcaggctgagcgtgcagcaactccaggcatctctaccctcagccccctgcacggccaggtgggcctttgtttacagccgtaggcagctctcaagactgtgtttcaggtttacagccactgggcctgggcacacacattgaagagtgggccaggtcctgtctgggggcctgtacctgctctatttcagagcttgtggctttgtgtctcccctgctttccccacgcagacagcccttcctctgtagaaccagctgcacggcagctgtccaccagagggcagacctgcactctccattcatgtccagggctgtgacagaccaggccttcccctagccccacaagttgatttggggggttttgacccttactcctgagctgatccaagttttatgctgatttttccaaggatctctccctccttttccctccatcactcagaggtagggaagggggcggcattaggatggtgttactgtattgggattttatgttgttctgtcgtcttcagcacaggtagtataaggttatattactgtagaaccacagtgcccatcttgccagcagtgcccgcccccaccctcaaagctgagcaggttgagcctttgcctagtctggggccagacccctcagatggggatatccctgggggagcctggtgctgaaccagaagaggcttcctggtgcttctgtcctaggccaccactcctccagccctttgcccgcacatacatgccccacctactctttcatcccctctgcccttcccctgaaacggtcctttgcagctgtcatcccagagcaggcagatgggctcccgtgcttgagctccaccccagctcttacatcatctgggctttgaaccttttacatttgtccagtctagatgagtaggcttggggccagcaccctgtctcaaagatggcaaaatgaggctagttctggatgagctagctggtgtgggttccaaccataggaacacactgatgctcaaatcctaaggtgccaagctctaggccctggaggctggtagaacaggatctatgcctggaatcctggcagggattcctgtcaaggacttgtgtttaagcctgcttcagggcttcaggctgcttctgctctgtgtctgcccaggctggctgagcgggtggatgggtggacagaagggctcaccaaggattgtggacatagggtaggccctggtaccacgggtttcaggctgttatcacttcccttgtaggaacatagccagaagcagatgagccagggtagagggctggcccctcctctcatcttcccttcagtcttaaattgtctccagcgatgggaagaggccagggactgtaacccttgtgctgtgtattctctgagcctctgctcactctcagggccaagcagctcccaagccggggccctctcttggccaaaatctgaggagcagtctaggttacaggctttttggtaggtaggttctggctgcctgttaatgcagttaggccccctgattaggtacagtgagaaacaagctagaacaaccctggcccagaagactgtccactccagcaagatccagggatgatagccttgcagggccactgggagtttgtgcccaagcttctccctcttctctccccagggggcactgggactggtccctgccctcatccttagcctgggccttccccagaggtattaaagagaagtatgattcctctgtcttcagttcttttcaggggcatcctgcccatagtacccagttcccaaggggcccccagtcacgtggtgaagcctagcactcatgcagctcttagggaaccaaaaaccagcactgaaataaagctgaatgactgactga

SEQ ID NO: 543509 - DNA, 4029 bp, Homo sapiens
  misc_feature (620)..(620): n is a, c, g, or t
  misc_feature (663)..(663): n is a, c, g, or t
  misc_feature (768)..(768): n is a, c, g, or t
  misc_feature (775)..(775): n is a, c, g, or t
  misc_feature (795)..(795): n is a, c, g, or t
ggggaagcgggtgcttttcatctgagcctgcaagaggggggtccaggcatcgaggcgtggggagtcgtgggtatgagccccgtagtccatgccaagaggccacagtgacataatggtctcacgtgtgaaacatggctacagattggctgggaagtattgtagtccagtcaattgtggagatagcttgggtgtcatatcagggcaagagtgtcagctgtggatcaggtcagccagaccatctctcgtctcacccgggcttttcgcataatgtgatgtgatagtgtcttgtaccagaagtcaccttctaggggcaggtgacattacggagttaacaagattctgtgatgataccaggcacctggagacaaccaaggttttggaggaccttcatcagacagaattaggccccgtctggtgctggctgccaagtgggcatcaatcagaattggcacaggcaaagtttgtcaaggaagccagcctcttccagcagtgccccctcagaatatccctaagaggacagatgtgaagagccaggatgttgccgtttccccgcagcagcaacagtgctcaaagagctatgtcgacaggcacatggaatccttgagtcagtccaaaagttnccgtcgtcggcacaactcctggtcatctagtagcaggcacccnaaatcaggcaactcccaagaaaagtggtttaaagaatggccagatgaagaataaagatgacgagtgcttcggggatgatattgaggagatcccagacacagattntgatttngaagggaacctggctctttntgacaaggcagctgtgtttgaggagattgatacctatgaaaggagaagtggtacccgttcccggggcatcccaaatgaaaggcccactcggtaccgccatgatgagaacatcttggagtccgagcccattgtctatcgacggatcatagtgccccacaacgtgagcaaggagttctgcacggactctggcctggttgtcccaagtatttcctatgagctgcataaaaagctgttgtccgtggctgagaagcatgggctgacccttgagcggagactggagatgacaggtgtgtgtgccagtcagatggcactgaccctcctcggaggacctaacaggttgaatcccaaaaatgttcaccagaggcctacagtggctctactgtgtggacctcatgtgaagggggctcagggtatcagctgtggaaggcacctagccaaccatgatgtccaggtcatccttttcctgcccaattttgtcaagatgttggaatctatcaccaatgagctgtcgctcttcagcaagacccaaggccaacaagtgtctagcctcaaagatctgcccactagccctgtggacctggtcatcaactgcctggattgccctgagaacgtcttcctgcgcgatcaaccctggtacaaggcagctgtggcctgggccaaccagaaccgggcaccagtactcagcatagaccctcctgtgcatgaagtcgaacagggcattgatgccaaatggtcactggcactgggcctgcctctgccactgggggagcacgcaggccgtatctatttgtgcgacattggcattccccagcaggtcttccaggaggtgggcatcaactaccactcgccctttggctgcaagtttgttatcccactgcactctgcttagagggttcctgcgcaggcaggactctgctgtcccctgctgctcctgataacaaacgccttaaggatatgaagcttcatggaccttgttaaagttttttctcttttgggtttgtttcttctgtgagagaacagaacttacttaaaactgacctgtcacttgctcttagccagggaagtctttcccactgggttccgggctgggtggcaggctgagcgtgcagcaactccaggcatctctaccctcagccccctgcacggccaggtgggcctttgtttacagccgtaggcagctctcaagactgtgtttcaggtttacagccactgggcctgggcacacacattgaagagtgggccaggtcctgtctgggggcctgtacctgctctatttcagagcttgtggctttgtgtctcccctgctttccccacgcagacagcccttcctctgtagaaccagctgcacggcagctgtccaccagagggcagacctgcactctccattcatgtccagggctgtgacagaccaggccttcccctagccccacaagttgatttggggggttttgacccttactcctgagctgatccaagttttatgctgatttttccaaggatctctccctccttttccctccatcactcagaggtagggaagggggcggcattaggatggtgttactgtattgggattttatgttgttctgtcgtcttcagcacaggtagtataaggttatattactgtagaaccacagtgcccatcttgccagcagtgcccgcccccaccctcaaagctgagcaggttgagcctttgcctagtctggggccagacccctcagatggggatatccctgggggagcctggtgctgaaccagaagaggcttcctggtgcttctgtcctaggccaccactcctccagccctttgcccgcacatacatgccccacctactctttcatcccctctgcccttcccctgaaacggtcctttgcagctgtcatcccagagcaggcagatgggctcccgtgcttgagctccaccccagctcttacatcatctgggctttgaaccttttacatttgtccagtctagatgagtaggcttggggccagcaccctgtctcaaagatggcaaaatgaggctagttctggatgagctagctggtgtgggttccaaccataggaacacactgatgctcaaatcctaaggtgccaagctctaggccctggaggctggtagaacaggatctatgcctggaatcctggcagggattcctgtcaaggacttgtgtttaagcctgcttcagggcttcaggctgcttctgctctgtgtctgcccaggctggctgagcgggtggatgggtggacagaagggctcaccaaggattgtggacatagggtaggccctggtaccacgggtttcaggctgttatcacttcccttgtaggaacatagccagaagcagatgagccagggtagagggctggcccctcctctcatcttcccttcagtcttaaattgtctccagcgatgggaagaggccagggactgtaacccttgtgctgtgtattctctgagcctctgctcactctcagggccaagcagctcccaagccggggccctctcttggccaaaatctgaggagcagtctaggttacaggctttttggtaggtaggttctggctgcctgttaatgcagttaggccccctgattaggtacagtgagaaacaagctagaacaaccctggcccagaagactgtccactccagcaagatccagggatgatagccttgcagggccactgggagtttgtgcccaagcttctccctcttctctccccagggggcactgggactggtccctgccctcatccttagcctgggccttccccagaggtattaaagagaagtatgattcctctgtcttcagttcttttcaggggcatcctgcccatagtacccagttcccaaggggcccccagtcacgtggtgaagcctagcactcatgcagctcttagggaaccaaaaaccagcactgaaataaagctgaatgactgactgaaaaaaaaacaaggaaaaacggtcgcagaaggaacaccaacacaaagccagcaaatgaccaaaaaagagaggccggcgcagaaaaatgtaccccgcgggggccacaagacgaacacagccgttttgccgcaggggccccccaggacgcgacaacacagaaaggaggcgcccacaaccgaggaggcgggcacacaccggggctcggggagacccacacgcgcggggcacggcaacgacccaacagaccggcgaacaacgccgcacgcaccgctcgcgcgacgtcgataccatc

SEQ ID NO: 543510 - DNA, 303 bp, Homo sapiens
atacggctgcgagaagacgacagaagggaatggtaccctggagtcaagggagaaaagaattttaagaaagcagttcaccatggcacatgtacacctatataacaaacctgcaaattctgcacatgtaccccagaacttaaagtaaaattaaaataataaaaataaaaaaaggctgggtatggtggctcacgcccgcctgtaatcccagcacttttgggaggctaaggcaggcagatcacttgaggtcaggagttcaagaccagcctggccaacacgctgaacccaacctctactaaaaataca

SEQ ID NO: 543511 - DNA, 3097 bp, Homo sapiens
  misc_feature (620)..(620): n is a, c, g, or t
  misc_feature (663)..(663): n is a, c, g, or t
  misc_feature (768)..(768): n is a, c, g, or t
  misc_feature (775)..(775): n is a, c, g, or t
  misc_feature (795)..(795): n is a, c, g, or t
ggggaagcgggtgcttttcatctgagcctgcaagaggggggtccaggcatcgaggcgtggggagtcgtgggtatgagccccgtagtccatgccaagaggccacagtgacataatggtctcacgtgtgaaacatggctacagattggctgggaagtattgtagtccagtcaattgtggagatagcttgggtgtcatatcagggcaagagtgtcagctgtggatcaggtcagccagaccatctctcgtctcacccgggcttttcgcataatgtgatgtgatagtgtcttgtaccagaagtcaccttctaggggcaggtgacattacggagttaacaagattctgtgatgataccaggcacctggagacaaccaaggttttggaggaccttcatcagacagaattaggccccgtctggtgctggctgccaagtgggcatcaatcagaattggcacaggcaaagtttgtcaaggaagccagcctcttccagcagtgccccctcagaatatccctaagaggacagatgtgaagagccaggatgttgccgtttccccgcagcagcaacagtgctcaaagagctatgtcgacaggcacatggaatccttgagtcagtccaaaagttnccgtcgtcggcacaactcctggtcatctagtagcaggcacccnaaatcaggcaactcccaagaaaagtggtttaaagaatggccagatgaagaataaagatgacgagtgcttcggggatgatattgaggagatcccagacacagattntgatttngaagggaacctggctctttntgacaaggcagctgtgtttgaggagattgatacctatgaaaggagaagtggtacccgttcccggggcatcccaaatgaaaggcccactcggtaccgccatgatgagaacatcttggagtccgagcccattgtctatcgacggatcatagtgccccacaacgtgagcaaggagttctgcacggactctggcctggttgtcccaagtatttcctatgagctgcattgttatcccactgcactctgcttagagggttcctgcgcaggcaggactctgctgtcccctgctgctcctgataacaaacgccttaaggatatgaagcttcatggaccttgttaaagttttttctcttttgggtttgtttcttctgtgagagaacagaacttacttaaaactgacctgtcacttgctcttagccagggaagtctttcccactgggttccgggctgggtggcaggctgagcgtgcagcaactccaggcatctctaccctcagccccctgcacggccaggtgggcctttgtttacagccgtaggcagctctcaagactgtgtttcaggtttacagccactgggcctgggcacacacattgaagagtgggccaggtcctgtctgggggcctgtacctgctctatttcagagcttgtggctttgtgtctcccctgctttccccacgcagacagcccttcctctgtagaaccagctgcacggcagctgtccaccagagggcagacctgcactctccattcatgtccagggctgtgacagaccaggccttcccctagccccacaagttgatttggggggttttgacccttactcctgagctgatccaagttttatgctgatttttccaaggatctctccctccttttccctccatcactcagaggtagggaagggggcggcattaggatggtgttactgtattgggattttatgttgttctgtcgtcttcagcacaggtagtataaggttatattactgtagaaccacagtgcccatcttgccagcagtgcccgcccccaccctcaaagctgagcaggttgagcctttgcctagtctggggccagacccctcagatggggatatccctgggggagcctggtgctgaaccagaagaggcttcctggtgcttctgtcctaggccaccactcctccagccctttgcccgcacatacatgccccacctactctttcatcccctctgcccttcccctgaaacggtcctttgcagctgtcatcccagagcaggcagatgggctcccgtgcttgagctccaccccagctcttacatcatctgggctttgaaccttttacatttgtccagtctagatgagtaggcttggggccagcaccctgtctcaaagatggcaaaatgaggctagttctggatgagctagctggtgtgggttccaaccataggaacacactgatgctcaaatcctaaggtgccaagctctaggccctggaggctggtagaacaggatctatgcctggaatcctggcagggattcctgtcaaggacttgtgtttaagcctgcttcagggcttcaggctgcttctgctctgtgtctgcccaggctggctgagcgggtggatgggtggacagaagggctcaccaaggattgtggacatagggtaggccctggtaccacgggtttcaggctgttatcacttcccttgtaggaacatagccagaagcagatgagccagggtagagggctggcccctcctctcatcttcccttcagtcttaaattgtctccagcgatgggaagaggccagggactgtaacccttgtgctgtgtattctctgagcctctgctcactctcagggccaagcagctcccaagccggggccctctcttggccaaaatctgaggagcagtctaggttacaggctttttggtaggtaggttctggctgcctgttaatgcagttaggccccctgattaggtacagtgagaaacaagctagaacaaccctggcccagaagactgtccactccagcaagatccagggatgatagccttgcagggccactgggagtttgtgcccaagcttctccctcttctctccccagggggcactgggactggtccctgccctcatccttagcctgggccttccccagaggtattaaagagaagtatgattcctctgtcttcagttcttttcaggggcatcctgcccatagtacccagttcccaaggggcccccagtcacgtggtgaagcctagcactcatgcagctcttagggaaccaaaaaccagcactgaaataaagctgaatgactgactga

SEQ ID NO: 543512 - DNA, 3489 bp, Homo sapiens
  misc_feature (620)..(620): n is a, c, g, or t
  misc_feature (663)..(663): n is a, c, g, or t
  misc_feature (768)..(768): n is a, c, g, or t
  misc_feature (775)..(775): n is a, c, g, or t
  misc_feature (795)..(795): n is a, c, g, or t
ggggaagcgggtgcttttcatctgagcctgcaagaggggggtccaggcatcgaggcgtggggagtcgtgggtatgagccccgtagtccatgccaagaggccacagtgacataatggtctcacgtgtgaaacatggctacagattggctgggaagtattgtagtccagtcaattgtggagatagcttgggtgtcatatcagggcaagagtgtcagctgtggatcaggtcagccagaccatctctcgtctcacccgggcttttcgcataatgtgatgtgatagtgtcttgtaccagaagtcaccttctaggggcaggtgacattacggagttaacaagattctgtgatgataccaggcacctggagacaaccaaggttttggaggaccttcatcagacagaattaggccccgtctggtgctggctgccaagtgggcatcaatcagaattggcacaggcaaagtttgtcaaggaagccagcctcttccagcagtgccccctcagaatatccctaagaggacagatgtgaagagccaggatgttgccgtttccccgcagcagcaacagtgctcaaagagctatgtcgacaggcacatggaatccttgagtcagtccaaaagttnccgtcgtcggcacaactcctggtcatctagtagcaggcacccnaaatcaggcaactcccaagaaaagtggtttaaagaatggccagatgaagaataaagatgacgagtgcttcggggatgatattgaggagatcccagacacagattntgatttngaagggaacctggctctttntgacaaggcagctgtgtttgaggagattgatacctatgaaaggagaagtggtacccgttcccggggcatcccaaatgaaaggcccactcggtaccgccatgatgagaacatcttggagtccgagcccattgtctatcgacggatcatagtgccccacaacgtgagcaaggagttctgcacggactctggcctggttgtcccaagtatttcctatgagctgcataaaaagctgttgtccgtggctgagaagcatgggctgacccttgagcggagactggagatgacaggtgtgtgtgccagtcagatggcactgaccctcctcggaggacctaacaggttgaatcccaaaaatgttcaccagaggcctacagtggctctactgtgtggacctcatgtgaagggggctcagggtatcagctgtggaaggcacctagccaaccatgatgtccaggtcatccttttcctgcccaattttgtcaagatgttggaatctatcaccaatgagctgtcgctcttcagcaagacccaaggccaacaagtgtctagcctcaaagatctgcccactagccctgtggacctggtcatcaactgcctggattgccctgagaacgtcttcctgcgcgatcaaccctggtacaaggcagctgtggcctgggccaaccagaaccgggcaccagtactcagcatagaccctcctgtgcatgaagtcgaacagggcattgatgccaaatggtcactggcactgggcctgcctctgccactgggggagcacgcaggccgtatctatttgtgcgacattggcattccccagcaggtcttccaggaggtgggcatcaactaccactcgccctttggctgcaagtttgttatcccactgcactctgcttagagggttcctgcgcaggcaggactctgctgtcccctgctgctcctgataacaaacgccttaaggatatgaagcttcatggaccttgttaaagttttttctcttttgggtttgtttcttctgtgagagaacagaacttacttaaaactgacctgtcacttgctcttagccagggaagtctttcccactgggttccgggctgggtggcaggctgagcgtgcagcaactccaggcatctctaccctcagccccctgcacggccaggtgggcctttgtttacagccgtaggcagctctcaagactgtgtttcaggtttacagccactgggcctgggcacacacattgaagagtgggccaggtcctgtctgggggcctgtacctgctctatttcagagcttgtggctttgtgtctcccctgctttccccacgcagacagcccttcctctgtagaaccagctgcacggcagctgtccaccagagggcagacctgcactctccattcatgtccagggctgtgacagaccaggccttcccctagccccacaagttgatttggggggttttgacccttactcctgagctgatccaagttttatgctgatttttccaaggatctctccctccttttccctccatcactcagaggtagggaagggggcggcattaggatggtgttactgtattgggattttatgttgttctgtcgtcttcagcacaggtagtataaggttatattactgtagaaccacagtgcccatcttgccagcagtgcccgcccccaccctcaaagctgagcaggttgagcctttgcctagtctggggccagacccctcagatggggatatccctgggggagcctggtgctgaaccagaagaggcttcctggtgcttctgtcctaggccaccactcctccagccctttgcccgcacatacatgccccacctactctttcatcccctctgcccttcccctgaaacggtcctttgcagctgtcatcccagagcaggcagatgggctcccgtgcttgagctccaccccagctcttacatcatctgggctttgaaccttttacatttgtccagtctagatgagtaggcttggggccagcaccctgtctcaaagatggcaaaatgaggctagttctggatgagctagctggtgtgggttccaaccataggaacacactgatgctcaaatcctaaggtgccaagctctaggccctggaggctggtagaacaggatctatgcctggaatcctggcagggattcctgtcaaggacttgtgtttaagcctgcttcagggcttcaggctgcttctgctctgtgtctgcccaggctggctgagcgggtggatgggtggacagaagggctcaccaaggattgtggacatagggtaggccctggtaccacgggtttcaggctgttatcacttcccttgtaggaacatagccagaagcagatgagccagggtagagggctggcccctcctctcatcttcccttcagtcttaaattgtctccagcgatgggaagaggccagggactgtaacccttgtgctgtgtattctctgagcctctgctcactctcagggccaagcagctcccagcgggcctctctgcgcaaaattgagcgccgcacgtacagcctcgcaagaggcgggcggaggactagggccggtagtcggccaacacacaccggcaacagccccgccccgggtgcctcgccgggtggcactccttcccggggcgagcccccccgcccaaaaatacgctggcgacacgcctacctcaataaggccccaacttcg

SEQ ID NO: 543513 - DNA, 972 bp, Homo sapiens
tcgcgagcggccgccctattttttttatttttggaggtttggcggctattttatttacaatttatacttttaacacaatgaaataaacactgatatactgaagcctagtaatagtagtgtaccaatatccctcatttggatgattactttatttaaaacaacaaacctaccctgaaaaattatgccgataaaatctctgggtcataatataagaaatacaatatataattggaacaatatgatggcttaaattttgaaattggaagtgacctctttgggacagactcagagtaacataatctgaagggaggggagctctgacccaaatgatatctttcaggttaacagaagaaaaaagaagcatagttaatctgcaaggagaacgggcagttggcttctcaggtagaatatattcccagttgtcctcaggcttggcagcagaatcatcatcaccgagcatgaagatctgtgccttgtgaagctgccccgcccatcttttctgcctccaaaattatccttcgaaaacacttccacagcagtctgatttcttgagcagaagattccaaaaaagctgctttccaagattctgccaaaagttttcccctttcttcaaaatgatcacccttccatatgcggtcttttctaattcccacgcagcataataggtttttgtactttcccccaccagaatccacagtttgcccggtttacttcatcccttcacaccttttggtggtcgttcccgaattcccagaaattttcctaaaaatatggcttgtttcgcgacagagaaaatacctggcggcgtgttcacacagcgaggattcgtccgcccggcaccggtaaggttccaacgggtcgcggcccagcgtgtcaagtgtctgggtgatccacgccgcgcacccgcgtgagttgtggtgtccccccacggggcgtttggtgtctgaccctcctcatcctcagaggacacaa

SEQ ID NO: 543514 - DNA, 297 bp, Homo sapiens
ccatgtccgacgctaatatgggatctggagacccagcttcttggagattctaagaggacagtattagactggacaaatggaagtgggcaccagaaagaaatacagggtcaccctagaatggcagaaacctaggtttcccagaggtggaaagtagagaggagacattcaacaagacaagtatatattgcacgcgcctacgtatgtgccaggcacgtgttctagacccccgctcccagaagaagaaaacaaagaaacaagtatagcaggcagcaaatcacaagattctgacgggagagg

SEQ ID NO: 543515 - DNA, 260 bp, Homo sapiens
gagacgaaaagtacatgggagcaagaaaagaagttatcactgttcgcaaatatctaaaccgactttcacgatttcactaaaaactgaacacgtatgctgaacgagtttacgtgcctaaggaagtatttaacagagatcattttcaagtaccactgaaggctctgaaggagccgtgcaaagactaaggatgaaatgcatgttggcgatagaagaagctataaccaactgctggctctgagtatcacatgggcgatggggtg

SEQ ID NO: 543516 - DNA, 746 bp, Homo sapiens
ggaagttctgtacagtttaggcaatagaggcttcaacagataattcgcattgagtgtgaaagtggtctcccaagccctgataaacaacatggcaagcccgtggcagcgccagttggctgagtcggcttaaaggcgcgggttatgagcccgtgaagaaagatcgtgaacacgtgaatgggcgagcgggaccatgatgcaggggttcggtgtgcgcttcaggtgcttgtccagcacaagtgcccaggacgggatctactatgaggtccgagggcaagaacagtacgtgtcgaaacgatgacgtttgcagatgctctttgcccttttgctgtcatcaggtgtggtttgacctctcatcaaggtggccggagttatcagagcccattgacatcaaacgcgctgccatccgggagttgctctccgttgttgaacctcttgccaggaaaggttcctggcacgatatcggggttggccaggaagtgctgcgaaggacacctgtgttcggcccctggtcataaatttagtggagaacagccagaggccttctggggaggatacatcttggcagaaagttggcagtgtatcaataggatgggaaggcacggctcttgatatgcaaacagaagggacccagtacatcaaagacatttaaaggtgggcaaatgcggaaggagtagagttggcgcatggactggaagctgaaaaggggaagtatagggcgatccagtgccatgataaatgggtgtccc

SEQ ID NO: 543517 - DNA, 360 bp, Homo sapiens
acatggagagaccctgatcatctacaaaaaatacaaaacttagctaagtatggtggcgcacacttgaagtcccagctaccgctactcggagaggctgaggcgggaggataagcatgagcccaggagtacaaggccgcagtgagctgtaattgcaaaaatacataccagactgggcaacacgagcgagaccctgtctcaaataaaaacaaatcatccacagagtagccgcagccccccagtgctgaccctgaccctgtagccgcgggctgagaacccaactggtctcctgccctcaccaggaggacgagggaggcctccagcagccaacacctggaggacgttgtgcaaaatccattgcca

SEQ ID NO: 543518 - DNA, 569 bp, Homo sapiens
gggggaaaccgccaacttaaaaaaaatttttaaaaaaaaaaattggaaaagggaaaatttttaaaacttttaaaaaaaattgtaaaaaaaaaaacaaaaaagtttttttaaaaaaataaaacggcgaccaacgttaaaaagggggggatttttggcgcaccttaaaaactttaaaaacacaagaaatttgcaaaaaaaaaatttcccacttttaaggggaattttttttaaaacctgggggggaaaacaacaaaccagggggaaaaacccccctccaaataaaaaaattcctcctcaaaaaaacattaacacataaaaaaagagggggatttttcaaaaattctggggtaaagaggaggggggggaaaaaaaggtatttataggggggcaaaaggggcaaaagggctgcgtttatttctccagggggaaaaaacacgtgggccccggaggactcaaaggggcttttgagggacaaccttggtttcacacaagtaccccccgggaagaccaaattttctaaaaaccccccggggggttacaacggggcgggttttttccaaaaaggggcg

SEQ ID NO: 543519 - DNA, 827 bp, Homo sapiens
  misc_feature (16)..(16): n is a, c, g, or t
  misc_feature (213)..(213): n is a, c, g, or t
aagtgtacgcccgaantatggatgacatctgcggccagggcagtgacactgctgagagaggccaggatggtggaggctgaggaactggcaacagctgcggctgtcaatctggagctcctgatcagctgtggtggggcaggatgctgtgcggcggtcagtggccaggcagctcgagtgcgtgccgcttgggaacccagagaatgggctactganctttttgcagcatcaggcttctgggctcatcttgttcaatacacccattttacttgatgatgggacattgagggctgggagggaagagactgtgcttgtgtcactgctgaggcggagcagatgaggatgcttgccttggtgcctggcgtagcccggtgggtagttctggcagcactccctgggtgaccgtgccctctctccagtcaagcctggaatacagcagcagctacaactcagagactccatcgacccagagacgtctcaacttccttgagcacctcctgcccacggggccggtcctccgtgttggggccaccagatgcctgtcgagggggaacctccgtgaatgtggcagatcggggggggtttgggctctctccgcaacttgcaaatgccagcaccaggatgtccttggtgcccgaaccggaaaaaaccccactcatgcaaccctcgcttgtggcaactcaagcctggaggggacccagagcctcaaggggagggagggtcggggggtaaaattcccagggaacccccaaggggaggggcacaagaaccccggaaggtccatcctggggctcaacagaaggcaagctggtcaaagtcacagggtggac

SEQ ID NO: 543520 - DNA, 398 bp, Homo sapiens
accagaggaaagaggctcaagtgcagtagtaaactgaggagacagggattagaatttaagtggttgaaatctgcaggtaaggccctagagaagagtgaattgtgcagaaaggaggcctccgcgcggaagccgcaaaagggcaaccgaccaaaaaacaggccgcacacgcaaaaggcaacgcaaaccaaaaccgcccaagggccaagaacggaacagacacaaccagaacccaaacaccaccgaggggccacggcacccccaacacccctggccaagccagagtgacgagaccataccacccccaaagaatggagcccaaccctgggcacctgtgagaggaaggggaaggatgtctccaagctcttgcgtatgcgaaattgtccaggacgttttaaaaa

SEQ ID NO: 543521 - DNA, 134 bp, Homo sapiens
  misc_feature (1)..(1): n is a, c, g, or t
  misc_feature (27)..(27): n is a, c, g, or t
nccactctagagtatcccctgccaatnacctccaactgaagacaacaaagagaagaaatctgccaaggatgcatcgctgttgtggtgccagatgaagacagctgggtaccccaatgtcaacattcacaatttca

SEQ ID NO: 543522 - DNA, 473 bp, Homo sapiens
  misc_feature (92)..(93): n is a, c, g, or t
  misc_feature (123)..(123): n is a, c, g, or t
gaaaaacttttccaaaccaaaaggagccccgagacccaagttttccccctgtcccccttccgggattatgttccaaaaaccaggccagcctnncctggctggttaaaagttttttttccaacnacattccctttgattgggaaaacaattggcccccggagaaaaatttcaaaacccccccttcccggtgtggatccgagggtctcttttttcttttaacaaactcccctgtgcaaaagaaggtggaccaggggaacgttctttcctgttcccttatggttagggttttgcccaaccccttcccccaaaaaaaccttttcctttttccgggtaaataaattggaggggcggcaaaccccccctccccgggttttttcgtttgcccaaaaaatttttggagggacccccttttaaatttttccggggcccccacatttaaataaaacccccaacctttcctttggcccctccca

SEQ ID NO: 543523 - DNA, 120 bp, Homo sapiens
tggggaaacagagtttcgctctggtggcccaggctgaagtgcaagggcgccatctcggcacaccgcaacctctccatctccggggtttcaagtgattctccgtgtctcagcatacttgga

SEQ ID NO: 543524 - DNA, 348 bp, Homo sapiens
  misc_feature (66)..(66): n is a, c, g, or t
atatagttttttattcctttccccttctgagtctccatagtccattatatcactctgtataccctntggtatccatagcttagctcccacttacagttgagaacatacagaatttgattttctattccggagttactttacttagaataatggcctccagctccatccaagatgctgcaaaagacattatttcatcttttattttttatggctgagtagtattccatggtgcatatataccacattttctttatccactcattggtctatgggcactttggttgattctgtatctttgcaattgtgaactgtgttaacaataaaaatatatatacgagtgtcttttaa

SEQ ID NO: 543525 - DNA, 297 bp, Homo sapiens
cttttggggtctttgctcttttgtggtctttgctctctctctctctctcctgtctctcagagtccagcctgggcgacagagcgagaccccgtctcaaaaaaaaaaaagccccctcttagattatatggaaattcattggggctgaccccttacaaattttttcacaggcctggcatggggcctcatgcctgttttcccagcattttgggaggccaggccaggtggtttgcttgagctcaggatttcaagaccggctggcagcctgggcaacatagcaaagaccccaaaggggtcccg

SEQ ID NO: 543526 - DNA, 121 bp, Homo sapiens
ccccgccagttaccacagctctagatctctgattttgaagaataaccagaaatatacgccatattatcctacaatctattatagtcattcttgttcagctgtctatcttattggactacag

SEQ ID NO: 543527 - DNA, 523 bp, Homo sapiens
gcatttcttgtttgccctttttctgtgtgctgggattttaacccccagcctctctttcaaatcatgataatttgcatttattacacacgtactatgttccaggcactgggtaaattgctttctattgttcatttcatttaatcctcaaagccagcctatgcagtagatactagtgatccatattggatggatgaggtatggatggattagaaaggtttatgtagcttacccaatgtggcacaacttgtaatggcagggtcagacttagaaactaaatctctccaatactagcttttgattttatttttaccctactcacccctgatattcgtcccctggccttttctgcttacctggcttggagcaagtcctcatctgccaaagactatgtaggtggttggaaggagtgctctgtcctcacctctttctcctatggcacctgcaggcagagacctgctgtgtgtgctatataactcttctgagctctctgattctgaatcgactgcttgggattacaaggagg

SEQ ID NO: 543528 - DNA, 1064 bp, Homo sapiens
aatatcgtcgacccacgcagtcgccagtacctgggattacaggtgctttttaccacactcggcgaattttttgtgtttttagtagagacggggtttcaccatgttagccagcatggtctcgatctcctaaacttcgtgatccgcccgcctcagcctcccaaagtgctggattacaggtgtgagccacctcgcctgccctctttttcatatttttttactatttcacgattacaaaataattcatttataaagctcactactcagcctgaaattggcgacctgcatcatacacagtgcttcgcacataactcaatagactctccgtggcctccaccaacacgtttgttgaacgcttcacttcgtggtgcacaccatgtgacgaacaaaccccagaaacattcgtcccgctcgacgactatgcacattccgacacagagaacaggatgcgcaacacgcgactggcacacacccaaaaaagcacccgggcggcaccacaccggccccattaagacacacacacctgcaccggaactcacacccacctgacatacggaatcccacgctcacactcgcaccccggacacaaactgtcaaaaactcacactataccagcaatgcccacaaagcacggcgcagagcttacaccatcgtgatacatcacacgcgagaatgggcacgcaacactacgatcacctacactactatacaccgaactccctctactttgaataagcgcccacattactctcacagacagcacgcaccacactcagcagctctcagcagcacataaaccccgtattacataaatcgtcttaattatcctaatccacatccacacttccaacatcccctcccatacatacaaaccttacacgagcaccactcacaccattacacacacaacacttctggcagactccaaacccaataacatccttcccacgacctattcatacccaacaacgaagacaccaatgcaatcactaccaaacactacccaacctcataatcaccaacaccactctatcactactatcacaccacttttaaccaccactcac

SEQ ID NO: 543529 - DNA, 161 bp, Homo sapiens
tgtcatgtatgtcccagctactcgggaggctgaggctggaggatcgcttgagtccaggagttctgggctgtagtgcgctatgccgatcgggtgtccgcactaaagttcggcatcaaatatggtgacctcccgggagctgggggaccaccagtgttgcctaa

SEQ ID NO: 543530 - DNA, 196 bp, Homo sapiens
  misc_feature (182)..(182): n is a, c, g, or t
agcggaacagcaaggaacaagacatagaggtggcaggcatggtggatcacttgaggccgggaatggagaccagtctggcaaacatggcaaaacccagtctacactaaaaatacaaaaattagccagacgtgatggcgtatgcctgtaattccagctgttggggaggctgaggcacgagaatngcttgaacccggga

SEQ ID NO: 543531 - DNA, 320 bp, Homo sapiens
ctttctactaaaaaacttgcacatgaatacttagagtggcattattcataagccaaataatgcaaataacccaaatgtctatcgatgggttaatgaataaacaagatatggtatattcatacaatggccacaaaaaggaaagaaatagttacatgctacaacttggatgaaccttgaatatattatactaagtgaaagaagccagacacaaaaggcaacatattataaaattccattcatatgagaactcagagcagggaattctacagacacagaaagtagattagtggttgcttaggactgggagtgtagaaattgaa

SEQ ID NO: 543532 - DNA, 142 bp, Homo sapiens
ctggtcagcagcgttgtaactcccctagcgtacgtccgcacgatacttaactttcccacggtctcttctctcggctcaccgctcggcgccgccctgttggctccctccgcgccgctctcccgggcagacgtgcgcctgggtg

SEQ ID NO: 543533 - DNA, 100 bp, Homo sapiens
agcagcagctccgtgaagacagatagactaatgtgaagatggcgtctgaggggggtgcagatactctgctgaggagggggactactgaatgatgatgata

SEQ ID NO: 543534 - DNA, 384 bp, Homo sapiens
  misc_feature (104)..(104): n is a, c, g, or t
  misc_feature (108)..(109): n is a, c, g, or t
ccaccagtcatacttgttcccacatggaaaaaccatgacatcagtaaaattgggtgggcgtgaataaggaagcaaaactcaattataataacattactattgtncaannttcacatggcacttgcaaccggaggctactttgtctgcctgtctccatactcatgctgtcttatgctcatgttcttcacatctacaattttgctagcatctaaaatatctttcacatttccttcctctgcctccaataactacaaaaataaatcttaaaaaacatttttttttttgagatgatctcactctgccacccaggctggaatgcagtgagccgagattgcgccattgcactttagcctaggcaacaagggtaaaactccatctcaaaaa

SEQ ID NO: 543535 - DNA, 369 bp, Homo sapiens
  misc_feature (93)..(93): n is a, c, g, or t
  misc_feature (98)..(99): n is a, c, g, or t
  misc_feature (138)..(138): n is a, c, g, or t
  misc_feature (152)..(152): n is a, c, g, or t
  misc_feature (154)..(154): n is a, c, g, or t
  misc_feature (158)..(158): n is a, c, g, or t
  misc_feature (166)..(166): n is a, c, g, or t
  misc_feature (176)..(176): n is a, c, g, or t
  misc_feature (180)..(181): n is a, c, g, or t
  misc_feature (205)..(205): n is a, c, g, or t
  misc_feature (219)..(219): n is a, c, g, or t
  misc_feature (222)..(222): n is a, c, g, or t
  misc_feature (229)..(229): n is a, c, g, or t
  misc_feature (233)..(233): n is a, c, g, or t
  misc_feature (236)..(236): n is a, c, g, or t
  misc_feature (250)..(250): n is a, c, g, or t
  misc_feature (283)..(283): n is a, c, g, or t
  misc_feature (285)..(285): n is a, c, g, or t
  misc_feature (335)..(335): n is a, c, g, or t
  misc_feature (354)..(354): n is a, c, g, or t
gggctgacaatctgatcagtgcttgaagctatccagaggcacaactccagcctcgtctttttctttctttatttatttttatttttttgtgtntctgnnctccctccatccttcccagatattagaggccaaaaaaanacttgcattttttntnagtntgaaggtntcctgctaantaanntgagccccgcgtggtgggaatcanatgtacccatccanttntgatgcnctcnccncctctccccaagtnttgggtctgtttgctattttgcatggtgggatntntggcccctcagggacttgagattatttaagtactagttcctaacacgttntggaaaataaaaataactntgggttaaggtttta

SEQ ID NO: 543536 - DNA, 100 bp, Homo sapiens
ttgagcggggtttggggttgtagggatagggcatgatcaaaggggccatttctttctttccttcctcatcttcactgccccctttgagctaggtgggatt

SEQ ID NO: 543537 - DNA, 387 bp, Homo sapiens
tcttaaaagctctggggaccaggaagacggaaatgagctgggaagactgagtgagtgaagtgagtgagtgagtgagtgagtggctggctgtgtgcacacattggttgtctgagagttctgtcagcagctctggttggttactctttagtaggtctttccatcttccaatgttctgagtaactgttcaaacacattacttcatgcttttattttcagcattgtctcctaatttgtatttttcaaagatcggatacttaaaaaaatgatgaatgcttaaaaattaatgttatgaaagggaaggaaaggcagagagtgtaactcggtgcttttctaccatgtgtgggttgggtttgatttctccagtactgtttctgctccccacaaaaa

SEQ ID NO: 543538 - DNA, 325 bp, Homo sapiens
aattgtataccaacatataaattaaaagtgttatgcaatgagaaacaataatggaaacagcataatactacatactatcgcgcggggttgtcggcgtggtgggcgtgcgtgtagagagagagcaagggcgtgtgcgtgagtgggcgtaaagagtgagcgtgggagggtgtggtcggtggaggtgtgtggagaggtgagtgtgcgagaggggcgagtgtatgtgtgataagtatagcgcgcaagaggcgaggacaaaatatatatatatatagatataatagatatgagagaacactaaacaataaccactactcacatagaatat

SEQ ID NO: 543539 - DNA, 394 bp, Homo sapiens
tgaatgctacttacataaaagaagactttcataaaataatcactgcacaaaatgttaaagggtggggttatgctgtaagatattatttattcctcaattaatgtttttctatgactgtgctagaactcattacagtatcacggtaaatttgttttcaaaatgccgaattgtgaaactaattgctgggttcacgtttctatgaatatctttcatagtttctctgtcgttgcagtttgtaagtttccttgtgatgacacattctatcattaaagaagagccaggttatccctgttttcaatgcgatccgtaataaccatgtgctcattaatcagattggactgatgcaaataggttccagccttgttgttcgtaagtatctccagtaggtatctgg

SEQ ID NO: 543540 - DNA, 349 bp, Homo sapiens
ataaatgggaaagaatgagtgtggaagtgtcttcacttgcctaacaagaaaggttatatgtggctgggcgccgtggctaacgcctgtagtcccagcattttgggaggctgaggtgggcatatcatctgaggtcgggagttcaagaatagcctgaccaacatggagaaaccccgtctctactaaaaataccaaattagccagtcatagtggcacatgcctgtaatcccagctacttggaaggctgaggcaggagaattgcttgaacccaggaggtggaggttgtggtgagccaagatcgcgccattgcactccatcctgggcaacaagagcgaaactccgtctccacaaa

SEQ ID NO: 543541 - DNA, 106 bp, Homo sapiens
cgtgtacgaggcagtatagctgtttctgattgtaacggacggcagtatcagctgttcctgattgtacacgccggcgagtcataactgatgcctgattgtcaccggc

SEQ ID NO: 543542 - DNA, 590 bp, Homo sapiens
cccttcaactgcctgctatgatggataagattgagagagtgaggagaagtcaatgtggagaaagaaattgggaagggtgctgggctgcttcaagttgaagtataaggctgattgcagaaggagggagcaggtgagctcctggtaccgacactgggcaagtggatcccactatccctgtgtgtctctcctgtaagaggagtgattgcttcagctcacaccagcagtatgtatgcaagcactcaatcattcatccttcaacacatgtattgagcaccttctgtgcgctggactctggggaagaaaaatcaacccagtcccctggtccttgagaagtttgggttctggtggtcaaggcagaaagggaacagatagaaaatgttcctgtgggagacctgcacacatgagaggggaggaaggggagtaggcagagatgcacacaggagggccacttagtagagctgttcacaggctgggctgtccgcctcacacagcatgttggcggatctcgcagagcacttgataccaagttccaatggagtggaagccgaggtcccctccacagggagaaatcaggtcctctggggcccaga

SEQ ID NO: 543543 - DNA, 121 bp, Homo sapiens
ctgacacatagatggtgtctaagttgcttaaatctgcatggcccatgaccccatctcccagtgctctctgatctcatctggacgccgtggaccagcggctcctgagtagtctggccacctg

SEQ ID NO: 543544 - DNA, 449 bp, Homo sapiens
ccaaggggggtccttttttgggcccctggtggggagaggcattttttccagcccggtggggggatggggccgactttttctttttggcctccgggccccgccttttttttggggctcaaccccccacccggttggaggggtgggcccttcctttttacccccgggggggggggccctaaagggggggggggggtttttctcccccggggggttgcccccattgtttcaggggttttttccgggggggggcccttcttttgttggggattttgggggacatgtcttttggggtccaacccgggtttgttttgcccgggggggggggtttttttttggggttaaaaatgccccggggggggggttttcccattttgggttttttgggggggggtcggggggggggggggtcggttttcctcttttgggtcttttaacttttgcccccctta

SEQ ID NO: 543545 - DNA, 336 bp, Homo sapiens
  misc_feature (327)..(327): n is a, c, g, or t
ccatggaaatgaaagaatgaccttttctgtcctatcaaaagtatgaaaataggggctgggtatggtggctcatgccctgtaatccctagcactttgggaggctgaggtgggtggatcagctgaggtcaggagttcgagaccagcctggccaacatggtgaaacctcgtctctactaaaaaaaatacaaaaattacgcaggcatggaggtgtgtgcctgtagtcccagctacgtgggaggctgaggcaggagagtcagttgaacccaggaggtggaggttgcagtgagccaagatcgcgccattgcactccagccttggtgacagagncggtccgtc

SEQ ID NO: 543546 - DNA, 548 bp, Homo sapiens
acagcataaactattcaaaagatcaatacacccaggagttggctttttgaaaaaaattaatagatagactgctagctagactaataaaagaagtgagaagatacaaataaacacaatgagaaatgacaaagacaatgttactactgatcccacagatataaaaataccatcacagactactacgaacacctctatgcacacaaactagaaaatctagaagaaatgaataaaagaagagctagtaccatctgtactgaaactattccaaaaaaactgaggaggagggactcctccttaactcattctatgaggtgagcatcatcctgataccaaaacctggcagagacacacacacacacacacacacacacacacacacacacacacacacacacacagagaaaacttgagccaatatttttgataaacatagacgcaaaaattcttaacaaaataacaagcgagccatatccagcagcacaacaaagagtgatttccctacagacaagcaggctttattccctgggatgcaagtttgtttcaacaca

SEQ ID NO: 543547 - DNA, 327 bp, Homo sapiens
cacttagggccacagatatccaggcttgaggatggggctttgccaggaaactgccctcttctacccagtatttccctggttcctgtcctatcagtgtacaactaccccattttctttatccatttatctgtttgttgttggagacctaggttaatcccatatcttggatattgcgaatagcactgcaacaaacgcatggtgtagatgtctctctaatatactgatttcgtttcctttggataaatgccaagtagtggggttgctggattgtatggtagttctatttgtggtttttctagggagttgcatatgggtgttcaattcgtc

SEQ ID NO: 543548 - DNA, 461 bp, Homo sapiens
tggacaccttctctgcccgacaacacaattcttcttggtcgcccgggtgcgacaacccgcctttctctggaacaccccgtcctgccgtggggttctatacccagctgcctcatccctggagtattagggccgagaaaattgttggggacacatgtacccgggcgcccggcctattccttcccccccccatggccctgtgcaaatcttggccgcgattttggggatcagtccaagacacctcgtggtctatctgtccatcccccggcgtgattttccccgcacttggatagatccggaggcgatcttcttagccacgggtttcccccgcccgttttccccgacccatttccttttttccccccccccgcgggcgggttcctttttcgccccttttcctccccccctttttttccaggccatccaaaaaaggcaccgggttttggggccccaaaaaaaaaaaa

SEQ ID NO: 543549 - DNA, 507 bp, Homo sapiens
  misc_feature (193)..(193): n is a, c, g, or t
  misc_feature (198)..(198): n is a, c, g, or t
  misc_feature (208)..(208): n is a, c, g, or t
  misc_feature (215)..(215): n is a, c, g, or t
  misc_feature (219)..(219): n is a, c, g, or t
  misc_feature (240)..(240): n is a, c, g, or t
  misc_feature (247)..(247): n is a, c, g, or t
  misc_feature (254)..(254): n is a, c, g, or t
  misc_feature (279)..(279): n is a, c, g, or t
  misc_feature (286)..(286): n is a, c, g, or t
  misc_feature (476)..(476): n is a, c, g, or t
gaaatatatttgccaaattgtaagaataattttaatgcaaacacttgtgtggctgccacctattcaagaaacagaatcatgccaatctacatgtgcctcctctgtccagtttaggtcccaacggagtctaaactagaaatattttctagaagctcaagtggaatattgactttctctcggctcttcaaatcanatacncactctaaantgtttanactngcgctagagctcttgtataanggggtcntcattgnctaaaaatcacaacaatgtattctnccctgantggcaagagttcaaagacttattgaaaatttaactccctttagaagtagtctttgggagcaaatcattgagagaccatggaaaaatctgggtaaagtacatgtatagaagtattttaaaggaattcattacaggccaatggtgtaccaatttcagattattagggcagctattgagcatagtattaggantctccagagaaacagaagcccataggggggt

SEQ ID NO: 543550 - DNA, 141 bp, Homo sapiens
tacaggacctcttcataggtagctttttctatcgcggtggatgtaactttcatggcatcttccttggaagtccctttcagctcattccaggcatcccacttggccttgccattgcatatcgcaaggccttgcaatatgcaa

SEQ ID NO: 543551 - DNA, 732 bp, Homo sapiens
atgtcgataccaagaagcagaagaccgacgaggatgactagacagcaaaaaaggaacagttaaactaaaaaaaaaaaggcgcggactattcacctccattcccgtctcagaatttaaacgtggtccacctttccggaagttaaagaggcccgcccgcccaccgtggcagtgccacccgcagatgacacgcgctctccaccaccaagccaaagcatgagaatttgcaacaggggaggaaaaaagaaccaaaattccaaggccctgtttttttctcttaaaagtactttaacaaaggaaattgttgtattcttatatttacattttatattcttgtacatatgttagggtcagccatttttaatgatctcggatgaccaaaccagccttccggagcgttctctgtcctacttctgactttacttgtggtggtgaccatgttcattataatctcaaaggagaaaaaaaaccttgtaaaaaaaagcaaaaatgacaacagaaaaacaatcttattcccgagcattccagtaactttttgtggtatgtacttagtgtactataagtagctggtttgtatgagatggttaaaaaggcaaagataaaaggttcttttaatttacccttttgtgtctatgaaggtagctgtcaaatatattttgcctgtttgatgtctgtgtgcacccatgttgtccaccaataaaccaggaattaattttgctgagttgttctaaccac

SEQ ID NO: 543552 - DNA, 755 bp, Homo sapiens
cgaaatctaccagctacctccctcagccacagacccataagaataaaaaattatatagaaatcctgagaaccagaatgaatgagaaatctgtgcgcttacattcattgccccataatcctaggtctatccggcggagtactgatcattctatttcccccctctattgatctcccactctaatatatctcaatcatatcaacccgattaatcactctacccaagcaatgactaaatcatagactaacgctcaaagaatctaatatgtataatcgcgatactaccaactacataaatggtatcgaacgcatgagtctctttactcctagatattcctgtagagtcgatttgttattgcgcatgaacttaactctctctcggtactccgtgcctcacttcatttaacagcaaacacccaagctatctataaaccctaggccatggaccatccccttatgagcgggcgcagtgagttagtaggctttcggtctagagattgaaaagatgccctaggcccacttcttaccacaaggtacagcctacatccccttatccccatgactagttattatcgaaagcatcagtgctactcagttcaaccaagtagccctgggcgtacgcctaagcgctaacattactgaggccacctactcatgcacctaattggaagcgccagcctagcaatatcaaccagttaagcttccctctacacttatcatcttcacaattctaattctactgactatctagaatcgtg

SEQ ID NO: 543553 - DNA, 1155 bp, Homo sapiens
aaagatggagtgcagcggagcacagaggcggaatgctgcatgcccgtagaggtcctggctgaggtggcatggccatcttggcaacctgtaggcctgcaggcaggaggcagaactgccagccaagatcctggttgagcttctgtggtggactctcagaagaaagacaagctgctctgcagccagccttcaggctagcggactttcctgcacgaacatcctggcctcagcgaggaccactgctaagggtctcgacccccttggccttctgcacacgcacacgcagccgacagaaggcaactcgcagcctaacggacacaaccggacacagcagcagaaggccaccgtacagggcagcacgctacagcgcccactcacaaaacttggccctcaccccaagggccctgcactcagcatgcgccggacagcccacgaggcaacaccggcacaccacacctcccggcgcacagcccctcctgcagccagcctccagcgcccaacgaacaccaacactggcccactggccgcacacaccgcacgcacgccagctccaccacacccacgtgcgcaagctaccacaccacgcgcagacacgcactcctgcagcgccctcctgggccgcagcggttcccctgccaacaccgctcgcggggcaccgcggtcaacgaacgagggggacctccacgccacgggccgccctcggcaccgcgcggctgcgcccccccgcaacaccctccggcgcaccaccccctggacacgccacgccacgggccaccaacccacgggcacccgcgcgcacccccgcctgccaccaacgcgtcactcagcaacccatatccctaccccacgcctatacaggcaactaaccacctgccaccaggctcaaagcccggcatggccaacccctggcaaggccctgaaccgccagggagaggcaacaacgcacccctcctccccaacaaacgcgcgctccacccccccaacgccaacagccgggaacactccgcatcccccagacggacgccgccgaacagccaccacggccgcaccaccccacggtcgccacacgacgccacccccagacgcgagcgctgcaccatcaccaccgagcacaagcatccgcgcacacacaccgcacgagcaggagcacaacagccc

SEQ ID NO: 543554 - DNA, 1262 bp, Homo sapiens
agtgagactaatgtttcatatgcagtgacaaaagaaaacgtgggtgaagaacatgccagtatttgtactctgcagaagatcagtctagcattaaattatcttcatgagcagaggtgataatttatcagagatttgaaactggacaatgtattactggactctgaaggccacattaaactcactgactacggcatgtgtacaggaaggcattacggccaggagatacaaccaggactttctgtgagtactcctaattacattgctcctgaaattttcaagaggagaagattatggtttcagtgttgactggtgggctcttggcagtgctcatgtatgagatgatggcaggcaaggtctccatttgatattgatatgggagctccgatacaccctgacacagaacacagaggattatctcattccaagttattataggaaaaaacaaattcgtcataccacgtgctctgatctgtaaaaagctgcacagtgtactgacagagtattcttaataaggaccctaaggaacgattgggttgtcatacctcaaacaggatttgctagatattcagggacaacccgttcttccgcaaatgtagatatgagatactgattggaagacaaaaaacaggatggatacatcacatttaagacccacacatatttcatgtggaaattagagaaatagagacaaatttgaaacactcacgtatacttactggaccctgtacaagactacacgtcccagcgacagtgaccgcatgaacattggtgtaaaagacaaagccactgtgacaccaaggagcatgacacaatatgtgaaaggaacagaagatatatatcgcagtcctctcttaagaagttatggcgaaagaagtgtgttcgtgatcaccaatattatagacaatagtaatactacacaagatgccaacatagtacaatacaatacaagggagagagagaccgggtaaagacaaacaagtagaagagttgggccgagttcagtacggtcagatgcaattaggcactagagagcaaacataccgaacgcaatacgggtaggaaacagaagcacgaacaggaagagagagggacaggaaaagagagagccgaggatgcgaagagtagacggagaacagaggaggaaaagagagcgcgtgacaagagcacataggatcgagcgaggagcagggacgtagacgaagtatagagaaagacaaagaaagaaccagagaaggggacagaaaaacaatgaaataggacgg

SEQ ID NO: 543555 - DNA, 864 bp, Homo sapiens
ggacttgcctctagactcctccagcatggagcctcttgcagtttacccgcttaaaatgttccgggcccactagccaaggtatccgcaggtttgcatgtctatagttctatgcacagtaacgctatttcttctacaattaaaatgcctcaaagcctaaattcaagagtttgtagtgcactttgaagtgaaggatgcagatagggaagaactgtttctctggaaaagtatccatggcataacgttgtcactagtgtgtaatacgtgggcagtgattgccaattcagagacagaaattacttagggctgaaggaactgcacaaagagttgggaccatgccgacttccagcgtgttcggtcttgtgcctctgcaattcagttcggagaatcggagacgcaggacacgagcgaaggaggtagaatctttggcgagaaaaaactacggggtgagctttcgccatcttccacaagatttaggattcctaggatctgagaggagaagctgcatttagattgtcttgttgatgtcttcaaagatggaagcaagcgtggaatttttggcagtatctgtgtcaatcctggacggtcaagttgtgaagttgtggtatgcaagaggaggcccattgaatgtccatcagggcttgtacatagcaagctgtggtttagacaagttgatcatttaccataataagggggatttgattgagacttgcaatgggtttgtaataataccgagagaaatgtctccaggaggctcgggtgcatctaacaattttgtggggaaggtgttcatctggaccaggtgggtgacttggtttcagtatggcacttggctttaacgtatttgggagaggctttaaggctcgc

SEQ ID NO: 543556 - DNA, 123 bp, Homo sapiens
tgaagcaggtgaaaacctgtctacaaaaaatacaaaaatacagctagggctgggcacagaggttcatcccggtaatcccagcactaaggaaggccgaggtgggcggactgcttaatcccagga

SEQ ID NO: 543557 - DNA, 359 bp, Homo sapiens
  misc_feature (185)..(185): n is a, c, g, or t
  misc_feature (193)..(193): n is a, c, g, or t
  misc_feature (258)..(258): n is a, c, g, or t
  misc_feature (304)..(305): n is a, c, g, or t
aaggcaaacgtggtacatcatgacaccatgggaatgactcatgccagccataaaaagaatgagaattctgtccagaattggttccttccggtgggttcttggtctcgctgacttcaaaaatgaaagccatgaaccctcgtggtgagtgttaacagttccttcaaagatggtgtgtccggagtttnttcccttncagaatgttccaaatgttatcccaagtttcttcccttctggtgggttcgtggtcttgcctgattntcaggagtgggagccgcagaacctttgcctgtgaagtgttaacagnntctttaaaaggtgggtggcatctgggagtttgttccatttcctccccagtgggg

SEQ ID NO: 543558 - DNA, 901 bp, Homo sapiens
ggctgttacggcccggattttaggcatctctggtgcagctggggtggaatctaggccaggccactgcttaaggcccacatccttggcggtcaggacaattttgagaggataatggcccttctgccccaaggttgtcctcgaccagtcccgtgccatggcagcccacctgactatacccatctgcgccctcttcctgaccttactcgatatggccacaaggcaatttagagggccccgttgactacaccaagccgtgaccttcaaccatctgtctggaatgcaaacacctagtggtgctctggagagtgcaacggatgtggacagtggaatgtcagatgtcttcgattgtggtaagcgcaaaccagaggacaagaacttaccagcaggacccgtgacaattgacagcatgagtcatagtcagcattcccaagactggggcacactaaacaccgtacgtacgaacggccgcgactgagagggaagacactgtgttaagggtggatacattgcacacaaagagaatgaccacgcacatgaatatgcacacaaagcagtgagaaaccagaagaggattacacaagggggcagcaaagtcaccttggggtcgtaggcacgacataagcccatgggcggaccccaggaaagccagaatcatacaaaggggacgtagaggacgaaggacgaatacgggaaacaaggggagcaagagacgaatagaagaagaacccaaagaggacgagggggaacaccaaccaaacactgggagaaaacaaccagcgaggggaagaaggatgaagaccagaggaaggaggaacatccagaggagggcaacagagggaaaccagggacaacagacaagccccgagaaataagggcagcagagcatccaaaccagagaagg

SEQ ID NO: 543559 - DNA, 1120 bp, Homo sapiens
agagaaggtgaggcaatgggccaatcccatatccatgaccttccagatgacacaccaacaaccttctcgatcataaagagagataggaatgggatcaatcatgatccatagagatcagaaaatatatacatcaacaccataggtagcgtccgtacctggtcctgacccagtgtgctgagctgggctacttctaactgacggacgctggagacagtggaggtgacgagtaggcgtgaaccgtgtaggtagtcgaagccctctctcgtcattcatcgcaagcatcatgtgtatgttcatatgtccaaggaatatgcagtagaaaggaacgaaagactttacataattgattatccagagcccatcaagaagccagtccgtatggacatgatcgccgtatcagcgcactcgcagtgaccatcgtgacacattccatcaacatcaacatgtcatcgaggtaaacgtgggagtcatgagagagagattacgaagatgggacggaaaagtaagagagtcacatggaaagatgggattgattcaaggtggactatggatgaggaatgacaagatgggtcatatcagggcaattcatacacaccgagaattttaattatgatacggtctgatatcagaaaaggcgtgggtaaggagcataacatgacgatcatcatcctcgtcgtgccagaggtgagacaccatttgattttccctgaagggatccctccgaccttggaggtcctgacacattcttgatagatatatcatggtgaaacgaccgctgggctgtcccctgttgaagagcatcccttggatgtgttgcctagagaatggtagcacccatagtaagcctccagaagcaccaggatagcccgataacacatgcataaaggggttcaagggggcccatgggagcgcccgcacaaggcattgggttgaaggggaaaccccatatccccaagtaaggggtctgtcaccaaacagcccacaactcccatggggggccaagagataacctggggacaaccgtagtgggtcggataaacaagactgggaatacaaaataaagtaaaacaacaataccaaaaacttagaacctgatggaacagacgcagggtacaaaggg

SEQ ID NO: 543560 - DNA, 639 bp, Homo sapiens
aaagaactttttaaatgttttttgtttatactttattttcttgccacaatttagaattttttattcaaatgggtggaaattaaccttcctcttttgccaccccatttttatttcttaaagccggggggggcttgaaaccattttttcccacaaaaagggggggggaaaaagggctccaaaatgccacaaaggggttttaaaaaaacccccggggttaaaaaacaaaattccccgcaccaaacaggggggggggtcctgggaaaaaaaaaaaaaaactccccaaaaggtttcccccgcgcaaaaaaggggaatatccggtcccccaaaaaaaaggggcccccccaaaaaaaaaaaaaaaacttcctctaatttggcccgcggggcaaaaaaaaccccccggatttccccgcgaaaaaccccgccaacaccccggggggggcgcttaatttttgcccccccctaaaacccaaaaaaccccgaaatttcccccaaaaaaaaacggcaaacccccccccggggggatacaataaaaacccccgggccttggtttctccccccccccgtagaagaaaacgccccaccttcccctaaaacggcccccaaaaaaaacggcaaacccgggtaccaatgggtcggtac

SEQ ID NO: 543561 - DNA, 132 bp, Homo sapiens
tagctgttctagaggatccctggtagctgtatcgagggtagagggggtagataagggtaaatacgggccctatatcaaagatatttaggggaattaattctaggacgatgggcatgaaactgtggttagcta

SEQ ID NO: 543562 - DNA, 479 bp, Homo sapiens
tgatcacacttcgagctcggcacccatcctttcctctttcacgctcccaggtattatgacagctccctcctgaggtgcacctaaatgctcaatgtgttacaaaaacgttagcatttattgtgtcaccctgtcctctgaacacacggggagttcaaggcccactatacacaaaggtgcacctctttaccattttatttgtaccatgaaaatataggctcaaggccagaggtgactcacaaagacatcattctcttgaggatacacatacacaaacatacacacacacacacacacactggccctgcaactctggggacttttacttacattaacaatggattctcttcatgtgatttagaaaccaaaaacccggggggcgggaaggtgctctccttctaaaattcctcaagccttcatcaagaagaataatggcagtttgatggaatacttcactaggaatgcagccctcaaacaaaccc

SEQ ID NO: 543563 - DNA, 106 bp, Homo sapiens
tggttttcgctacctttgcacggttagggtacgcggcgttaaacatgtgtcacctgggcaggcaggtgccttctaatactggctgatgctagaggtgatgtgttgg

SEQ ID NO: 543564 - DNA, 738 bp, Homo sapiens
cctgttacggcgcattaaattgggactttcgaaaaggagttggtttcagcggtaaaaccgccttgggactcccctgaatataatcgacccggacattatacttccgggtctttggcatgaaacggtcgcccgcccattacacagttgaactagattgacccgagacggtgtgaaatatatttcaaggtgaacaagtttacttacactccgggtgtgctcaaggagggagcaaattcttttttgctcgctctccttctatggggaacacaactgcctcgcccactcatatggcgaggatacgcaatcaagtccttctcgccgcgtctcctagtgtacctcccttgccggatggggactatctccaccagaggttgcaaaaatatcatttccttccgccaaacgtctccttcgcagttgaaaaaatgcacttcggatcgccccacaaggttctcttttgccccacactggcgtacccaaacctcctgggcggtagcctcgcgcgatgcttataatatactccgcgagagctaatggttcttgcgctgataaataagattcacaacaagtcattcttgattcctgtgagagattagaccatagtggacatcaggaacccaaaaaggtattcagaagaattgcatcattcgcgcccgcatcagtcggggcgacgcgtgcccaatgatgactccggacattcggacgcccccgcaatacccgctgcgccccgtccgacatgca

SEQ ID NO: 543565 - DNA, 310 bp, Homo sapiens
  misc_feature (205)..(205): n is a, c, g, or t
  misc_feature (228)..(228): n is a, c, g, or t
  misc_feature (248)..(248): n is a, c, g, or t
  misc_feature (264)..(264): n is a, c, g, or t
tatctctaacattatgcactttaactttcttaatttgacaaagcattcaagaaacatctgcagactagttttaacagacaaataacacctgtaagcagacatgactgtcctaaatcgtttagttaagctatgaacttttacaacactttacttagtattagacggtaacaggtggagctgagagagtattgcgcacttctccaangctgcccggcagagagccaccanatagtgtggtaggaacttangtggccctttccaagngccacggcttcttttcggcctgcagaatgtcatgcccacagcatct

SEQ ID NO: 543566 - DNA, 104 bp, Homo sapiens
gatagataagctcggcccaattttgcaggaggcacgtgaggctatctggttggcctttttaacaccaacctgtgtgctatccatgccaaacgtgtaacaattat

SEQ ID NO: 543567 - DNA, 346 bp, Homo sapiens
atccagcgccaggagatcgcacacgggaagggcgggtgccaagactgtgatggattcctgagcattcaatacacatgaggactcccaagtccaaactggcccacttaggattctgagtctcacagtccacacagtgggcgttcccacgcatgttatggatagactgcaggaccatggccttgctctggctggacagctgggacgtgcatttactgctctagcatgactgcaggctggccaggatatggctatggatggcttggacccaggcatcccgctcctcatacgtcgtggattcaaagtaccacgtttgtccagtggcagacacaatcataaaaaaaaaaaa

SEQ ID NO: 543568 - DNA, 458 bp, Homo sapiens
  misc_feature (421)..(421): n is a, c, g, or t
ctcggaccggtgttagcttctgaggagagggctctgctgcataaggggcctgagagctgtaggactgagagctggctggcagacacttcagatgcttgtagctcttcctgctggaggaggaggtggtggtgtacttgatggtcggaactgccgccgtccaacagagctgaggccagccccagtgggtctggcgctgctggaactagagccggctccaacgccaagatcactgccagtaggagtagctgcttcctccacctcaggcctaagccactgcctgacaccggtggcaccgccagtagccactggagacggtggactgacactactgagatgtagacttgtccaacgccttcgccatacagcctgcgctcctcgccctccaggagcttgcggtaagtggcgatctccacatccaggnccagcttgacgtgcatcagctcctggtactccttcag

SEQ ID NO: 543569 - DNA, 370 bp, Homo sapiens
  misc_feature (17)..(18): n is a, c, g, or t
  misc_feature (20)..(21): n is a, c, g, or t
  misc_feature (47)..(47): n is a, c, g, or t
  misc_feature (49)..(49): n is a, c, g, or t
  misc_feature (299)..(299): n is a, c, g, or t
tttttttgtgacggagnnannttctcttgtccacgccggagtgcagngncgcaatcttggctcaccgcaacctctgcctgccaggttcaagcgattctcctgcctcagcctcgcgaagtagctgggattacaggcccacaccaccacatccagctaatttttgtatttttagtaagagaggggttttcgccatgttggccaggctggtctcaaactcctgacctcaagtgatctgtgtgccttggcctcccaaagtgctgggattacagatgtgagcacctggcctctgcttttgtacntcataagcacttcaaattctcacatacaacgtgtctccctcaaactttgttatgaggtcagcacgtcgacg

SEQ ID NO: 543570 - DNA, 471 bp, Homo sapiens
  misc_feature (439)..(439): n is a, c, g, or t
cacgagggtccgacacccgcggcatcggtgccgcgcggcgctggatcacggccgagctcaccgcctgcagcaaggccgcgggtggccggctgcaggtggaggagcagagcttcatcgagccggcgggcaaccgcgtgagccagccgaccgagctggtcaacgtggtcgcaaccctgcccgggcggggggccagcaagtcccgcgtgctggtggtcagcggccactacgactcacgcaacagcgacgtgatggattcgctgggcgaagcccccggtgccaacgacgatgcctccggcaccgcggccgtgatggagctggcctgcgtgatggcgcgccggcagttcgacgccacgctggtgttcatggccgtgccgggcgaggagcagggcctgctgggcgcggcgcaatgggcgcgcgaagcccgggcggccggcaccancgtcgaggccatgatcaccaacgacatcatcg

SEQ ID NO: 543571 - DNA, 915 bp, Homo sapiens
cccacgcgtcgcccacgcgtccgcaccagcatatgctgaggaggatgtggagcaacaggagctcccattcactgcaggtgggaatgcaaaatggcacaggcacttcagaagacagcctggcggtttcttacaaagctaaacatactcttaccatatgatcaagcaattgcaaccttgttgatttaccaaaaggagttgaaaacttacgtccacactaaaacctgtacatggatgttttagcagctttactgctaactgcgaaaatttagaatcagctaagatgtccttgtgtaggtgaggggctgaacagatacattctgacaatggaatattatttagtgctaaaaagaaatgctttatgaagccatgaaaagacatggaggaagctgggacgtatattgctaagcaaaggaagcaaatctgaaaatcctatatactgtatgattcccaatatgtaacattctggaaagggcaagactatagaaagaataaaagatcagtggttgccaggggtcagcaggcaggaaggaatgagtgggtggagcacagaggattttcagggcagtggaacaactccatatgacgctgtaaagcaaaatcatgtccttacacatttgttaaaacccaatgactgttcaaggccaagagtgagccctaatgtaactatggactttgggtgacttggccagagtgagccctaatgtaactatggactctggggtgactagccaagagtgagcctaatgtaactatggacttccaggtgactggccaacagggagcctaatgtactatggacttcgggtgactggacaagagtaggccctaatgtaagctatggaactttgggttgatatgaaccaaatgttaagtgttactttcattaacagttaataaaatttcacttgtggtgtg

SEQ ID NO: 543572 - DNA, 415 bp, Homo sapiens
agcgtggacgcggcccgaggtcagtcagtctgctacgggcgtcggtcccgcgaaaactgatcggagacgtatagggtcatcgttcaacggagtcgacgatcccctacctgaaacttgccacggaggacctgcgcgcaatcgccctagagatcccgggacaggaggtgcgctcatgaacgctaggcccgacaccgatggcagaacgatagcccgttatctaggtcagctccggctgcgctgctcgaccagtccgatctattaccggcaggcgctccgaaccttccaggaagtagttatccgggatcagcgcacacccggacagctaggccgagaagtgctcgaaacgtggatgcgcgaatgtgccatgcactggcccatggcgacgctgctgcatcgcgcccggatcggcaatcgg

SEQ ID NO: 543573 - DNA, 516 bp, Homo sapiens
  misc_feature (110)..(110): n is a, c, g, or t
  misc_feature (118)..(118): n is a, c, g, or t
  misc_feature (130)..(130): n is a, c, g, or t
  misc_feature (143)..(143): n is a, c, g, or t
  misc_feature (163)..(163): n is a, c, g, or t
  misc_feature (176)..(176): n is a, c, g, or t
  misc_feature (185)..(185): n is a, c, g, or t
  misc_feature (189)..(189): n is a, c, g, or t
  misc_feature (191)..(191): n is a, c, g, or t
  misc_feature (195)..(195): n is a, c, g, or t
  misc_feature (201)..(201): n is a, c, g, or t
  misc_feature (229)..(229): n is a, c, g, or t
  misc_feature (231)..(231): n is a, c, g, or t
  misc_feature (233)..(233): n is a, c, g, or t
  misc_feature (235)..(235): n is a, c, g, or t
  misc_feature (247)..(247): n is a, c, g, or t
  misc_feature (252)..(252): n is a, c, g, or t
  misc_feature (255)..(255): n is a, c, g, or t
  misc_feature (277)..(277): n is a, c, g, or t
  misc_feature (280)..(280): n is a, c, g, or t
  misc_feature (293)..(293): n is a, c, g, or t
  misc_feature (308)..(308): n is a, c, g, or t
  misc_feature (313)..(313): n is a, c, g, or t
  misc_feature (336)..(336): n is a, c, g, or t
  misc_feature (405)..(405): n is a, c, g, or t
  misc_feature (509)..(509): n is a, c, g, or t
tggatttctggtttatttaaaaatgatttaaaaaacatttttcaaaggctgatcagtttaaaatgtgactgacactgaaatgctgtgatgtcccccaggctgaggggaanctaggctntggggcccccantgctttgcccctntgtctgccctgtcctggggngatggacaaacanatgaccacnggcngnaaantctganattggaagcctctagctgagccctctgncntngncccacatccctnacctntgnagcctgggtgcctgcctccatntcntgttcattctcanctggcctgccagganccaanggggagcctggcgggaggcgggnggtgcctagaagctttcaagaagtgagagcaccaaccctgaaggaagtggacagggaccaggaagttgnggaagggaaggccaaggaagaggtggatacaggagacacttctcatctcatctcagaccctaagaagggtccacagatggggacacaagacccagccagcccantggattg

SEQ ID NO: 543574 - DNA, 399 bp, Homo sapiens
acctagaggatcccggctcatgagtagagaggtagtgaagtcagtaaaaagtttacagtatatataatcagctttgtttaggctgaactttgtttaattgagagtttggtgcaatttataatattgtttcattgattttctttcttattgcatcttatatggactgtcgtaacattctgtgagtatatttggtccatgtcatccatatggggtgtacagtaattacaaaaatgaatttaaagtagggacaggagcttgacatatgtaatcgggtttaatgtaccagaagatccatcagagactgagtagccaaacttgtaacaacctgtatgggtgcatattctgccagactatgaattttcttaagtaatagagaacagaggtctttacagagctggt

SEQ ID NO: 543575 - DNA, 152 bp, Homo sapiens
taaatgccttttttggccaaaggcttagttgtgaaaaaaataatttttaaattaaacattcaaggtagtggccaaatgtaacccctcaatcatggaatgatttttttgctaacacccgcctgtatgtttcaataaatttgtccaaagcccca

SEQ ID NO: 543576 - DNA, 282 bp, Homo sapiens
tcggaccggatagagcggtctcatacatacaactggtcaatagggacatgaaatcatgcctggcatcaccagtcatcagggaaatgtaaatcaaaaccacactgagatatcacctcacacctgttagagtggctattgccaaaaagaaaagagatagcaagggaacccttgggcattttttttttggggaatgtaagtgggtgcagccactatggaaaatagtatggattttcctcaaaaaattaaaatagaactaccctaaggtccagcattagaccgctc

SEQ ID NO: 543577 - DNA, 134 bp, Homo sapiens
ggcacgagggccactcagccaggcgggaagcgctggtgttgcggcgctggcgacagtcggggttgcgagcggtccttattcggtggttaaaaacataccttgaggcgagcagaaaaattaaattttaaccatga

SEQ ID NO: 543578 - DNA, 1303 bp, Homo sapiens
gcccgtgaccagtgttgtgcgagctcgtctactggttctctgcggtactggggatattcgtgaggcttggctggcagctggccagtccgtcctgacttcgctgggaatgtctgcacgggactatcgcgtactatagtagacgcgagaagacggggctaccaacgatgccgaggcgaacgcctcgctggacgtactgtattcggagagcgcaaatgagcatgtacattgtcgacaaaattgcgtgggcttacgcacgcatggggcaactattgccgtcacacctctgtctcacttactctaccatagacgaatgggccgcaacgcaacagaggactcgaccgcatgtatgcgaattgacctattgcttgactgccgtatcggttcggcagtcggcgacaggcagcaacgcaatcgctgactgcggctggaatgaagagtgtatacgcacagctaaaacacgaatgtccgaagcttggagacacctcacttatgcactgaatccacagagctaacccttggcaccttccccccgggcagcagcacaccgttggacctacatcgggcccttccgtgggcttcacacgactggcgttccccttgaacacgagcgggacgacaccacgacttgtcgggagccgccccatccgagctcacacgtagtggggatacgtaagacgtaggcgcctgtgagaccaacactagttgcagagaaccagatgttaccttcccacatgggtaatacatcgcgagcgcacagattacctcacatttgccctcttctggccaggacgggcatacaagggccttcgacccctactacgactggcagaactatatccacggccaaccgcttatgtcgacttgctccctctgccgaatccattggatatcaccgctaatacgcttacgacccctcaaaagatatcgcccttggctcttgaaactttcagccaagcaaactcgtatgccatctagtctcacacactgctcggccacgtccacctgaacacggtctaatagcacggacacaactcccgcatgacctcttacaccttcaccagggcccttgacgccaaccccggccagcccacaaaactgacccacattcagacacagcacgagcgaccgagccccaaacagggagggaaaacaacgccacaaaaaccgacgcgcactccagcgacgcccaagacaccgcacaccaaaccactagaaaccgggacagcacccctgaccccgcccacggcgccccaagcagcacccagcaacatcagacccccacccaaccggaccatccacaaca

SEQ ID NO: 543579 - DNA, 391 bp, Homo sapiens
  misc_feature (192)..(192): n is a, c, g, or t
aaacacacacaccccctgacccccagagaggggggaggtcacttctgtaggccccattcacgcaggagttggaccaatgcctaatgcaaaagccttggcaattttcagggaataggatcgagctagaagctgaaaactaacacagcacccggtccggctacaaacacctacaagttttttttttccaagaanatatcgtacctcaggatctactcttgagctccatgggagacctttattaggctgagatcccaaaagccttgtgtggtttgctctggtggctgttctgtggcttgctgttggggtatttcttacccccttcgagttgaaatttaaatgatttacaaatcaaaggttacttcctcactttcaactcttattcttcttccac

SEQ ID NO: 543580 - DNA, 191 bp, Homo sapiens
atatatctgatggagagtctgcagtttctcctgttcacatctttgtgacggtttatggaactcgagtctttttatggttgaaaaagtttcatcaggctgtagtgcactgactctctgaaaaacacttatggaaatgtttttgtgtagcacattttaggaaatgtaaacttttcatccccaaagtaatagtg

SEQ ID NO: 543581 - DNA, 149 bp, Homo sapiens
gactcatataccagactccttgcagcttgagcattgggtttatgcattcagctctatgcatcatgggtacctgaggtacctgccagagaaatggaaccagaagtaagtcatgggagaagatgactgcattaggaatccgttcttctgtc

SEQ ID NO: 543582 - DNA, 192 bp, Homo sapiens
cttcctaaggaagaatgaatgggccaggcctgaagccaggtcccaactctttatacccaggggaatggataccaagggcccagaaaacgcccccaacttgttggggttcacacgcgtcctgagacatatgggaactgcctctgaatgggccaaagatattccattaaaacgttagaacagagcttagaaata

SEQ ID NO: 543583 - DNA, 206 bp, Homo sapiens
cagtaaaattggtttcactattctgagttccataaatttggcatgtggcttttaggagcatcttgtcagtttccaaacaacaacaacaacaacaacaaaactgtggggaatgtgtataggaattttattgaatttgtacatcaattttaggagtattatcttagcaatattattattattattttttgaaccggcggtgcggcgtg

SEQ ID NO: 543584 - DNA, 124 bp, Homo sapiens
acgcatgcatggtcagtgtggcattgttgctgggatgtagactattctggcggtagtcgggcacgtgctgcaggctgaactggggtcgtagcgggcgctcaatcccatggtgcagcgttccaca

SEQ ID NO: 543585 - DNA, 1720 bp, Homo sapiens
  misc_feature (1066)..(1066): n is a, c, g, or t
  misc_feature (1139)..(1139): n is a, c, g, or t
  misc_feature (1430)..(1430): n is a, c, g, or t
agttgtttggttgtgtgtcatgcttgttgataataggtggcttcattttgtgtgtcgcatggcgggtctcggtgttagggctacgcttcttctagtgaggtcttttttcgcgggatgggcccttggtggttggtccgcgtcgttgtaccctttgttggtgttcggtgttttgtttcaccccggggggtttttgtggatcacccgagcgtgctcttggtgtacgagagtgtggtaggccggtgtgttgtgggcctttctccagtataaatatccgccgggggacatcttttcgcggggagtcttggtggtgttattcccgcgccgcgggtttgagatggggggcgctttcaacaacgcttttatgggggttaagtatgtgcttccataagatcgccgctttttgttatgttgttgtgtcactccaccccctctgattagagttttttataaacgggggtgggcgtttgtcgctatgatccacaaggactgtaggcacacctatgcaccggtgttatcatcatggggggggggcgttggtgacgactgttctctttccgggggaataacacgggggtttgctgtttgggcgcagggcgggcggctggttctcacacccgttgaagggaggtgttttctacagcgaggtgacccccaccatggccgtaggctgtcggccgtgtcgccgcgtgtatgagagagaaaggattggtgaaattaattgttcgttatgcgcgcgtcgaattagcgtgttcatcgcacacgcgcgaacccactgtttgggtgggggaagactgctgtggtaaaaggttgcggctgtttggggccgagcgagatattgttccacggaggcccgacccgcttttccaccgtttaaatcttgtttatgatagcggcgttttaagagaggaatttgtttttaccctccttgttgggtgtctctccgctggagagttcggcactgctttttttagattaaaagggttttgaacacacacgggagattttccacacactctcggagaagagacttttgtttggttataaacgtgtgtctagacacggggcncgcgccactctcggtttaatagccctcgggaaacgctctcttttgtgtctgttctcagcgcccttattacacncgggggatactcctgtgtgtgtgttggagacggtctctctcagagatatctcacactctcagacgacgcacacacatgtgtttgtggtaacactgtcgtggcctgttttgtctctgtgtctgtcacacagacacacacgctcttgattgaaagagtgcaccagtgttctcaaaagagaataataaggggtgtcccacacagagtttttataacacccagaaagaggtggccacactctgtgtgtggcgctctccttggtagagtattatgatagagacctaatgacactgnggcgaacgaccattagaaataccagaccaaataaagagtaccagtaatgttgtacatttttttctttggtggtacaatcttaaattaccaaccccttaagttgcccacggtgtgccaccttacgtacgtcttcccaggtatgtctttattacatcttcccaggatgtcacagccatcttttaacacgtttcacagtcctatgtttgctttctcccctttttaagagatggtaagttaactgggattgatttactggatgaaattataatgccagatatcctgtttttgga

SEQ ID NO: 543586 - DNA, 208 bp, Homo sapiens
  misc_feature (32)..(32): n is a, c, g, or t
  misc_feature (50)..(50): n is a, c, g, or t
  misc_feature (177)..(177): n is a, c, g, or t
attccactgctagactgtcacgcggcatgatntaccgcacattcccccgngagccagcacgctcccatgaaaacagcaccgtgcatttgcatcgcccaggtcgcccaacccctgggcgtgaccaaggacaccgtgtatggctgacgcgagccacaccgccttggatctgtgtaggcnacccaccgtgtccgcagtgcacgcatgaatc

SEQ ID NO: 543587 - DNA, 857 bp, Homo sapiens
ctagtggccccccggtaggggctaggggtccgtcccgacaaaatggctcgtcgtttgcgggtgctctttgcgtgtgttggtgaacgccagcgcgaggtctctgctgtgtgagtgggctgtccaatcaaaggcatgagtatcccaccggtgtcgtgagcgatccgccaaccaagacaccatgtggggtgaagccggggctatctaccaccgcggagtacacttgttcgttgccggaggcactttggtcagcgcccgcgagtgagtgatgggtctctggtctggcttctttccgtggccccccgatgatacaggcgtgtttgccgataccacccacgccgaggtgaatggtgtacgtctggtggcccaagcaccggtgttggtctccccgtgcggtgggggggcgccccttcccgaccacagaaacaaggtttcttgtatgcggggcaccttttcttgatagttaatttcccccgcggcccgtcctaagtaggccgcttatcttcgcacgtattggtgtataaagcattaggttcgcaacggtgataatatcaacggcgtcgagaacaagctttttgtcccgaccacaccagctgtacccctcctagaaagcacaaagttcccccccgcccagcagtgataccactctggcaattgcactcccgcgagttttatgatggttgccccctactagattatcctcgacacatcggcgattttcttggcaatttgtatcctcctaaatacaagcttgatgttttccctctaattatttgtactcagacgtatagtgaacaagatgaatctctcctaattgataagtaaaaatacactcgaattcttttcgcgcccacattcaa

SEQ ID NO: 543588 - DNA, 453 bp, Homo sapiens
caaaatgggaagcaatcatgctgagacacggtctgaggaaaacagtctatgctgatacaagattaccaaagaaacgcccaatatcgtcttcctactactgtttgacattctcttgctcgccgggagcactctctggtatgcatacttgctgagatacggtctgaggtactacagtctatgctgcttcaagattaccaagaggaagttctatactcttccactactgtatcacttctatcctatccatggctgtcttcttataattctgttcttttgctcactctctttcgtcttgtatctcccttatagagtggttgtctcgcaacttctttactgatctggctctccttcgtgtctggatctcacggggggttcttgaacaactcattctcttttgtgtcgctctttttgttcctgtggaagccttctttcccagctcctccgttcctgacc

SEQ ID NO: 543589 - DNA, 402 bp, Homo sapiens
ggtcgacctagcaggatcccgttatcgaaaccctgaagagacaaaatgtctgtgactaaaattccttgtaaggactcgtgataagcttggtcttagaacgcaaggaacaataacgagtctaagtggcaatacaactactttatatacttaacccaccagagtacacaggttgaaaaagagcaaattactgggcatattgacaagagctctgtctagcctctcccccagtttatgtcacttccttctagactttcctctgactttactagagaaactgatgaagctgcttttgaaccagactatcatgaaagtgacagtgaaagtcatgtttctgtaaaagaagaggaatcttcaggacacatttctaaggacctgaaagataaaatagtggagaaagctaaa

SEQ ID NO: 543590 - DNA, 482 bp, Homo sapiens
tactggcctcgttctacaggccggcgcctgcatggcgcttctggtctctcttcaccctgtctgtgtcatggtgaatcggccttttttcttcagcctctctctcagtcactcacttcacgcgtgtccttgtcttctgctcggctgctgattgctcggcctctgtgcaattgacccccatgacatcactgagaaattggaggcacacagcccatggtgggcataggacccaaccgatgaatttgctccccagagactgtgctctcatccctgcactccctcatctctacagggtcacccatcttagggatacacctttcggtctcttcatatgccacctcagtggctcttagggctttgccaatacaactcgtgtttctgtaactctctttatatgtctgtcttggtccctctctggccattctctctctcgagcatcttcttcgcactgcctcgtccatgtgtctctacaatttttcatttgc

SEQ ID NO: 543591 - DNA, 218 bp, Homo sapiens
atcatgttggtgatccagatcactgagaaagcccagtgtatcccatgggttatctttgttggcaatggaacttttctatggcccacactttacaattctttgtcattctaacccatccttccatccttatgttttttttttttggaaatttctaaatggaaagctagcttagggccccaggtatttttttaagggttataggtggttaaccattagaa

SEQ ID NO: 543592 - DNA, 654 bp, Homo sapiens
ctcgtatgctagcacctttatccactacctatgtgaatctgtgtctatgcgggatctatggatttgccttcggtggctcagctccgatattgttagaaacattgatggaccttgttggcaccccagaggttctccagcgctgtggagatggtgaccatgtggaatgctgtcctgtccatccttggggccaccacttataaggtcggtctcaattgacatgtagtggcagactacaaatactacattactgtcgcatgtggcgtcgcccctaaatctatttcaggtatctatcgtcttcattggcatggcgcatccacttatcgccttttgcgcaaagagaccatgaacagcaacaccgagcagaacaaaggcacacgtacatgaggcagagaccagtcatagcatgtctgctggagaaagcccaaacatgacatgtttaccaaaagagcatgtcagaaattcctgcctgtgaccgcagaacaagaccaccagcatgagacgcgggacacacacgggatggcacgtcgacacacgtcccaaggtcctggaaatccacaattgggggctttgcaacgggggtaacacttggacggccagtttccatttgatcccacgggaatactcttggaacaacattattcgtatttgggccct

SEQ ID NO: 543593 - DNA, 162 bp, Homo sapiens
gctctacagactcctgagccaacttttatgtacctggcttcctaggctgtggcttgaactatatgtaaagaagccaaggagtccagatctagatcgcagagaagtaagtctcattctaaaacattgcaaactactgttagagtccaaccccaatgaagctag

SEQ ID NO: 543594 - DNA, 634 bp, Homo sapiens
  misc_feature (319)..(319): n is a, c, g, or t
ctgggatttggttaaggagtgggcaggtgccaccgtgggacactctctttccttctcctcctctctatgaaccgcctctccattcacactgactttcccgtcttaaaggtcttcagaacatcttgagaatttttgggctgggagtaaggcttgggtgtcagcataggcactgctttgggagtgacagttttgcttggagacccactgcctgctgacatgctggtatccagaacactggcacgagcaatggtggtttcaacagtggcagtgaatttgggtggtggcagtgactgttgccgcaggtatttcatgggattgnggtcattcaggaaggaggataaatttggctctgttgaatggctttcttccagaattttttggcatcttccagcggtcgagaaccggcctcactggtggggggacccctctaagtgacctgtggagggatcccctttgcttcctcctggaccggagcggtcttaatatccttatgcaggctttttttttccgctctttttttgaacaatttccttgtaggtttgaggcttttcctcttttacttggcccgtttttccgcagaccttgggaccgggcccgattcggaacagggccaaaggtttctcttctgtggaaa

SEQ ID NO: 543595 - DNA, 346 bp, Homo sapiens
ggaagaaactcaggaggctgaggaggagagagtgaaagaagaagtgccaagactttggcagttaatattgagcataaatcatagtcacttgagctggcatattggtctactatttacaagctgtggttggtttgtttgtttgtttgtttgtttgtttgttttttgagacagtgtctcgctttttctcccaggctggagtgttttggcacaatcaggggtcactgcagcttcaggtcttctggactcaagttatccacctcagcccctgttcccacccagtaggtgggactacaggggcacatcaccacacctgaactgtgttacgtctagttcgacctagacgtaa

SEQ ID NO: 543596 - DNA, 452 bp, Homo sapiens
  misc_feature (10)..(10): n is a, c, g, or t
  misc_feature (91)..(91): n is a, c, g, or t
  misc_feature (124)..(124): n is a, c, g, or t
  misc_feature (133)..(133): n is a, c, g, or t
  misc_feature (139)..(139): n is a, c, g, or t
  misc_feature (145)..(145): n is a, c, g, or t
  misc_feature (158)..(158): n is a, c, g, or t
  misc_feature (170)..(170): n is a, c, g, or t
  misc_feature (175)..(175): n is a, c, g, or t
  misc_feature (263)..(264): n is a, c, g, or t
  misc_feature (451)..(451): n is a, c, g, or t
atttaataantactaatgaataaaaatactttattttgtcaagagactgcctctcctccctctcccgctctctcttgtgggcctcctggcngttgtgtgcccctcccgggcctgcacccacagnccccgtctncttgcncaaatnactcttctttacngggagggctccntctcntttgcctgcgaatacaacttaggtataattaccgctcctttcccccatctccttccaaatacgagttcttgccctgcgttccattttnnttttttttttttttttgagacagagtctcactctgttgcccaggcgtggagtgcagtggcgcgatctcagctcactgcggctcgcgcgctcctgggttctcgccttctcctgctctcagtcttcagagtagctgggtctactggcgcccgccaccacgcccggcttgttttttgtgtttttagtggng

SEQ ID NO: 543597 - DNA, 100 bp, Homo sapiens
ggcacatgtaaagaccaaatcctcctctcgaagctcgatcttctcttgaacgctggatgtaactgtttacgaatagtgataaccacaggagaatattgta

SEQ ID NO: 543598 - DNA, 145 bp, Homo sapiens
acagtcgacactggatcgatgacagacagtgcatggagcctgataagatgagaaatatagactattctgaatgacttacataaatcacaaacactgcaggtggtgggagagacacgttacaccgattcagagatatgccatatag

SEQ ID NO: 543599 - DNA, 245 bp, Homo sapiens
gacggcatgcgccgccttgaacgggctcttcacgaggatcttggcggtctgccccgcctcgtactgcttcttgtccgtgacgagctccacggtggagacgtcgctcatcgcccacgcgatcgcatcggcgctaccgatggcgtacacggagctcgaggccgcggccatgttgcccttcgcgtccttcaccgtggcgcgcacgatgaagtagccagcgcccggggccatgagcgggcacgacgcgc

SEQ ID NO: 543600 - DNA, 179 bp, Homo sapiens
tgagatcccgatctcgggtccatacttatggagagctcaacactgcatctgttccggtctactattaaacccgctccagtaaagtgttggaagattctgatttgaagaaatctgatattgattacattgttcttgttggtgcgctcgactctaacttcatagattccacacctggattc

SEQ ID NO: 543601 - DNA, 409 bp, Homo sapiens
atgcatcaagatctgctcgatcatcaaacagacgaagcacatcaacacatgagataagatgcaacaatccacaagacaggttgtacgttctacaaatggagagttaaacacagatgaccccaccgcaggacgttcaaatgcacccatcacagcccctactgaagtagaagtaatggatgaaaccaagtgctgctgttaattcaaacgaaggaaaaggaaaaccatacagcgccacaaagtgactctggacacagacagatcctggggagatacttacatgttcatctgctgtcttgtgattaaaatcatctctgtagtgaccacgtatattatcaaggactcacctcttagaaacaaaaatgtcatactttcatacttcatgtggtggttgtcttactttctttttctt

SEQ ID NO: 543602 - DNA, 199 bp, Homo sapiens
ggcgcggttcagccgggcgacgcgctctatgtcgaaacgccctacggcttcctgacgctggagcgcttcgcgcccggcggcgacctctggctgctggcctccggcaccggcctgtcggcctacctgtcgatcctgcgcgatccggccgtctggcgcgcctatcgccgcatcgtgctggtgcacggcgtgcgcaccgcgg

SEQ ID NO: 543603 - DNA, 876 bp, Homo sapiens
  misc_feature (429)..(429): n is a, c, g, or t
ggttttacctaagcaagcctgggcaatggcgggcgccctctgctagccttgtgcgcttgcagttgatctcagactgctgtgctagcaatcagcgagattccgtgggcgtaggaccctccgagccaggaaggcactggaggagtttgcagaaatgaaagaacagagaagagaagaaggctaacctcgaaagggcacgagaagaaaagagattaccacgcccgaaagatgcattacctcctcagcacaaagcagattccaggaatatacaattcaacccttcagaaaagagcctgatccatgggagctgcaattacagaaggcaaaaggcttttaaacaccgaagacctaaagttaagcagaaggactccaccagaccttatgatgggctagcttgttccaagcgcccgttcttttcctcggtctgaaatnctaccacctattaatagaaagcaatgtcaggggccttccgagatatcaccgaagtatagaacaaccgctacaggccttggagccaacgttggcgggtggcagaaccaatcgatgagttcacagtgggccagagaggagctcagcaagagaggaatgggtgcaaatgtacactgacacatatgtttgtgccattctcttcataccataacaagtggacagtacatccattcaatgcttatcaagcaagatggtcctatttctaacaagaacattccggagtgaaatctacaaatggtccgggcacgttccgactggtccctcttgggctcttaagtgggaatttctccaacggcgtgttcaacacggctgctcgccgcaccgggcgggggtaaccccgcggcggtcccgggggaggggcacctagcctcgggaaaacgcgcttcaatg

SEQ ID NO: 543604 - DNA, 322 bp, Homo sapiens
tcctccataatgtgtgccagtgcgaggggcgtgctcagatatgcagtgtgtgtgtgtgtgtgtgtgtgtgtctgtgtgtgtgtgtgtgtgtgtgtgtgtgtatgggtacacatgtgtgtgtgtgcctgtgtgtgtgcctgtgtgtggagggtacacatgtgtgtgtgtgtgctgctgtgtgtgggggctcacatgtgtgtgtgtgtgtgcctgtgtgtgtgggcacacaatgtgtgtgtgtgtgtgcctatgtgtgtgggcacactaatagggggacaccgcgcacaaactgcgcacacgtggacatagctatcccctgtga

SEQ ID NO: 543605 - DNA, 233 bp, Homo sapiens
taaagcaggtaagctaataagcgaggccttttgcatccacagttaagttgggagtgcgaaggaacaagttctcataaggaaacgaaaagtgctactccactggacacacaaatataagaaaatggaacagccttattgctgacatggagaaagtttgaatggtctgcgtagaagatcagaacagccacaacactctcgtaggccaacgccgaatccagagcaaggccttttct

SEQ ID NO: 543606 - DNA, 260 bp, Homo sapiens
  misc_feature (153)..(153): n is a, c, g, or t
taactattgaaaggctcgtagtccaaggtcaaagcacaggctacaaggaaccaaggtgtgacacttacccccgagagtgtctcctcagttaggatttgacgttggcggatctgtatttcacgagtgcatgtttagaaagtaagcaccattcangcagacctcttccatttactaaaagtccacaacagcaactttttttgggctctggattccgtaaatccaggacttttgaagcactccgtgtgcgctctcttcgcgag

SEQ ID NO: 543607 - DNA, 390 bp, Homo sapiens
gaaaaagtgccattttcatcacatcatacaggcatactttggagacaatgcagatttggttccagatcactgcaatgaagcaaatattacaataaagcaagtcacacaaatttttttggtttcccagtgcaaataaaattttatgtttacactatcctgtagtctggtaaatgtgcaatagcattatgtctaaaaaacaatgtacataccttattttaaaatactttattgctaacatgttactggcacaaacacgaagtgagcacatgctgttggaaaaatggtgccaatagacttgttggtcacagggttgccacaaacttttaatttgtaaaaaatgcaatatcagcaaagtgcaataaagtgaagcccaataaatcgaggaaaaaa

SEQ ID NO: 543608 - DNA, 431 bp, Homo sapiens
gcttcttcaagttctgcctgcttatctgatttaataatctgaaataggattattctcccccatctggaataggattattctctattatcccagttagagacacaatgatataaacatcgctgtaagttccagatttaactttcaaatcagaattatcagtgaaccacattacatcagctttatttataactgtttcttgtcggtcctgttgcaagtgtaagaatttggttggtcagtgatcctagagtagtgtggtgtcttgtctgtaggaaacagccaaagagtggctgggtttatattataactactggaaatggtaacctttggttatggcagaagaagacctgcataagacacaactcttttatatcaactgagtaatgttgggcatgatagaagttcagaagtgtctccactgtatgagttaagtc

SEQ ID NO: 543609 - DNA, 451 bp, Homo sapiens
ctttagggaacctgtgtctgtcagatagtgtttgtgctgttcccaccttttggaacacccgaatgggaccacgaagatgatgccaacctcatgttcatcaccatgtgcttctgctggcactatctgtgtggcctcaacattgtggccgccaactattctcttggttactggcttttgactcggatgaagagacacggaaggggagaaatcattggaattcagaagctgaattcagaagacacttaccacaccgccctcttgagtggctcacatgaagaatgagccgagatgccgagggcgcagatgtcccactgcgacagctggaatgaatggaggtcattccctccacctgaatgcctgctgtgggctgaacttaaaggtctatatatttgcaccttctcattcaacacagggctggagggtctacaacaggtcgcctacagcttctgtt

SEQ ID NO: 543610 - DNA, 154 bp, Homo sapiens
agccgtagacgtgatgctcacagggagggatggagtacggtctgcaccctacatgggattcatatgaggccaccagtaaaccagtgccttttcttgtcccagaagttccaacgcttcacgctcctcgagtaaatcataactactctggtggtgg

SEQ ID NO: 543611 - DNA, 102 bp, Homo sapiens
actaggacacccaatgcctggtggctgatgcaatgccataggcacctgactgatgaaatgaaaccagaacctaaaagaccagaatggcctgaactggcaact

SEQ ID NO: 543612 - DNA, 315 bp, Homo sapiens
tcggcgtcggacttgtcgatcttgttgatcgccacgatcagcggcacacccgccgaacgggcgtgctggatcgcttccttggtctgcggcatgacgccgtcatcggcggccacgaccagcaccacgatgtcggtcagcttggcgccgcgggcacgcatcgaggtgaaggcagcatggcccggagtatccaggaagctgatcacgcccttcggcgtatccacgtggtaggcaccgatgtgctgggtgatgccgccggcttcgccggtggggaccttggtgcggcggatgtaatcccagcagcgaggtcttgccgtg

SEQ ID NO: 543613 - DNA, 954 bp, Homo sapiens
atagtagtccaaaaaacaccactcagtcagtacaagaaatcctcacccgacattttcaaattccacatggcagaggtctccagcattcaaacattgctctgttttacaagtgagaacacagtaaatatggaaggcagtaacagggatacatcacctaggtgacagcttggatgtgacgggactcttagcagtggtacagagacaggtttaagtatgtaagatctaggacgtcttctgggcatccttccatgaccagaagctagaaaactttgggaaccattatctgggaattctgaaaatctaccaagaacacggaatggcaccgatacggacccaggatcagttcagggactctgcttcctccccggtgacgaccatcaaccccaaactctcgttggactaaagttagaaataagacacagggagaaaaaaaacgcagataactgccaaccctggtatatccacaccaagccaagtgaggagtaagactatatggcactgatttatctattttttaataccctgaacttcccatattaatagcttcagaattcaaaatggtgtactgcaaaggaacccaattttaggggacactgtcagggaagaacttcagttttgatccatttatctaccatcctcatcatcgacaggcctctctttaccagatgtggaacagctcactacagaggcctgaaggaaggaaagaacaaatggtacacagcagcccagaatcagacccaagagaagagcacaagtgtagtacatggatgtggttatttcgcatccggccagcagacccctggaaaccaagttacagcaatgtcccattatcaagaaagataggttcgccagttcccacaggggtgggcaggagggtgggctgggaggcaacaatgcttttcttctcactggattctaaaataaaatttgcaagggcctgtgctgaactgtaaa

SEQ ID NO: 543614 - DNA, 148 bp, Homo sapiens
aattcctgtgctgctgctgaagctgttgctgctgaagttgctgttgctgttgtagctgctgctgctgctgctgctgaagttgctgttgctgtggcagctgctgctgctgctgaagctgctgtaaagagcccatgggctgagcgctcag

SEQ ID NO: 543615 - DNA, 371 bp, Homo sapiens
ttatagcatcctaacaggttgtcagatgctacctgggttgtgcgtgctgctccaggctgtcaggtgcgcacctgtggtgtggggtgctgctccacgatgtcagatgctcacctgtcggtgtgggtgctgctccaggctgtcggttgctcgcctggggttgtgggtgctgctccaggctgtccaatgctcacctgggtgtttgggtactgttccaggctgtcagatggtcgcctgggggtgtcggtgctgttccaggctgtcacgtgcacacctggggctacagggtgctgatccaggctgtcagaggctcacctgggcgtgggggtgctgttccaggctgtcagatgctcacctgggtgtgcgtgtgctgt

SEQ ID NO: 543616 - DNA, 115 bp, Homo sapiens
cggtcatggtgatgtgatcttatttagtccctgtgacctgtcttcagctgtcactcgaagaataccattcacatctatctcaaaggtgacttcaactctgtgggaccccacgagg

SEQ ID NO: 543617 - DNA, 375 bp, Homo sapiens
ccatatatgtggctaaggcagtgattgctggtggcacaatataaaaggctcaggaacttgaggtgcgggtgaggcccgctccacccggatgctgtagttgcagcgcaggtcagcggggtaggaccgagggtatccaggctggagatgtagcctgatgcctccgtgtacagctcgcttctgcactcagtctggcaggaatgcctgtcttcctgaagctcatagcctggacggcaggaacagaagtagcctccaacgtagttgtgacacaggtgcttggcactgtggctgggggatcctcctcccctaatttgctccgggaagcacattcatcaaggtccacagcttggtagtaggccagtgaagccttttagacct

SEQ ID NO: 543618 - DNA, 502 bp, Homo sapiens
tctagaggatctcagattgccatttcacctgtcttgtggttcagatcctctccctccaccgtgacctcacagggtatccaaggtcgtgcacggagtctccatcggactagcagtgatacttgaactgtggggtcctcagcccggtccccttcaggctccagttctctcgtgatggtgctgatgatgcgaagctcagggaagaggaacaccccttctgagctttcaaatcagaagctgctcgggcaagatggtggacgccactcaggctgatcttgggctcctcgggctgtaaaaccatcacgtagccatctaccggggggaccgaaatgcaggtggcctcgtttagacacttgattgtgctggtgattatgagtctgcgaattccgggcgtggggaacggccgggagttcaggtacgacgatgtgctgcatggccttatccaattccacaaggtcttctccctcctaggtcaataccaactggctggggtgtgataggcagg

SEQ ID NO: 543619 - DNA, 835 bp, Homo sapiens
aagtcatattttattcattatatataatctcttgaggcacactttttttaacggcaacagcacacagacaccacgtacccgcaattacccatgcgttccccgcccccttttttggagccccccaatttctgtcacaacatacgagtcctttcggtccgcaatcccgtctgccttcccccggcagccgggtcttagagcccacaaagttttttctcttgaaaaaaagctaaaccccccttaaattacccactaggtacaagaaatttccaacgcaaattcttaagcgaatttaaataactaaaattttaagacgaaatttgcaaacccttaaaattcgccattacgcaggccgaacaattaaaaggctttcttcacacacacccgaggctgagaaataactcttttcctaggacgtcaaacaaagtgaatttaaaccaacattcgaggagcaggattccccgagcccccgcgatttattacccctatacgaagcgcccatcttttcagatatccaaatatgaaaggggaattatcacccgccgtctaaattattacattttcaaaacttttaggttgagataaaaaacatttgagcgcgaatcttttaaaaagcagacttcaaaaccccagggctgttattttaagaaccctgtgaattccctgacccccggagaagatgtcgtccatttacagccccagtttacgccctttatcctacggcccgcgcgcaaatgggaagattaattgggagtgtgtcagagatggaaacccatcttgaggagaaataaaatttgtaagatgggaaactggtagaccgcaaattaccgggaggcga

SEQ ID NO: 543620 - DNA, 527 bp, Homo sapiens
  misc_feature (14)..(14): n is a, c, g, or t
  misc_feature (506)..(506): n is a, c, g, or t
cgggaaagaaaganaaaatgactagaaaacaaccagaaaacaaatataaaaattggcaggagtaagtcactgtttatcaataacaacattgaatgtaaatagaataaactcttcaataaaaagacatagagtggctgagtggattaaaaaacaaaacccactgatctgttctctacaagaaacacacttaccctatagagacacacaaagactgaaaataaagggatggaaaaagatatttcatgccattggaaaccaaaaaagagtaggagaaatgacacttatatcagacaaaatagattttaagacaaaactataagatgagacaaagaagatagttatataatgataaaatggtcagttcagcaagacaatataacaattgtgaatatatatgcacccaatactggagcactcatatatataaagcaaatattattatttctaaagagagacataggcttcagtaaaataatagctggagacttcaacagcccactttcagncgtggactgatctctagacag

SEQ ID NO: 543621 - DNA, 171 bp, Homo sapiens
gtacatgcagttcctggaccccctaatcccgcactgggtgagtgttgagatgagtagtgatcactaaggctcaggaatttgagtctagcttgaggagatataacaacgagccctttctcaaaaaattaattaaaaactacacatggttggctgagagcaggtggctcacac

SEQ ID NO: 543622 - DNA, 498 bp, Homo sapiens
ctgcatgctgctggtcgacactagagtatccccttcaactaccaccgacacacacactcgaggatgtacactacagtgtgacctagaaattcaacacccaccgacacacacactcgggatagtacactcagtgcacctagaaatacacatttctgtgaactcaaagcgaacagggtggagaagtgcacaatgcttcatagttgtagatctcagagcacactcaaagctctttaacttttgcattctgcctcaaccatctcacttctgctccccgtgtgtgtgttgaatcataataccgccccagccacactgtgacctgctggctgtgagtgctgtgttgcacctgtcttcacgctgggcaatggaattacctgggccttctagtttggtaggttgttctacggtgaagggcctgagaatctggagttctaatccggtccctggcgattctcccgctgccgatcctgggtgcacgctgggaatatctgcttgaaacgt

SEQ ID NO: 543623 - DNA, 169 bp, Homo sapiens
ccagatagggtctcactctgtcgcccaggctggagtgctgtgacgcgatctcggctcactgcaacctccgctttccgggttcaaacgattctcctggaactgctagcagtgtttaaatgattgcactgtgccagttttactctaatgctgttgcctgtcattttctttg

SEQ ID NO: 543624 - DNA, 1484 bp, Homo sapiens
  misc_feature (474)..(474): n is a, c, g, or t
  misc_feature (513)..(513): n is a, c, g, or t
  misc_feature (595)..(595): n is a, c, g, or t
  misc_feature (838)..(838): n is a, c, g, or t
  misc_feature (921)..(922): n is a, c, g, or t
  misc_feature (930)..(930): n is a, c, g, or t
  misc_feature (969)..(969): n is a, c, g, or t
  misc_feature (971)..(971): n is a, c, g, or t
  misc_feature (975)..(975): n is a, c, g, or t
  misc_feature (977)..(977): n is a, c, g, or t
  misc_feature (983)..(983): n is a, c, g, or t
  misc_feature (995)..(995): n is a, c, g, or t
  misc_feature (997)..(997): n is a, c, g, or t
  misc_feature (999)..(999): n is a, c, g, or t
  misc_feature (1001)..(1001): n is a, c, g, or t
  misc_feature (1010)..(1010): n is a, c, g, or t
  misc_feature (1012)..(1012): n is a, c, g, or t
  misc_feature (1020)..(1021): n is a, c, g, or t
  misc_feature (1031)..(1031): n is a, c, g, or t
  misc_feature (1041)..(1042): n is a, c, g, or t
  misc_feature (1046)..(1046): n is a, c, g, or t
  misc_feature (1049)..(1049): n is a, c, g, or t
  misc_feature (1056)..(1056): n is a, c, g, or t
  misc_feature (1058)..(1058): n is a, c, g, or t
  misc_feature (1071)..(1071): n is a, c, g, or t
  misc_feature (1081)..(1081): n is a, c, g, or t
  misc_feature (1083)..(1083): n is a, c, g, or t
  misc_feature (1086)..(1086): n is a, c, g, or t
  misc_feature (1089)..(1089): n is a, c, g, or t
  misc_feature (1101)..(1101): n is a, c, g, or t
  misc_feature (1119)..(1119): n is a, c, g, or t
  misc_feature (1140)..(1140): n is a, c, g, or t
  misc_feature (1142)..(1143): n is a, c, g, or t
  misc_feature (1157)..(1158): n is a, c, g, or t
  misc_feature (1160)..(1160): n is a, c, g, or t
  misc_feature (1190)..(1190): n is a, c, g, or t
  misc_feature (1225)..(1225): n is a, c, g, or t
  misc_feature (1227)..(1228): n is a, c, g, or t
  misc_feature (1234)..(1235): n is a, c, g, or t
  misc_feature (1240)..(1241): n is a, c, g, or t
  misc_feature (1250)..(1251): n is a, c, g, or t
  misc_feature (1350)..(1351): n is a, c, g, or t
  misc_feature (1357)..(1358): n is a, c, g, or t
  misc_feature (1369)..(1369): n is a, c, g, or t
  misc_feature (1371)..(1371): n is a, c, g, or t
  misc_feature (1374)..(1375): n is a, c, g, or t
  misc_feature (1426)..(1426): n is a, c, g, or t
gtgtgcgcagtttgggtcgctcttgttgtgtccacctagtgtgccttttgtcgaacagcttgcttgtgacacccctgttgttttgtgggctccgcctgatgctgctgctgtattccttgtttttccgcgctgttgttgtcgcccgacgtgttgggttcgtcctcgcgccaggacccagcgctggttctgctcccggggagaaatttttgtgtaggggaccggcccctgtgaaatggtttggcgcccgtgcagccgaggagttgtctcgggagcccgcacaacgcgtggggctgcgccgtgaagcaccgccgcgcgcgaaaagtatcaccaagtttttcccactcgttctttggggcgcacaccacgaaaatatgtgtccgccccctgtgtctaattctttctctgctcctttgtgtggaagatgctctctttctcccccgttgtggagccaagcccgtgttgtctgtggttagncccctgagtgaagttctccgcgccacataggcgtgttgnctttttttgtaagtgcccacccgcccccgactgcccacacggaagatgggtgggaaagaggatggtgggagcgcgcctcccncccacttgggttaaaaaaagccactcggccgcttgtcgtggcccctggtttggtatacgcccttggggttgaaccacttggggtgttctccaccacaagaggatggtcccacatgcggtggcgcacatttggcgccgcgccgttctcagagatctccacagcgtgcacagcacatccccacgtttttgtttggagattttggtgtggcggccccccactctgggcgtctctcacacagggttnggtgcacttctcacaaactcatgtcccacgcccgtctcgcccacactctgtttgggtgtgcccctctgggtgtgggagagacnnctctgggnccccacaggtgacacacagagagagagcctcgtgtgtgngncacncngctctngagagccacacncncncncccacgccncnctcttgtnntgagaggccnctctggggcnntccnccnctggagncncacacacgtgttngagcctcgantngtnatngccccacgcgtngccctttgtgtcacactnggtaacctgggtgaaggggantnngagaggaaaggcgnngngttttcacagagggcccgctgaaagatatnggccgccccttgaggaaaggagttattgaaggagngnnttggtnntggannttctgttgnnaaggaagaagggtgaaggaaagaaaggaagagggagataaactaattatcccattccttttggccctgccagccatgtccatagctccccagaatttcnngcttcnngcttaactgcnanganngttaagctttctggttagattgttttcacttggtgatcatagtcttttccnagtgtacccgtaatatttttcccatcatattctccaagttaagtccattaacatccca

SEQ ID NO: 543625 - DNA, 149 bp, Homo sapiens
ctgaagggttagggccccagatctgagcttgtagcatgcagatctgggacctttgaagcattggtggtatcaggggatgatggtagatccagactgttgcgagttgaccttggtcaagaattggctacgtgagaggtggttttgacaaa

SEQ ID NO: 543626 - DNA, 271 bp, Homo sapiens
aaattagccgggcgtggtcgtggcgcctgtagttccagctacttgggaggctgaggtgggagaattgcttgagcccaaacgtttgaggctgcggtaagccatgactgcactgctgcactccagacagcagcctgggtgacaaagcaagacgtttttgtcagaaagaaaaaaaaaaaagagacgaagggaggaaggtaggaaggagagagaaaggaaggaaggaaggaaggataaagaaaggaaggaaggaaggagaaagaaaggaagaaag

SEQ ID NO: 543627 - DNA, 195 bp, Homo sapiens
  misc_feature (112)..(114): n is a, c, g, or t
  misc_feature (121)..(121): n is a, c, g, or t
  misc_feature (129)..(129): n is a, c, g, or t
cctgataggcctgggggactgactccttggggaagagttccaagagcatcatgcagcaggggccggggaagccagtagggaggacatacacccacagcccccaggcccgtannnttggcgncatggacncagaggcctgctcagccacaggagaggtgctgggctctgtcccctcctcaggtctctctcaggcag

SEQ ID NO: 543628 - DNA, 175 bp, Homo sapiens
cgtggaccaggtgatgggtgcagaaggagggaggggttatctataggtgtgggtgacagacatcaagtacttaacaggataatagaatatctcagagggcaatgtggagacagggcgagaccacgggaccgaagtgaaatgtagaattgctaatgaagtttgggcggcgatcact

SEQ ID NO: 543629 - DNA, 518 bp, Homo sapiens
tcaatcacagtagttcaggtacataacaacattatctctaccagactaacagatccacacatcacagaagtataatgaactgttacactggtaccaggtctggttaagactgcaggcttatcgcacatgcctttaaagaggacacacctgacttataagctttgacacctgcacattttcagtttccatgtctcgtctttgtacaaactaactgaggtgaacattttcagagtgtcaacatctaacagaaatacagtaaatcaatatgcagttcatgtgttagactttcattcgtttatcctgtcttcatattactaacgtgcttattagttcaatctctttgcagaacagctaaatttaatcaactatgtgtggtgtaaacaggcatggacatataaagttacactggtccaactctgtcatttaccagctacagaaaccaagaccctgcaaagtataatgaaaaagctgggagccaggcagattagcattcaggtaccttagcccttcagcctcag

SEQ ID NO: 543630 - DNA, 309 bp, Homo sapiens
ggatggggggcacatctctatcgtgtcttgcctgagctgtgaaagcctcctataataggtgtgtacaaaaccgtgctcttgggcctaagggcccatttaatacttcggcatggatacagagtaaaatacagcaaaacaactctctatgaggggtagtggtcatgctggaaaacaaccagagctgggactgctcccctcctcatcctggaatgtatcacccatcctctcctccactgctttccaagaagaggactgacccctcactcttttccagaattaatccactatttctctgcgataagggttagt

SEQ ID NO: 543631 - DNA, 680 bp, Homo sapiens
  misc_feature (26)..(26): n is a, c, g, or t
gagtagatcttgggtggagctcaggnttccaagtttctgacaggttcccaggcgacttgagcgctgctggtcggcccgtgggacccattttaagaagcaagaacctagaagaggcatggccaacttttgcaggaaagggaagggcctgacagtaaatatttcaggctttgcaggccactcaacactattcctctctgcctttctggtgggaaagcagccataggcaacccagaaagcgaatgggagtgactgtgttaccagtgagaccttccttacaagcacaggcgggaggtggctggcccctgccctcggtccctgtgcaccaggttggatctggaaacgctggtgtcagtggagagttgctggcttcagagagcagtaacaagggcaagaagtcttcataagtgtaggagtgcaagcctgtgtgtttgtgtaggatgtgtgtgtgagtaggtctgtgtatgtgagttgtgtgagtgacagcgtgcatgtgagtgtgtgagcctgtgtaggtgtgtgagagtttatggatgtgtgtagtgagcatgtttatgtgagtcaatgtgtgagcgtaccaacccatatctatgagtgtgtgtctatatgtgtgtgaatctatgcatgtgtagagtgtgtctatgtgagtctatgtatgtgagtccgtgtatgagtgtagcaca

SEQ ID NO: 543632 - DNA, 112 bp, Homo sapiens
agagactgattacatcattataatggaattagtgctaacacaagatgtactcgtgatctaagtcacttactatcttgatgagaggcacttcgttggtttacaggtggattgt

SEQ ID NO: 543633 - DNA, 405 bp, Homo sapiens
  misc_feature (13)..(13): n is a, c, g, or t
  misc_feature (163)..(163): n is a, c, g, or t
  misc_feature (179)..(179): n is a, c, g, or t
  misc_feature (231)..(231): n is a, c, g, or t
  misc_feature (350)..(350): n is a, c, g, or t
  misc_feature (370)..(370): n is a, c, g, or t
  misc_feature (393)..(393): n is a, c, g, or t
  misc_feature (396)..(396): n is a, c, g, or t
gcgatgcagcctngcggcatcgttcacgttgtgcacgccgccccggggggacttttgtggtggcactgagagggcgattgaccaagcttcttttacgacctccatggagtgggatacgcaggtggtgaaggggtcctcgccgctcggccccgcagcttggggnctgaggagccagccgncgccccgcagctgccgtcttggctgcagcctgagaggtgcgctgtgttccantgcgcacagtgtcacgcatttcggacgaatcggtgcacctcggactggaacctttcgcggttccctacagggcccgtggtctttttcccagagttacaaataacgttgtttttgaaagnggcccttttcctatgttggnattttaaaggttcaatttaaaanggntagtattta

SEQ ID NO: 543634 - DNA, 299 bp, Homo sapiens
ttttataactttatttcaaattcattaaaccaaaggcagaaactgttacggagcctgactagagggttgcctcataactgaaccttcatttttggacgggaaaaaaccatggtttaaggaccatgacagaagttcggccatgtcccattataaatgatccaacatgaccagggccacaaagccaaatctgccttcgacagggacttttttaacgattccaccaactcttgaggctaagggaaatggaatttgcgtgggggccccttcttaatcccagtgcagagttacgcactgttgcc

SEQ ID NO: 543635 - DNA, 207 bp, Homo sapiens
  misc_feature (52)..(52): n is a, c, g, or t
  misc_feature (69)..(69): n is a, c, g, or t
  misc_feature (90)..(90): n is a, c, g, or t
  misc_feature (117)..(117): n is a, c, g, or t
  misc_feature (152)..(152): n is a, c, g, or t
gaggattcggcacgaggtgacccgtgccatcctgtgtctggacctggctggncgggacctgactgactncctcatgaagatcctcaccgngcgggggtacagcttcaccaccacggncgagggggaaatcgtgcgtgacattaaggagaagntgtgttacgtcgccctggtcttcgagcaagagatggacacgggtgtttccagctc

SEQ ID NO: 543636 - DNA, 1898 bp, Homo sapiens
  misc_feature (1)..(2): n is a, c, g, or t
  misc_feature (228)..(228): n is a, c, g, or t
  misc_feature (1398)..(1398): n is a, c, g, or t
  misc_feature (1783)..(1783): n is a, c, g, or t
nnttcgtcgtgttgctctgccactacgtttcgttcttgtcgtctggtacacttaactatgctgtttgttgtgttctgcttcacccgctccgctctcctggttgttgttatagtagtgctcgtgcccctgggagggtacgcacgattcacagttgtgtttggttgtgtcagtcagttgctccgcccccttcctgcaatggtggtggtagttctctcctttcttggcgcncacacccaaatgatcaggggaggccttcttttttatgtgctggttggtgtacaaccatcgtagttggtgttggtgtggacgatgcttcgttcccccgcaacatagtgggggggttgcgcccccctccaccgaccatcgcccgtatggtttggtgtggccccacctgtcggagcactaggtaggttctttccggacggcctctctctttctgttgtggttgtataaaccactgtcgtggttctcgcgcgccgctcccatcagcactgcgtgaagtggtgttttttcctagaggcggccgggttgtcccccctttgttgacaggcggtgtgtgggtagcctgctaccgcccccgccccgtcggttgtgttgttgtgtggcgtgtggacgaaattttttttctggtggggttgcaacctcaccttcgacgatgggcggtgtgtttttcaggcgctagcctgcgctccccccacctcggcggtgattgttttctaagcgggcgggtacagtgttcctcattggtgtgccccaaacattgtggtgactacccccccgtggcgcccccaatctacgtccccgacgtggcctgacgcgttcgtctttgttggctgcgggtgtggttcaccaacaacacgggaggttgttgttgttggtcggtggtggttcgtggtcgcgcgtcgtcggtgcaggggagcgctggccggcaaccacgacgaggggggggcgcagacgtcgcggcggcgcgtcgcgcgtcgatgatgcacgaggacgacgaggaggagagacggtcgtcctcgtcgaagagcgactactcgttgtgggtggtggtagtagttgaagaataattggttggtggagtaggtggtcaacaacacgataaatacgccttctcttgtaggaggcgaacaccatttttttgatgaattactctgcaaaaataagaagcatcctccggggacgacaaccacaacaacaaggggtgtccccacctaggggggagacccaccctactccctctcacgggagtgttgttgcgagatgcgcgtcctagtagacactcggagatgatataatacacacatctctgtgtgattatctcccctcgcggagcagagagagtgtgtggacacactcagcagagaggagaccccacgcagcgagatgacactcggngatgacacagcagcagcgggactacagctcgcgctcgcagaggagatgtgcagaatggtacacagagagacacatattctgggagatatgtgttactctctgtctattccgacgaggccatgtgttctgtcgcgctgctgtgcgagacctcacgcatagcgcgttgtgtcgacgacgacctctggtttacacacacagctgagagagcacacacaagtcttcacacatacataatggcgcatatattcgcggcgcaccacgtgcacacatagtgcacagagagcatcagaggcgagttgacgcccgcgcgccacacgcgggagcctctgtgtcacgcagcgagacgacccgcgggttcttcaggcccacacataaattgtgtctncacagaatcttccacaggcatagttacgtatatatcggatattttctatgagccactccttgagccatgcatgagaacaccaaggtttaatggaaaattaacaatcgggctctca

SEQ ID NO: 543637 - DNA, 254 bp, Homo sapiens
gtgtggctggggaggagatgcaaaaataggacttaggtagagccgtgggctcatgacctgacaggaccacaacaatggaggcagcagcccatctccgcaggcattgactaacaaactccttcccccgggaggacgttttcttgaaacacttcctgaaaggagggcagtttatgcctcatgcttgaaatatgttccttgttacgtgtaacacccacagtcacgggggtaccgaggctcggaattccgtaattcat

SEQ ID NO: 543638 - DNA, 225 bp, Homo sapiens
gaattcactagtaatattactagtgaatcactagtaatattactagtgaattcactataatattactagtgaattcactagtaatgcgggcgcctgtagtcccagctactcgggaggctgaggcaggagaatggcgtgaacccgggaagcggagcttgcagtgagccgagattgcgccactgcactccgcagtccggcctgggcgacagagcgagactccgtctc

SEQ ID NO: 543639 - DNA, 132 bp, Homo sapiens
acctccctccaataaattcacttacacctcctgccttgtagttctggtattcactttactatgtgataaggtagcatgttgctgccagaatacaggcattgctttgggcaaattaaagtgcatgtcatttct

SEQ ID NO: 543640 - DNA, 3018 bp, Homo sapiens
tttttttaaccaaaaggtaaataatgcttatttctgcttcctgttttcttggcttgactaattacttttaatggagaactcaatttaactttgttcttttttctactctttaattaaagggtagtccatgatggtaagtcatagaactctgccctctgcacttcagcccatgacctcaggatggcctgattggctaccctgctctccagccaatccagtgcaagctctcatccgagattcactgaagtggtccatatccatctggcagcatcttctagttctgtcggggtgtcaaaaggatttgtatatttgcttctagaagtaactatttgacatgcctatgtatttaatgtatacttgtaactatcaaaatgaatagttcatttttgatagatttgttgtgcagccattatgaattaaatggtttattaggagtttgactaaatttttatttttagtgtgtatagcatgaatactaccaaaggagacgacaaacttgcagcttaaaatgggcaccagttcccacactggcttaatttatataactgcttggctgtattgcgggtaataatattagaagcaagaagcacttcatttttaaaagagatgttactataatattgcttaaatgctttagcacttggacttcttgagatgcagatgtgtgatttggagtgctggcttatttaaaggtcaagccaaggagtttgtggttcagccacaactactgtttcctaagactattgatgtgaaggacttagtgaagtaatttttatattctgggcttcccagcaagatgtcctttttatgactgccatgcttcttttggactcagtaaatatttgtaatgttagaaaagtctcattatttttataaaatgcatgacattttaagtatgtgttgcataaaatggattatagcagttctcatggtttaggatttttaagaaatagtccatttaatttcagcttaaccttttaaatgatctgtaaaatttctttgatagtttaggaatgttgtggggagggttcattaataaaagttcagcaattttttaactgaaatagtttatctcttttacctagtcacaaaaaaggtatgtaaacaaggccattatatgtgtttattgctctttatttccctatctagattttctaagtatcttagctttcttaatataagtttaacttggtacttactgaaaatgcctttttacccctgttaacggtattttgagcttttgaaaagaacttggttgacactgcttttattgtggataaaggagagatggtcagtaattaatggcttgaagtattattggagtggtttatcatttctgaaactaatcgtgtcagaattgactttgaaaagcattgctttttacagaaatatattaactttttaggagtaatttctagtttggattgtaatatgaaataatttaaaagggcttcgctcatatataggaaaatcgcatatggtcctagtattaaattcttattgcttactgatttttttgagttaagagttgttatatgctagaatatgaggatgtgaatataaataagagaagaaaaaagaataaagtagattgagtctccaattttatgtaagcttcagaagaactggtttgtttacatgcaagcttatagttgaaatatttttcaggaattacatgaatgacagtcttcgaaccaatgtgtttgttcgatttcaaccagagactatagcatgtgcttgcatctaccttgcagctagagcacttcagattccgttgccaactcgtccccattggtttcttctttttggtactacagaagaggaaatccaggaaatctgcatagaaacacttaggctttataccagaaaaaagccaaactatgaattactggaaaaagaagtagaaaaaagaaaagtagccttacaagaagccaaattaaaagcaaagggattgaatccggatggaactccagccctttcaaccctgggtggattttctccagcctccaagccatcatcaccaagagaagtaaaagctgaagagaaatcaccaatctccattaatgtgaagacagtcaaaaaagaacctgaggatagacaacaggcttccaaaagcccttacaatggtgtaagaaaagacagcaagagaagtagaaatagcagaagtgcaagtcgatcgaggtcaagaacacgatcacgttctagatcacatactccaagaagacactataataataggcggagtcgatctggaacatacagctcgagatcaagaagcaggtcccgcagtcacagtgaaagccctcgaagacatcataatcatggttctcctcaccttaaggccaagcataccagagatgatttaaaaagttcaaacagacatggtcataaaaggaaaaaatctcgttctcgatctcagagcaagtctcgggatcactcagatgcagccaagaaacacaggcatgaaaggggacatcatagggacaggcgtgaacgatctcgctcctttgagaggtcccataaaagcaagcaccatggtggcagtcgctcaggacatggcaggcacaggcgctgactttctcttcctttgagcctgcatcagttcttggttttgcctatctacagtgtgatgtatggactcaatcaaaaacattaaacgcaaactgattaggatttgatttcttgaaaccctctaggtctctagaacactgaggacagtttcttttgaaaagaactatgttaatttttttgcacattaaaatgccctagcagtatctaattaaaaaccatggtcaggttcaattgtactttattatagttgtgtattgtttattgctataagaactggagcgtgaattctgtaaaaatgtatcttatttttatacagataaaattgcagacactgttctatttaagtggttatttgtttaaatgatggtgaatactttcttaacactggtttgtctgcatgtgtaaagatttttacaaggaaataaaatacaaatcttgttttttcta

SEQ ID NO: 543641 - DNA, 373 bp, Homo sapiens
ggatcctgagtcatcccccttcgtctcgccatcgatcgtacttcttcttcttccacctcagccacttcttcctcctccgctacttctactactttgtcttcaatcccaaattggatatgagtggggtctgctccgccccaacagacatccgagtcatcctcctccgcatcagcagaatccacattgtcactttcttcagccagtgggcaacacacaaactctacccctcggaacttgtcaattccgcagggcagcaacatgccgtagtcatgcaagttggtactcttctcactgcatgtctctttggcgacggtgtgccagtgaagatgagtttcgcaaacatccatcctctcctggtgtaagaatttgcact

SEQ ID NO: 543642 - DNA, 869 bp, Homo sapiens
ctgatcggtgttgccttaccgtttgtgaagacctgtcccagcgttgccaatcaatcacagccccccatctgaccagggcggcgcgtggtctacgccgagtgacagagacgctcaggctgtgttctcaggatgaccgagtgggagacagcagcaccagcggtggcagagaccccagacatcaagctctttgggaagtggagcaccgatgatgtgcagatcaatgacatttccctgcaggattacattgcagtgaaggagaagtatgccaagtacctgcctcacagtgcagggcggtatgccgccaaacgcttccgcaaagctcagtgtcccattgtggagcgcctcactaactccatgatgatgcacggccgcaacaacggcaagaagctcatgactgtgcgcatcgtcaagcatgccttcgagatcatacacctgctcacaggcgagaaccctctgcaggtcctggtgaacgccatcatcaacagtggtccccgggaggactccacacgcattgggcgcgccgggactgtgagacgacaggctgtggatgtgtcccccctgcgccgtgtgaaccaggccatctggctgctgtgcacaggcgctcgtgaggctgccttccggaacattaagaccattgctgagtgcctggcagatgagctcatcaatgctgccaagggctcctcgaactcctatgccattaagaagaaggacgagctggagcgtgtggccaagtccaaccgctgattttcccagctgctgcccaataaacctgtctgccctttggggcagccccagcaaaaggagaagaagaaaaccgaaaaaagatcgcccatcttgtgggcgcagttgggtttaaaggaggtattacc

SEQ ID NO: 543643 - DNA, 2502 bp, Homo sapiens
  misc_feature (1)..(1): n is a, c, g, or t
  misc_feature (5)..(5): n is a, c, g, or t
  misc_feature (18)..(18): n is a, c, g, or t
  misc_feature (20)..(20): n is a, c, g, or t
  misc_feature (68)..(68): n is a, c, g, or t
nccanctccatgcctgcngncgctctagaggatccccccttccaacatctcatttctgcatctcaagnaagcacttcatttttaaaagagatgttactataatattgcttaaatgctttagcacttggacttcttgagatgcagatgtgtgatttggagtgctggcttatttaaaggtcaagccaaggagtttgtggttcagccacaactactgtttcctaagactattgatgtgaaggacttagtgaagtaatttttatattctgggcttcccagcaagatgtcctttttatgactgccatgcttcttttggactcagtaaatatttgtaatgttagaaaagtctcattatttttataaaatgcatgacattttaagtatgtgttgcataaaatggattatagcagttctcatggtttaggatttttaagaaatagtccatttaatttcagcttaaccttttaaatgatctgtaaaatttctttgatagtttaggaatgttgtggggagggttcattaataaaagttcagcaattttttaactgaaatagtttatctcttttacctagtcacaaaaaaggtatgtaaacaaggccattatatgtgtttattgctctttatttccctatctagattttctaagtatcttagctttcttaatataagtttaacttggtacttactgaaaatgcctttttacccctgttaacggtattttgagcttttgaaaagaacttggttgacactgcttttattgtggataaaggagagatggtcagtaattaatggcttgaagtattattggagtggtttatcatttctgaaactaatcgtgtcagaattgactttgaaaagcattgctttttacagaaatatattaactttttaggagtaatttctagtttggattgtaatatgaaataatttaaaagggcttcgctcatatataggaaaatcgcatatggtcctagtattaaattcttattgcttactgatttttttgagttaagagttgttatatgctagaatatgaggatgtgaatataaataagagaagaaaaaagaataaagtagattgagtctccaattttatgtaagcttcagaagaactggtttgtttacatgcaagcttatagttgaaatatttttcaggaattacatgaatgacagtcttcgaaccaatgtgtttgttcgatttcaaccagagactatagcatgtgcttgcatctaccttgcagctagagcacttcagattccgttgccaactcgtccccattggtttcttctttttggtactacagaagaggaaatccaggaaatctgcatagaaacacttaggctttataccagaaaaaagccaaactatgaattactggaaaaagaagtagaaaaaagaaaagtagccttacaagaagccaaattaaaagcaaagggattgaatccggatggaactccagccctttcaaccctgggtggattttctccagcctccaagccatcatcaccaagagaagtaaaagctgaagagaaatcaccaatctccattaatgtgaagacagtcaaaaaagaacctgaggatagacaacaggcttccaaaagcccttacaatggtgtaagaaaagacagcaagagaagtagaaatagcagaagtgcaagtcgatcgaggtcaagaacacgatcacgttctagatcacatactccaagaagacactataataataggcggagtcgatctggaacatacagctcgagatcaagaagcaggtcccgcagtcacagtgaaagccctcgaagacatcataatcatggttctcctcaccttaaggccaagcataccagagatgatttaaaaagttcaaacagacatggtcataaaaggaaaaaatctcgttctcgatctcagagcaagtctcgggatcactcagatgcagccaagaaacacaggcatgaaaggggacatcatagggacaggcgtgaacgatctcgctcctttgagaggtcccataaaagcaagcaccatggtggcagtcgctcaggacatggcaggcacaggcgctgactttctcttcctttgagcctgcatcagttcttggttttgcctatctacagtgtgatgtatggactcaatcaaaaacattaaacgcaaactgattaggatttgatttcttgaaaccctctaggtctctagaacactgaggacagtttcttttgaaaagaactatgttaatttttttgcacattaaaatgccctagcagtatctaattaaaaaccatggtcaggttcaattgtactttattatagttgtgtattgtttattgctataagaactggagcgtgaattctgtaaaaatgtatcttatttttatacagataaaattgcagacactgttctatttaagtggttatttgtttaaatgatggtgaatactttcttaacactggtttgtctgcatgtgtaaagatttttacaaggaaataaaatacaaatcttgttttttcta

SEQ ID NO: 543644 - DNA, 458 bp, Homo sapiens
ttttttttttctcagttaaatgtttattttgccaaggttggggacatgtgtccgtgacagcctcaggaagtcctgaagacctgtgcccaaggtggttggggtacagcttagttttatacattttagggaggcatgagacatcaatcaatatatgtaagaagtacattggttcagtctggaaaggcaggaagacttgaagtggggaggaggcttccaggtcacagataggtgatacacaaatggttacattcttttgagattctgttagcctttccaaaggaggcaatcagatatgcatctatctcagtgagcacaggggtgactttgaatagaatgggaggcagctttgccctaagcagttcccagcttgactattccctttagcttagtgatttgggggccccagctttaatttcctttcatatttcccccctttcttttcaaaaatcttttggaga

SEQ ID NO: 543645 - DNA, 92 bp, Homo sapiens
ccccccccccccgggggggatttggggcttttttccttttttttgggggaattttttttggggggtttaaaattaaaagggcccccctttta

SEQ ID NO: 543646 - DNA, 1106 bp, Homo sapiens
ctgatcggtgttgccttaccgtttgtgaagacctgtcccagcgttgccaatcaatcacagccccccatctgaccagggcggcgcgtggtctacgccgagtgacagagacgctcaggctgtgttctcaggatgaccgagtgggagacagcagcaccagcggtggcagagaccccagacatcaagctctttgggaagtggagcaccgatgatgtgcagatcaatgacatttcgccatgtcagcgtattagcattcgcacgtgacatggatgacagtagtgccgaagttgatcgctgcgctgcgacgagctggccagggccggtgagttgccggcgctagatacgtcgtgttcgcgtccaatatgctgcaggtggtcatccatgtgtggcaggcgacctctagctcaacttcccatgatagtggatggcacggaccgttcaaacaaacgagactgagtaaggcgtcaatgggactgatggcaggcaattccgatcagaagcaattgactccttgcggaaggaatacaatagcaaccctggccttcagcagcgtcgcaggaatcgcgctacgtgccaatgggctgccatgtgggtgcaaagcgccagtcaactcgacagccagctgcgatcaccgcgcgtgatgggacgtgctcgaacagcggcgaatttgcgggcagccgcgcgggcgactgggtgaaagactgacgaggagcttgtagggaatgttgtacccagcccgttgcgccgcgtggttgagagccaagggcaccatcttgaggctggctggtgggcacagggcagcgtcagtgaagcggcttggcctatcgcgggacacatttaaaggaacccatttggcttgaagtggctcttggagcaggattgaagcgtcgatccaattggcgtggccaaagggggcttcccttctgaagcttccttatagccatttacacgcaaggaacgcgaccgaaggctgggaaggctgttgtgtgcccaacgtcacaaacctggctggatttttcaccaagtcttggatggcacgaagtagaagctggtcttggcgcttagggagcaaggccccaaggccaaaacacaacacagcacacgggggg

SEQ ID NO: 543647 - DNA, 4878 bp, Homo sapiens
  misc_feature (81)..(81): n is a, c, g, or t
  misc_feature (420)..(420): n is a, c, g, or t
  misc_feature (423)..(423): n is a, c, g, or t
gggacccgaatagggtccacagccctgtgttcttcgaatactgtaaagcagccctgctccagattccttgagggtcacttnatattacacattcgtccacacaggacaacaaagtcaccacttccacccgccaaagcgcgctcaggtcggccgccacttcccttggtacacgcggaacgcaagccgcgccgaggctaaaggaagaggccggaatgcagggcgaaggggcgcagagatgctagccaatgctgccacctctattttgggtataagggatcttgtaaagctccgttattcgtgtggctatcacaaacaaggtggtttcgaccggccttggctagagaaggcctcctcagcctctgaggatcccaaggtctgtcgcagcacccaacactcccctcgcaggcccagatgccgagngcngaggcgcggcctggagggactagttggcgcgcggctgcccggcgtggtgacgtcagggcggaagcgcacgcaggcgtgaagcggcccagaacccggcggtcacgggaatatccgtcgcgccgagaacgctggttagtcttgtttcgggttccggctgcgttgggcttgcgtgcggctcgctaagactatggcgtccgggcctcattcgacagctactgctgccgcagccgcctcatcggccgccccaagcgcgggcggctccagctccgggacgacgaccacgacgacgaccacgacgggagggatcctgatcggcgatcgcctgtactcggaagtttcacttaccatcgaccactctctgattccggaggagaggctctcgcccaccccatccatgcaggatgggctcgacctgcccagtgagacggacttacgcatcctgggctgcgagctcatccaggccgccggcattctcctccggctgccgcaggtggcgatggcaacggggcaggtgttgtttcatcgttttttctactccaaatctttcgtcaaacacagtttcgagattgttgctatggcttgtattaatcttgcatcaaaaatcgaagaagcacctagaagaataagagatgtgattaatgtattccaccacctccgccagttaagaggaaaaaggactccaagccccctgatccttgatcagaactacattaacaccaaaaatcaagttatcaaagcagagaggagggtgctaaaggagttgggattttgtgttcatgtcaagcatcctcataagatcattgttatgtatttacaagtcttagaatgtgaacgtaatcaaaccctggttcaaactgcctgggtagtccatgatggtaagtcatagaactctgccctctgcacttcagcccatgacctcaggatggcctgattggctaccctgctctccagccaatccagtgcaagctctcatccgagattcactgaagtggtccatatccatctggcagcatcttctagttctgtcggggtgtcaaaaggatttgtatatttgcttctagaagtaactatttgacatgcctatgtatttaatgtatacttgtaactatcaaaatgaatagttcatttttgatagatttgttgtgcagccattatgaattaaatggtttattaggagtttgactaaatttttatttttagtgtgtatagcatgaatactaccaaaggagacgacaaacttgcagcttaaaatgggcaccagttcccacactggcttaatttatataactgcttggctgtattgcgggtaataatattagaagcaagaagcacttcatttttaaaagagatgttactataatattgcttaaatgctttagcacttggacttcttgagatgcagatgtgtgatttggagtgctggcttatttaaaggtcaagccaaggagtttgtggttcagccacaactactgtttcctaagactattgatgtgaaggacttagtgaagtaatttttatattctgggcttcccagcaagatgtcctttttatgactgccatgcttcttttggactcagtaaatatttgtaatgttagaaaagtctcattatttttataaaatgcatgacattttaagtatgtgttgcataaaatggattatagcagttctcatggtttaggatttttaagaaatagtccatttaatttcagcttaaccttttaaatgatctgtaaaatttctttgatagtttaggaatgttgtggggagggttcattaataaaagttcagcaattttttaactgaaatagtttatctcttttacctagtcacaaaaaaggtatgtaaacaaggccattatatgtgtttattgctctttatttccctatctagattttctaagtatcttagctttcttaatataagtttaacttggtacttactgaaaatgcctttttacccctgttaacggtattttgagcttttgaaaagaacttggttgacactgcttttattgtggataaaggagagatggtcagtaattaatggcttgaagtattattggagtggtttatcatttctgaaactaatcgtgtcagaattgactttgaaaagcattgctttttacagaaatatattaactttttaggagtaatttctagtttggattgtaatatgaaataatttaaaagggcttcgctcatatataggaaaatcgcatatggtcctagtattaaattcttattgcttactgatttttttgagttaagagttgttatatgctagaatatgaggatgtgaatataaataagagaagaaaaaagaataaagtagattgagtctccaattttatgtaagcttcagaagaactggtttgtttacatgcaagcttatagttgaaatatttttcaggaattacatgaatgacagtcttcgaaccaatgtgtttgttcgatttcaaccagagactatagcatgtgcttgcatctaccttgcagctagagcacttcagattccgttgccaactcgtccccattggtttcttctttttggtactacagaagaggaaatccaggaaatctgcatagaaacacttaggctttataccagaaaaaagccaaactatgaattactggaaaaagaagtagaaaaaagaaaagtagccttacaagaagccaaattaaaagcaaagggattgaatccggatggaactccagccctttcaaccctgggtggattttctccagcctccaagccatcatcaccaagagaagtaaaagctgaagagaaatcaccaatctccattaatgtgaagacagtcaaaaaagaacctgaggatagacaacaggcttccaaaagcccttacaatggtgtaagaaaagacagcaagagaagtagaaatagcagaagtgcaagtcgatcgaggtcaagaacacgatcacgttctagatcacatactccaagaagacagtaagtaaatgttttcttagggaagcagtcttatttggagtttttaaaggttattgctttttctttaaaaattgaacatagattattttcaaagttaggttagaattaggcttttagtatgaggcaaattatgagaaatgagtttggagatgttctggacatacagtatcttaatggcattctgttatattttctcccatgttttttggagaagtgtaggagctacccacaaagtgcttgagggccatagtattgttcataatgtgaaaacttctttttttttttaatttcagttagaaaatgtgtttcattaaccccttattaataaccaataatcaaattaaccagtcaatgaatcttctttagttaggcctgtaattagattgttagctcttcgtggctcttcaatgtcttttgaacatgtgggagatacttaataaaaagcatagctctaggacactataaaaattgctaattactccccttggaataaagacataagaacatttgcttaagatttaatatgttatatataggcttgggcatacagcagtgaggggtggggagattttgaaaagttctggtttgtcatttatgtagctggtagttttgttttgaacctgttatgagcaaccaccggaataatctgttccccatagaaactgaacctaaacttcaaatttttattatctaagctataataataggcggagtcgatctggaacatacagctcgagatcaagaagcaggtcccgcagtcacagtgaaagccctcgaagacatcataatcatggttctcctcaccttaaggccaagcataccagagatgatttaaaaagttcaaacagacatggtcataaaaggaaaaaatctcgttctcgatctcagagcaagtctcgggatcactcagatgcagccaagaaacacaggcatgaaaggggacatcatagggacaggcgtgaacgatctcgctcctttgagaggtcccataaaagcaagcaccatggtggcagtcgctcaggacatggcaggcacaggcgctgactttctcttcctttgagcctgcatcagttcttggttttgcctatctacagtgtgatgtatggactcaatcaaaaacattaaacgcaaactgattaggatttgatttcttgaaaccctctaggtctctagaacactgaggacagtttcttttgaaaagaactatgttaatttttttgcacattaaaatgccctagcagtatctaattaaaaaccatggtcaggttcaattgtactttattatagttgtgtattgtttattgctataagaactggagcgtgaattctgtaaaaatgtatcttatttttatacagataaaattgcagacactgttctatttaagtggttatttgtttaaatgatggtgaatactttcttaacactggtttgtctgcatgtgtaaagatttttacaaggaaataaaatacaaatcttgttttttcta

SEQ ID NO: 543648 - DNA, 839 bp, Homo sapiens
  misc_feature (799)..(799): n is a, c, g, or t
  misc_feature (801)..(801): n is a, c, g, or t
  misc_feature (807)..(807): n is a, c, g, or t
  misc_feature (812)..(812): n is a, c, g, or t
ctgatcggtgttgccttaccgtttgtgaagacctgtcccagcgttgccaatcaatcacagccccccatctgaccagggcggcgcgtggtctacgccgagtgacagagacgctcaggctgtgttctcaggatgaccgagtgggagacagcagcaccagcggtggcagagaccccagacatcaagctctttgggaagtggagcaccgatgatgtgcagatcaatgacatttccctgcaggattacattgcagtgaaggagaagtatgccaagtacctgcctcacagtgcagggcggtatgccgccaaacgcttccgcaaagctcagtgtcccattgtggagcgcctcactaactccatgatgatgcacggccgcaacaacggcaagaagctcatgactgtgcgcatcgtcaagcatgccttcgagatcatacacctgctcacaggcgagaaccctctgcaggtcctggtgaacgccatcatcaacagtggtccccgggaggactccacacgcattgggcgcgccgggactgtgagacgacaggctgtggatgtgtcccccctgcgccgtgtgaaccaggccatctggctgctgtgcacaggcgctcgtgaggctgccttccggaacattaagaccattgctgagtgcctggcagatgagctcatcaatgctgccaagggctcctcgaactcctatgccattaagaagaaggacgagctggagcgtgtggccaagtccaaccgctgattttcccagctgctgcccaataaacctgtctgccctttggggcaattccagcccnanagaaanaaaanaaaccagactagttctctctctctctc

SEQ ID NO: 543649 - DNA, 4434 bp, Homo sapiens
  misc_feature (81)..(81): n is a, c, g, or t
  misc_feature (420)..(420): n is a, c, g, or t
  misc_feature (423)..(423): n is a, c, g, or t
gggacccgaatagggtccacagccctgtgttcttcgaatactgtaaagcagccctgctccagattccttgagggtcacttnatattacacattcgtccacacaggacaacaaagtcaccacttccacccgccaaagcgcgctcaggtcggccgccacttcccttggtacacgcggaacgcaagccgcgccgaggctaaaggaagaggccggaatgcagggcgaaggggcgcagagatgctagccaatgctgccacctctattttgggtataagggatcttgtaaagctccgttattcgtgtggctatcacaaacaaggtggtttcgaccggccttggctagagaaggcctcctcagcctctgaggatcccaaggtctgtcgcagcacccaacactcccctcgcaggcccagatgccgagngcngaggcgcggcctggagggactagttggcgcgcggctgcccggcgtggtgacgtcagggcggaagcgcacgcaggcgtgaagcggcccagaacccggcggtcacgggaatatccgtcgcgccgagaacgctggttagtcttgtttcgggttccggctgcgttgggcttgcgtgcggctcgctaagactatggcgtccgggcctcattcgacagctactgctgccgcagccgcctcatcggccgccccaagcgcgggcggctccagctccgggacgacgaccacgacgacgaccacgacgggagggatcctgatcggcgatcgcctgtactcggaagtttcacttaccatcgaccactctctgattccggaggagaggctctcgcccaccccatccatgcaggatgggctcgacctgcccagtgagacggacttacgcatcctgggctgcgagctcatccaggccgccggcattctcctccggctgccgcaggtggcgatggcaacggggcaggtgttgtttcatcgttttttctactccaaatctttcgtcaaacacagtttcgagattgttgctatggcttgtattaatcttgcatcaaaaatcgaagaagcacctagaagaataagagatgtgattaatgtattccaccacctccgccagttaagaggaaaaaggactccaagccccctgatccttgatcagaactacattaacaccaaaaatcaagttatcaaagcagagaggagggtgctaaaggagttgggattttgtgttcatgtcaagcatcctcataagatcattgttatgtatttacaagtcttagaatgtgaacgtaatcaaaccctggttcaaactgcctgggtagtccatgatggtaagtcatagaactctgccctctgcacttcagcccatgacctcaggatggcctgattggctaccctgctctccagccaatccagtgcaagctctcatccgagattcactgaagtggtccatatccatctggcagcatcttctagttctgtcggggtgtcaaaaggatttgtatatttgcttctagaagtaactatttgacatgcctatgtatttaatgtatacttgtaactatcaaaatgaatagttcatttttgatagatttgttgtgcagccattatgaattaaatggtttattaggagtttgactaaatttttatttttagtgtgtatagcatgaatactaccaaaggagacgacaaacttgcagcttaaaatgggcaccagttcccacactggcttaatttatataactgcttggctgtattgcgggtaataatattagaagcaagaagcacttcatttttaaaagagatgttactataatattgcttaaatgctttagcacttggacttcttgagatgcagatgtgtgatttggagtgctggcttatttaaaggtcaagccaaggagtttgtggttcagccacaactactgtttcctaagactattgatgtgaaggacttagtgaagtaatttttatattctgggcttcccagcaagatgtcctttttatgactgccatgcttcttttggactcagtaaatatttgtaatgttagaaaagtctcattatttttataaaatgcatgacattttaagtatgtgttgcataaaatggattatagcagttctcatggtttaggatttttaagaaatagtccatttaatttcagcttaaccttttaaatgatctgtaaaatttctttgatagtttaggaatgttgtggggagggttcattaataaaagttcagcaattttttaactgaaatagtttatctcttttacctagtcacaaaaaaggtatgtaaacaaggccattatatgtgtttattgctctttatttccctatctagattttctaagtatcttagctttcttaatataagtttaacttggtacttactgaaaatgcctttttacccctgttaacggtattttgagcttttgaaaagaacttggttgacactgcttttattgtggataaaggagagatggtcagtaattaatggcttgaagtattattggagtggtttatcatttctgaaactaatcgtgtcagaattgactttgaaaagcattgctttttacagaaatatattaactttttaggagtaatttctagtttggattgtaatatgaaataatttaaaagggcttcgctcatatataggaaaatcgcatatggtcctagtattaaattcttattgcttactgatttttttgagttaagagttgttatatgctagaatatgaggatgtgaatataaataagagaagaaaaaagaataaagtagattgagtctccaattttatgtaagcttcagaagaactggtttgtttacatgcaagcttatagttgaaatatttttcaggaattacatgaatgacagtcttcgaaccaatgtgtttgttcgatttcaaccagagactatagcatgtgcttgcatctaccttgcagctagagcacttcagattccgttgccaactcgtccccattggtttcttctttttggtactacagaagaggaaatccaggaaatctgcatagaaacacttaggctttataccagaaaaaagccaaactatgaattactggaaaaagaagtagaaaaaagaaaagtagccttacaagaagccaaattaaaagcaaagggattgaatccggatggaactccagccctttcaaccctgggtggattttctccagcctccaagccatcatcaccaagagaagtaaaagctgaagagaaatcaccaatctccattaatgtgaagacagtcaaaaaagaacctgaggatagacaacaggcttccaaaagcccttacaatggtgtaagaaaagacagcaagagaagtagaaatagcagaagtgcaagtcgatcgaggtcaagaacacgatcacgttctagatcacatactccaagaagacactataataataggcggagtcgatctggaacatacagctcgagatcaagaagcaggtcccgcagtcacagtgaaagccctcgaagacatcataatcatggttctcctcaccttaaggccaagcataccagagatgatttaaaaagttcaaacagacatggtcataaaaggaaaaaatctcgttctcgatctcagagcaagtctcgggatcactcagatgcagccaagaaacacaggcatgaaaggggacatcatagggacaggcgtgaacgatctcgctcctttgagaggtcccataaaagcaagcaccatggtggcagtcgctcaggacatggcaggcacaggcgctgactttctcttcctttgagcctgcatcagttcttggttttgcctatctacagtgtgatgtatggactcaatcaaaaacattaaacgcaaactgattaggatttgatttcttgaaaccctctaggtctctagaacactgaggacagtttcttttgaaaagaactatgttaatttttttgcacattaaaatgccctagcagtatctaattaaaaaccatggtcaggttcaattgtactttattatagttgtgtattgtttattgctataagaactggagcgtgaattctgtaaaaatgtatcttatttttatacagataaaattgcagacactgttctatttaagtggttatttgtttaaatgatggtgaatactttcttaacactggtttgtctgcatgtgtaaagatttttacaaggaaataaaatacaaatcttgttttttctaaactgcttcaaataccttatttaaataaattattaaaaaggaaaattttaatagcaaaatggctgtactggttttctgacaaacttattctttcctccattagatggtagtttgagattattaaaatgcaattcttaactgcattgtgagctattgtaagtcttcactgtatatatggaaaaagtaaatgggagtcgcccaacaatgtgacattaaatgttatattttagcactaaaccaaaaaaaaaaaa

SEQ ID NO: 543650 - DNA, 731 bp, Homo sapiens
tacaagtcccatctgtctagatgcgagtggaacgcgccagcgtggagaaccagaattcagttttggagtgagccgtattgcgatcatgacttcctgcaggattacattgcagtgaaggagaagtatgccaagtacctgcctcacagtgcagggcggtatgccgccaaacgcttccgcaaagctcagtgtcccattgtggagcgcctcactaactccatgatgatgcacggccgcaacaacggcaagaagctcatgactgtgcgcatcgtcaagcatgccttcgagatcatacacctgctcacaggcgagaaccctctgcaggtcctggtgaacgccatcatcaacagtggtccccgggaggactccacacgcattgggcgcgccgggactgtgagacgacaggctgtggatgtgtcccccctgcgccgtgtgaaccaggccatctggctgctgtgcacaggcgctcgtgaggctgccttccggaacattaagaccattgctgagtgcctggcagatgagctcatcaatgctgccaagggctcctcgaactcctatgccattaagaagaaggacgagctggagcgtgtggccaagtccaaccgctgattttcccagctgctgcccaataaacctgtctgccctttggggcagccccagcaaaaggagaagaagaaaaccgaaaaaagatcgcccatcttgtgggcgcagttgggtttaaaggaggtattacc

SEQ ID NO: 543651 - DNA, 4824 bp, Homo sapiens
  misc_feature (81)..(81): n is a, c, g, or t
  misc_feature (420)..(420): n is a, c, g, or t
  misc_feature (423)..(423): n is a, c, g, or t
gggacccgaatagggtccacagccctgtgttcttcgaatactgtaaagcagccctgctccagattccttgagggtcacttnatattacacattcgtccacacaggacaacaaagtcaccacttccacccgccaaagcgcgctcaggtcggccgccacttcccttggtacacgcggaacgcaagccgcgccgaggctaaaggaagaggccggaatgcagggcgaaggggcgcagagatgctagccaatgctgccacctctattttgggtataagggatcttgtaaagctccgttattcgtgtggctatcacaaacaaggtggtttcgaccggccttggctagagaaggcctcctcagcctctgaggatcccaaggtctgtcgcagcacccaacactcccctcgcaggcccagatgccgagngcngaggcgcggcctggagggactagttggcgcgcggctgcccggcgtggtgacgtcagggcggaagcgcacgcaggcgtgaagcggcccagaacccggcggtcacgggaatatccgtcgcgccgagaacgctggttagtcttgtttcgggttccggctgcgttgggcttgcgtgcggctcgctaagactatggcgtccgggcctcattcgacagctactgctgccgcagccgcctcatcggccgccccaagcgcgggcggctccagctccgggacgacgaccacgacgacgaccacgacgggagggatcctgatcggcgatcgcctgtactcggaagtttcacttaccatcgaccactctctgattccggaggagaggctctcgcccaccccatccatgcaggatgggctcgacctgcccagtgagacggacttacgcatcctgggctgcgagctcatccaggccgccggcattctcctccggctgccgcaggtggcgatggcaacggggcaggtgttgtttcatcgttttttctactccaaatctttcgtcaaacacagtttcgagattgttgctatggcttgtattaatcttgcatcaaaaatcgaagaagcacctagaagaataagagatgtgattaatgtattccaccacctccgccagttaagaggaaaaaggactccaagccccctgatccttgatcagaactacattaacaccaaaaatcaagttatcaaagcagagaggagggtgctaaaggagttgggattttgtgttcatgtcaagcatcctcataagatcattgttatgtatttacaagtcttagaatgtgaacgtaatcaaaccctggttcaaactgcctgggtagtccatgatggtaagtcatagaactctgccctctgcacttcagcccatgacctcaggatggcctgattggctaccctgctctccagccaatccagtgcaagctctcatccgagattcactgaagtggtccatatccatctggcagcatcttctagttctgtcggggtgtcaaaaggatttgtatatttgcttctagaagtaactatttgacatgcctatgtatttaatgtatacttgtaactatcaaaatgaatagttcatttttgatagatttgttgtgcagccattatgaattaaatggtttattaggagtttgactaaatttttatttttagtgtgtatagcatgaatactaccaaaggagacgacaaacttgcagcttaaaatgggcaccagttcccacactggcttaatttatataactgcttggctgtattgcgggtaataatattagaagcaagaagcacttcatttttaaaagagatgttactataatattgcttaaatgctttagcacttggacttcttgagatgcagatgtgtgatttggagtgctggcttatttaaaggtcaagccaaggagtttgtggttcagccacaactactgtttcctaagactattgatgtgaaggacttagtgaagtaatttttatattctgggcttcccagcaagatgtcctttttatgactgccatgcttcttttggactcagtaaatatttgtaatgttagaaaagtctcattatttttataaaatgcatgacattttaagtatgtgttgcataaaatggattatagcagttctcatggtttaggatttttaagaaatagtccatttaatttcagcttaaccttttaaatgatctgtaaaatttctttgatagtttaggaatgttgtggggagggttcattaataaaagttcagcaattttttaactgaaatagtttatctcttttacctagtcacaaaaaaggtatgtaaacaaggccattatatgtgtttattgctctttatttccctatctagattttctaagtatcttagctttcttaatataagtttaacttggtacttactgaaaatgcctttttacccctgttaacggtattttgagcttttgaaaagaacttggttgacactgcttttattgtggataaaggagagatggtcagtaattaatggcttgaagtattattggagtggtttatcatttctgaaactaatcgtgtcagaattgactttgaaaagcattgctttttacagaaatatattaactttttaggagtaatttctagtttggattgtaatatgaaataatttaaaagggcttcgctcatatataggaaaatcgcatatggtcctagtattaaattcttattgcttactgatttttttgagttaagagttgttatatgctagaatatgaggatgtgaatataaataagagaagaaaaaagaataaagtagattgagtctccaattttatgtaagcttcagaagaactggtttgtttacatgcaagcttatagttgaaatatttttcaggaattacatgaatgacagtcttcgaaccaatgtgtttgttcgatttcaaccagagactatagcatgtgcttgcatctaccttgcagctagagcacttcagattccgttgccaactcgtccccattggtttcttctttttggtactacagaagaggaaatccaggaaatctgcatagaaacacttaggctttataccagaaaaaagccaaactatgaattactggaaaaagaagtagaaaaaagaaaagtagccttacaagaagccaaattaaaagcaaagggattgaatccggatggaactccagccctttcaaccctgggtggattttctccagcctccaagccatcatcaccaagagaagtaaaagctgaagagaaatcaccaatctccattaatgtgaagacagtcaaaaaagaacctgaggatagacaacaggcttccaaaagcccttacaatggtgtaagaacacgatcacgttctagatcacatactccaagaagacagtaagtaaatgttttcttagggaagcagtcttatttggagtttttaaaggttattgctttttctttaaaaattgaacatagattattttcaaagttaggttagaattaggcttttagtatgaggcaaattatgagaaatgagtttggagatgttctggacatacagtatcttaatggcattctgttatattttctcccatgttttttggagaagtgtaggagctacccacaaagtgcttgagggccatagtattgttcataatgtgaaaacttctttttttttttaatttcagttagaaaatgtgtttcattaaccccttattaataaccaataatcaaattaaccagtcaatgaatcttctttagttaggcctgtaattagattgttagctcttcgtggctcttcaatgtcttttgaacatgtgggagatacttaataaaaagcatagctctaggacactataaaaattgctaattactccccttggaataaagacataagaacatttgcttaagatttaatatgttatatataggcttgggcatacagcagtgaggggtggggagattttgaaaagttctggtttgtcatttatgtagctggtagttttgttttgaacctgttatgagcaaccaccggaataatctgttccccatagaaactgaacctaaacttcaaatttttattatctaagctataataataggcggagtcgatctggaacatacagctcgagatcaagaagcaggtcccgcagtcacagtgaaagccctcgaagacatcataatcatggttctcctcaccttaaggccaagcataccagagatgatttaaaaagttcaaacagacatggtcataaaaggaaaaaatctcgttctcgatctcagagcaagtctcgggatcactcagatgcagccaagaaacacaggcatgaaaggggacatcatagggacaggcgtgaacgatctcgctcctttgagaggtcccataaaagcaagcaccatggtggcagtcgctcaggacatggcaggcacaggcgctgactttctcttcctttgagcctgcatcagttcttggttttgcctatctacagtgtgatgtatggactcaatcaaaaacattaaacgcaaactgattaggatttgatttcttgaaaccctctaggtctctagaacactgaggacagtttcttttgaaaagaactatgttaatttttttgcacattaaaatgccctagcagtatctaattaaaaaccatggtcaggttcaattgtactttattatagttgtgtattgtttattgctataagaactggagcgtgaattctgtaaaaatgtatcttatttttatacagataaaattgcagacactgttctatttaagtggttatttgtttaaatgatggtgaatactttcttaacactggtttgtctgcatgtgtaaagatttttacaaggaaataaaatacaaatcttgttttttcta

SEQ ID NO: 543652 - DNA, 563 bp, Homo sapiens
ggccgggcgcggtggctcacgcctgtaatcccagctctcagggaggctaagaggcgggaggatagcttgagcccaggagttcgagacctgcctgggcaatatagcgagaccccggttctccagaaaaacggaaaaacaaaaacaaaaaacaaaaaaaaaacaaaacgtgtgtgtgcggcgcgcgcccttgggcccccgcgaagaagctttccaaaacacacattgcgcggtgggggcgcgcggggggcccaccggggggcaacggtgaacacaggggcgcccaataagcgcgtggggtcccataaggcgcagacacctgggggccaagcgagacaaagggggcgggggggactccacacacacaaatataaaaagagcgccgcgggggagaaacacagggagggcgcgtctcgtggaacacaactctcacagaagtggggaggtccgaggagggggaccacataacggggagagctcatatcacacacagaggggaggctcacaaggcgagaggcccggaatattccaatatataaccgccccgggcaccggggggggagcgt

SEQ ID NO: 543653 - DNA, 237 bp, Homo sapiens
cggcttgaatagtttgcaatgagatcttaacaagtccgtgctcgcacagaaactcgagtctatactaatagccttgagttctttagtaactcatgtatccatcttgcaaaaggatcttctggttgctattcgaatgagattctcggagcaagttacacgatatggacatgtctcgagagctattggagacacatcaagtattcacgttagaaccaaggaaatatatgaattctggtg

SEQ ID NO: 543654 - DNA, 822 bp, Homo sapiens
ggttccccgtatctgattgacactctcaggctgtgttctctcggattctcgtatggaagcacagccggcctgagggaggtcggcttcagacgccaagacttcagcgtttcgtttgggaatgtggagcagccgtatgatgtgccatatcgaagtccactgttgtgcctgctcgcagttactgttgtgagtgatgagaaaatctcatgccaaggtgctgtcctcagagttcagggtgggatgcctatgaccagcgttgcgggaagtgcagttgtccctattgtgtgcgcggctcaataacgtttcatgtatgatacatcgggcgccccaacgagcgctaacgttcatgactgtgcgcatcgtcaagcatgccttcgagatcatacacctgctcacaggcgagaaccctctgcaggtcctggtgaacgccatcatcaacagtggtccccgggaggactccacacgcattgggcgcgccgggactgtgagacgacaggctgtggatgtgtcccccctgcgccgtgtgaaccaggccatctggctgctgtgcacaggcgctcgtgaggctgccttccggaacattaagaccattgctgagtgcctggcagatgagctcatcaatgctgccaagggctcctcgaactcctatgccattaagaagaaggacgagctggagcgtgtggccaagtccaaccgctgattttcccagctgctgcccaataaacctgtctgccctttggggcagccccagcaaaaggagaagaagaaaaccgaaaaaagatcgcccatcttgtgggcgcagttgggtttaaaggaggtattacc

SEQ ID NO: 543655 - DNA, 4239 bp, Homo sapiens
  misc_feature (81)..(81): n is a, c, g, or t
  misc_feature (420)..(420): n is a, c, g, or t
  misc_feature (423)..(423): n is a, c, g, or t
gggacccgaatagggtccacagccctgtgttcttcgaatactgtaaagcagccctgctccagattccttgagggtcacttnatattacacattcgtccacacaggacaacaaagtcaccacttccacccgccaaagcgcgctcaggtcggccgccacttcccttggtacacgcggaacgcaagccgcgccgaggctaaaggaagaggccggaatgcagggcgaaggggcgcagagatgctagccaatgctgccacctctattttgggtataagggatcttgtaaagctccgttattcgtgtggctatcacaaacaaggtggtttcgaccggccttggctagagaaggcctcctcagcctctgaggatcccaaggtctgtcgcagcacccaacactcccctcgcaggcccagatgccgagngcngaggcgcggcctggagggactagttggcgcgcggctgcccggcgtggtgacgtcagggcggaagcgcacgcaggcgtgaagcggcccagaacccggcggtcacgggaatatccgtcgcgccgagaacgctggttagtcttgtttcgggttccggctgcgttgggcttgcgtgcggctcgctaagactatggcgtccgggcctcattcgacagctactgctgccgcagccgcctcatcggccgccccaagcgcgggcggctccagctccgggacgacgaccacgacgacgaccacgacgggagggatcctgatcggcgatcgcctgtactcggaagtttcacttaccatcgaccactctctgattccggaggagaggctctcgcccaccccatccatgcaggatgggctcgacctgcccagtgagacggacttacgcatcctgggctgcgagctcatccaggccgccggcattctcctccggctgccgcaggtggcgatggcaacggggcaggtgttgtttcatcgttttttctactccaaatctttcgtcaaacacagtttcgagattgttgctatggcttgtattaatcttgcatcaaaaatcgaagaagcacctagaagaataagagatgtgattaatgtattccaccacctccgccagttaagaggaaaaaggactccaagccccctgatccttgatcagaactacattaacaccaaaaatcaagttatcaaagcagagaggagggtgctaaaggagttgggattttgtgttcatgtcaagcatcctcataagatcattgttatgtatttacaagtcttagaatgtgaacgtaatcaaaccctggttcaaactgcctgggtagtccatgatggtaagtcatagaactctgccctctgcacttcagcccatgacctcaggatggcctgattggctaccctgctctccagccaatccagtgcaagctctcatccgagattcactgaagtggtccatatccatctggcagcatcttctagttctgtcggggtgtcaaaaggatttgtatatttgcttctagaagtaactatttgacatgcctatgtatttaatgtatacttgtaactatcaaaatgaatagttcatttttgatagatttgttgtgcagccattatgaattaaatggtttattaggagtttgactaaatttttatttttagtgtgtatagcatgaatactaccaaaggagacgacaaacttgcagcttaaaatgggcaccagttcccacactggcttaatttatataactgcttggctgtattgcgggtaataatattagaagcaagaagcacttcatttttaaaagagatgttactataatattgcttaaatgctttagcacttggacttcttgagatgcagatgtgtgatttggagtgctggcttatttaaaggtcaagccaaggagtttgtggttcagccacaactactgtttcctaagactattgatgtgaaggacttagtgaagtaatttttatattctgggcttcccagcaagatgtcctttttatgactgccatgcttcttttggactcagtaaatatttgtaatgttagaaaagtctcattatttttataaaatgcatgacattttaagtatgtgttgcataaaatggattatagcagttctcatggtttaggatttttaagaaatagtccatttaatttcagcttaaccttttaaatgatctgtaaaatttctttgatagtttaggaatgttgtggggagggttcattaataaaagttcagcaattttttaactgaaatagtttatctcttttacctagtcacaaaaaaggtatgtaaacaaggccattatatgtgtttattgctctttatttccctatctagattttctaagtatcttagctttcttaatataagtttaacttggtacttactgaaaatgcctttttacccctgttaacggtattttgagcttttgaaaagaacttggttgacactgcttttattgtggataaaggagagatggtcagtaattaatggcttgaagtattattggagtggtttatcatttctgaaactaatcgtgtcagaattgactttgaaaagcattgctttttacagaaatatattaactttttaggagtaatttctagtttggattgtaatatgaaataatttaaaagggcttcgctcatatataggaaaatcgcatatggtcctagtattaaattcttattgcttactgatttttttgagttaagagttgttatatgctagaatatgaggatgtgaatataaataagagaagaaaaaagaataaagtagattgagtctccaattttatgtaagcttcagaagaactggtttgtttacatgcaagcttatagttgaaatatttttcaggaattacatgaatgacagtcttcgaaccaatgtgtttgttcgatttcaaccagagactatagcatgtgcttgcatctaccttgcagctagagcacttcagattccgttgccaactcgtccccattggtttcttctttttggtactacagaagaggaaatccaggaaatctgcatagaaacacttaggctttataccagaaaaaagccaaactatgaattactggaaaaagaagtagaaaaaagaaaagtagccttacaagaagccaaattaaaagcaaagggattgaatccggatggaactccagccctttcaaccctgggtggattttctccagcctccaagccatcatcaccaagagaagtaaaagctgaagagaaatcaccaatctccattaatgtgaagacagtcaaaaaagaacctgaggatagacaacaggcttccaaaagcccttacaatggtgtaagaaaagacagcaagagaagtagaaatagcagaagtgcaagtcgatcgaggtcaagaacacgatcacgttctagatcacatactccaagaagacactataataataggcggagtcgatctggaacatacagctcgagatcaagaagcaggtcccgcagtcacagtgaaagccctcgaagacatcataatcatggttctcctcaccttaaggccaagcataccagagatgatttaaaaagttcaaacagacatggtcataaaaggaaaaaatctcgttctcgatctcagagcaagtctcgggatcactcagatgcagccaagaaacacaggcatgaaaggggacatcatagggacaggcgtgaacgatctcgctcctttgagaggtcccataaaagcaagcaccatggtggcagtcgctcaggacatggcaggcacaggcgctgactttctcttcctttgagcctgcatcagttcttggttttgcctatctacagtgtgatgtatggactcaatcaaaaacattaaacgcaaactgattaggatttgatttcttgaaaccctctaggtctctagaacactgaggacagtttcttttgaaaagaactatgttaatttttttgcacattaaaatgccctagcagtatctaattaaaaaccatggtcaggttcaattgtactttattatagttgtgtattgtttattgctataagaactggagcgtgaattctgtaaaaatgtatcttatttttatacagataaaattgcagacactgttctatttaagtggttatttgtttaaatgatggtgaatactttcttaacactggtttgtctgcatgtgtaaagatttttacaaggaaataaaatacaaatcttgttttttctaaactgcttcaaataccttatttaaataaattattaaaaaggaaaattttaatagca

SEQ ID NO: 543656 - DNA, 1170 bp, Homo sapiens
  misc_feature (399)..(399): n is a, c, g, or t
  misc_feature (988)..(988): n is a, c, g, or t
  misc_feature (994)..(994): n is a, c, g, or t
  misc_feature (1017)..(1017): n is a, c, g, or t
  misc_feature (1021)..(1021): n is a, c, g, or t
  misc_feature (1058)..(1058): n is a, c, g, or t
  misc_feature (1081)..(1081): n is a, c, g, or t
tatagtggtgcatcattttacacccctgtcgcaaatatatattgcgcgtgtatataaaacgtgcgcgcgggaggaagtcacaaatgggctcttcacggaccagtttgtgtccctcatctaggaggccccttttgtctgtcctccccccccaggggtgtcacacgccctgttatagaatggattcccccccttttttgggggcgcctcggggactttttaccacccccctgtgattgagatatcactttgccctctagggcgtttaccccctatttcgcgcaagtggaaaacgttgaagatatttggatgcctacaatgtgcgccaagaagttgcaaaacgcaacagcaaaattttgggggaaatgggtttgccccgcaataactcggcccgaacccggntttgaatgggccacacccacattggttcctggggacatgcttcacatcttgcttgaacgccagtgtccaagttcccgggtgtacacccggagccagttctctggcgccactggattgggcccagtttaatctgcgtccaccggtgggagcccacagtgtaacacagtccacgaagatatatcccgtgagaaattcctcgcaagagatgtctgtgggtgcccctttctgtttcctggagaggagatataatgttccgggtaacacaccaaagctaacccacggagagggtttgcctgaaagcacacaatggtggcctaaaatttacaatatttttagaatgagagttctacgaacacacgtggctgtaaactcgttttgtccataactttctgtgcacaatggagaaggagattgtccccttaagaatctttcccacccactcaccacaatgaaatttgaaagaatgagaaaagagaaactcacgttggctacaaaacacactgcactttttttctgttctaattaatgggagaaacaatcaagaacgtttctgaggtaaagaaaatattctccactggcattagttaanataacngatattgtttaaatcatggtatnacangcaatttatatcagataaaagcagaacacatttttgnactgcctctcttaaatgctgaangtaactgttatgtataaatccatttagttttatgttctaaagaactatttgtgcaactccagattttcagtaaaatagtattactagta

SEQ ID NO: 543657 - DNA, 2781 bp, Homo sapiens
  misc_feature (81)..(81): n is a, c, g, or t
  misc_feature (420)..(420): n is a, c, g, or t
  misc_feature (423)..(423): n is a, c, g, or t
  misc_feature (1205)..(1205): n is a, c, g, or t
gggacccgaatagggtccacagccctgtgttcttcgaatactgtaaagcagccctgctccagattccttgagggtcacttnatattacacattcgtccacacaggacaacaaagtcaccacttccacccgccaaagcgcgctcaggtcggccgccacttcccttggtacacgcggaacgcaagccgcgccgaggctaaaggaagaggccggaatgcagggcgaaggggcgcagagatgctagccaatgctgccacctctattttgggtataagggatcttgtaaagctccgttattcgtgtggctatcacaaacaaggtggtttcgaccggccttggctagagaaggcctcctcagcctctgaggatcccaaggtctgtcgcagcacccaacactcccctcgcaggcccagatgccgagngcngaggcgcggcctggagggactagttggcgcgcggctgcccggcgtggtgacgtcagggcggaagcgcacgcaggcgtgaagcggcccagaacccggcggtcacgggaatatccgtcgcgccgagaacgctggttagtcttgtttcgggttccggctgcgttgggcttgcgtgcggctcgctaagactatggcgtccgggcctcattcgacagctactgctgccgcagccgcctcatcggccgccccaagcgcgggcggctccagctccgggacgacgaccacgacgacgaccacgacgggagggatcctgatcggcgatcgcctgtactcggaagtttcacttaccatcgaccactctctgattccggaggagaggctctcgcccaccccatccatgcaggatgggctcgacctgcccagtgagacggacttacgcatcctgggctgcgagctcatccaggccgccggcattctcctccggctgccgcaggtggcgatggcaacggggcaggtgttgtttcatcgttttttctactccaaatctttcgtcaaacacagtttcgagattgttgctatggcttgtattaatcttgcatcaaaaatcgaagaagcacctagaagaataagagatgtgattaatgtattccaccacctccgccagttaagaggaaaaagcgaccagctacatttaccaaagcctgggtgatgtggagtggtacatagagatgaagctgtcgtcatggcaacatgagtgaagtatcgaaaatccccaaggagaagcnagtgctctgagaataggtcactggaatcggggactaacaggactccaagccccctgatccttgatcagaactacattaacaccaaaaatcaagttatcaaagcagagaggagggtgctaaaggagttgggattttgtgttcatgtcaagcatcctcataagatcattgttatgtatttacaagtcttagaatgtgaacgtaatcaaaccctggttcaaactgcctggaattacatgaatgacagtcttcgaaccaatgtgtttgttcgatttcaaccagagactatagcatgtgcttgcatctaccttgcagctagagcacttcagattccgttgccaactcgtccccattggtttcttctttttggtactacagaagaggaaatccaggaaatctgcatagaaacacttaggctttataccagaaaaaagccaaactatgaattactggaaaaagaagtagaaaaaagaaaagtagccttacaagaagccaaattaaaagcaaagggattgaatccggatggaactccagccctttcaaccctgggtggattttctccagcctccaagccatcatcaccaagagaagtaaaagctgaagagaaatcaccaatctccattaatgtgaagacagtcaaaaaagaacctgaggatagacaacaggcttccaaaagcccttacaatggtgtaagaaaagacagcaagagaagtagaaatagcagaagtgcaagtcgatcgaggtcaagaacacgatcacgttctagatcacatactccaagaagacactataataataggcggagtcgatctggaacatacagctcgagatcaagaagcaggtcccgcagtcacagtgaaagccctcgaagacatcataatcatggttctcctcaccttaaggccaagcataccagagatgatttaaaaagttcaaacagacatggtcataaaaggaaaaaatctcgttctcgatctcagagcaagtctcgggatcactcagatgcagccaagaaacacaggcatgaaaggggacatcatagggacaggcgtgaacgatctcgctcctttgagaggtcccataaaagcaagcaccatggtggcagtcgctcaggacatggcaggcacaggcgctgactttctcttcctttgagcctgcatcagttcttggttttgcctatctacagtgtgatgtatggactcaatcaaaaacattaaacgcaaactgattaggatttgatttcttgaaaccctctaggtctctagaacactgaggacagtttcttttgaaaagaactatgttaatttttttgcacattaaaatgccctagcagtatctaattaaaaaccatggtcaggttcaattgtactttattatagttgtgtattgtttattgctataagaactggagcgtgaattctgtaaaaatgtatcttatttttatacagataaaattgcagacactgttctatttaagtggttatttgtttaaatgatggtgaatactttcttaacactggtttgtctgcatgtgtaaagatttttacaaggaaataaaatacaaatcttgttttttcta

SEQ ID NO: 543658 - DNA, 727 bp, Homo sapiens
  misc_feature (33)..(33): n is a, c, g, or t
  misc_feature (93)..(93): n is a, c, g, or t
  misc_feature (114)..(114): n is a, c, g, or t
  misc_feature (253)..(253): n is a, c, g, or t
  misc_feature (279)..(279): n is a, c, g, or t
  misc_feature (322)..(322): n is a, c, g, or t
  misc_feature (381)..(381): n is a, c, g, or t
  misc_feature (384)..(384): n is a, c, g, or t
  misc_feature (393)..(393): n is a, c, g, or t
  misc_feature (419)..(419): n is a, c, g, or t
  misc_feature (424)..(424): n is a, c, g, or t
  misc_feature (455)..(455): n is a, c, g, or t
  misc_feature (472)..(472): n is a, c, g, or t
  misc_feature (476)..(476): n is a, c, g, or t
  misc_feature (478)..(478): n is a, c, g, or t
  misc_feature (480)..(480): n is a, c, g, or t
  misc_feature (487)..(487): n is a, c, g, or t
  misc_feature (500)..(501): n is a, c, g, or t
  misc_feature (508)..(508): n is a, c, g, or t
  misc_feature (511)..(511): n is a, c, g, or t
  misc_feature (529)..(529): n is a, c, g, or t
  misc_feature (545)..(545): n is a, c, g, or t
  misc_feature (551)..(551): n is a, c, g, or t
  misc_feature (574)..(574): n is a, c, g, or t
  misc_feature (578)..(578): n is a, c, g, or t
  misc_feature (615)..(615): n is a, c, g, or t
  misc_feature (638)..(638): n is a, c, g, or t
ttttatatgaaattcacagcctatctggaggcngctggcattcacaacccactgaataagatatacataacaacaaagcgcttaccctatttnccaattgtaaactttctattnttgatcgctcagttgccaaaacttcaatacaacaaaaatctgggaatggtctgccgaaaaccgaccgacccggttgattggccagtttatctgctccacggtggagcagtgtacaagccagaagatacctgaaattccngcagatgttgtgggtgcccttctgtncctggaggattatgttcggtacacaaagctacccaggagggtngctgaagcacatgtgcctaatttcatttttgatgagttcagaacagtgctgtaactgtnttncctacttcntcaatggaaggattgcccttagatcnccccnccatcacaaatgaatttgaagatgaaaaganacccagtcgcccatacnaccncntnttccctncctattatgggannccccagncgntctgagtaagatatatcncatggcattagttaanataacngatattgtttaaatcatggtatnacangcaatttatatcagataaaagcagaacacatttttgnactgcctctcttaaatgctgaangtaactgttatgtataaatccatttagttttatgttctaaagaactatttgtgcaactccagattttcagtaaaatagtattactagta

SEQ ID NO: 543659 - DNA, 839 bp, Homo sapiens
  misc_feature (413)..(413): n is a, c, g, or t
  misc_feature (551)..(551): n is a, c, g, or t
  misc_feature (564)..(564): n is a, c, g, or t
  misc_feature (576)..(576): n is a, c, g, or t
  misc_feature (605)..(605): n is a, c, g, or t
  misc_feature (610)..(610): n is a, c, g, or t
  misc_feature (663)..(663): n is a, c, g, or t
  misc_feature (753)..(753): n is a, c, g, or t
  misc_feature (773)..(773): n is a, c, g, or t
  misc_feature (800)..(800): n is a, c, g, or t
ggccgggcgcggtggctcacgcctgtaatcccagctctcagggaggctaagaggcgggaggatagcttgagcccaggagttcgagacctgcctgggcaatatagcgaggaccccgttctccagaaacaggaacaacaaacaaaacgcaagggcacaaaaacaacacaaaacagacaacaacaaaaaaaaactcttgttgcgggcgcgccccgcggcccctggaaaaaagttttctacaaaacaactttgtgggtggggcgcgccgggcgccccaatttgagttaaggtgtggacaagcgtgcgcacacaaagagggtgtgacccacaagagagaaacacctcggggccacagaggcagcagagggtgcgtggcggttcctctcaccacaaaatataaaaaaagacacggccgncgggcgggggagcacacacccgcgagcgcgctgtgcttaggcagccaaaactaccacaggacgagtggacgacggtgcctcaagcgacaggagcagcaagatcacaagtggcgccggtccgtacttccaaacaccaangacggggagtganttgccacaccangaggcagagatgcgctgtcaccgatgatntaatnatagatagagtttagtaccagcgcccgcccgggagggcgtgggagtgtgaggnggggtagatagacgaacggaacagcatgtaagactaacatcgaccgtaccaggagcaaaagggcaaacgacaatcgatcgacaagctagngtaacgcgacaggaaccgangagggcatgaagctaattggacctgcncagtaccagggacaggaacaggtgacggccccacagagg

SEQ ID NO: 543660 - DNA, 899 bp, Homo sapiens
tactagcttaatattgtaattctaattcaaacaactctgaggttctggtcttcatcagtaatagttgaggaataatatactagcaaagaatggcctaatgtttgtcatgactgttacctggactgacaacttcttttaaaagatacaacccattgattgaaccaattataaagtgatctagtgatcaaaattctaaacgtgactgactttacttcgtacggaactgtcttcctaagtggggaccgaagttgcagtacgcgaggcattatgcaaaatcctacacaagctttttatacaattgttgctgctgggtagctcccgcagtgtttcataacggccatcctgttttcccggccaattcccgccattttaggggttgtatgctgtttgtaagagtattttgtgaggatactttatgctgtgttatctaaacagtgtcacttcccagttttgcctaggtcgtgacttgctggagctaatttagggaaacgacgagctattacaacaacctctggggaattgtctcaactgtgactaatctctagatttttgtctacgtttgtaatctgacctttaactgaaacattacttacttaagttttgctgaggatttatgagattttctaaccgccaattcggtcccctttttttaaaaaaggactgtcttgctaggtgtgatactggataggttcagatctgcgataaatggcaagctgtgtctagctcgtagatatgggaacttattcttgacaggtgtgaaaatccgctatgcaattggacgagattgtagcgacctgattaactaagtcatccaatggtataaacatttgtggggcccatttaaccacagagctgatgcaacttggccgaagattcgacccgggagacaacgggcaagc

SEQ ID NO: 543661 - DNA, 347 bp, Homo sapiens
  misc_feature (10)..(10): n is a, c, g, or t
  misc_feature (12)..(12): n is a, c, g, or t
  misc_feature (16)..(16): n is a, c, g, or t
  misc_feature (23)..(23): n is a, c, g, or t
  misc_feature (28)..(28): n is a, c, g, or t
  misc_feature (38)..(38): n is a, c, g, or t
  misc_feature (40)..(40): n is a, c, g, or t
  misc_feature (45)..(45): n is a, c, g, or t
  misc_feature (61)..(61): n is a, c, g, or t
  misc_feature (114)..(114): n is a, c, g, or t
  misc_feature (148)..(148): n is a, c, g, or t
  misc_feature (190)..(190): n is a, c, g, or t
  misc_feature (211)..(211): n is a, c, g, or t
  misc_feature (244)..(244): n is a, c, g, or t
  misc_feature (258)..(258): n is a, c, g, or t
  misc_feature (267)..(267): n is a, c, g, or t
  misc_feature (300)..(300): n is a, c, g, or t
  misc_feature (310)..(310): n is a, c, g, or t
  misc_feature (312)..(312): n is a, c, g, or t
  misc_feature (316)..(316): n is a, c, g, or t
  misc_feature (318)..(318): n is a, c, g, or t
  misc_feature (332)..(332): n is a, c, g, or t
  misc_feature (339)..(339): n is a, c, g, or t
  misc_feature (344)..(344): n is a, c, g, or t
aaaacggacngngccnatgtgcnaagcnttgcattgcncntgcanggtccgactctaaganggatcccccgtcaagcatttccaagcaagccgggtttgccgccaagaacacangggtggtcggtgaaaacctacccctaaaaggccnaaattggggaaaaggaaaaagactcatatcaacattggtcgncattgggacacggtagattcngggcaaggtccaccactacttggccatcttgantctataaatgcggnggggcatcngacaaaaggaaccatttgaaaaattttgagaanggaggctgcntnatantnggaaaggggctccnttcaagntatgncct

SEQ ID NO: 543662 - DNA, 2837 bp, Homo sapiens
  misc_feature (81)..(81): n is a, c, g, or t
  misc_feature (420)..(420): n is a, c, g, or t
  misc_feature (423)..(423): n is a, c, g, or t
gggacccgaatagggtccacagccctgtgttcttcgaatactgtaaagcagccctgctccagattccttgagggtcacttnatattacacattcgtccacacaggacaacaaagtcaccacttccacccgccaaagcgcgctcaggtcggccgccacttcccttggtacacgcggaacgcaagccgcgccgaggctaaaggaagaggccggaatgcagggcgaaggggcgcagagatgctagccaatgctgccacctctattttgggtataagggatcttgtaaagctccgttattcgtgtggctatcacaaacaaggtggtttcgaccggccttggctagagaaggcctcctcagcctctgaggatcccaaggtctgtcgcagcacccaacactcccctcgcaggcccagatgccgagngcngaggcgcggcctggagggactagttggcgcgcggctgcccggcgtggtgacgtcagggcggaagcgcacgcaggcgtgaagcggcccagaacccggcggtcacgggaatatccgtcgcgccgagaacgctggttagtcttgtttcgggttccggctgcgttgggcttgcgtgcggctcgctaagactatggcgtccgggcctcattcgacagctactgctgccgcagccgcctcatcggccgccccaagcgcgggcggctccagctccgggacgacgaccacgacgacgaccacgacgggagggatcctgatcggcgatcgcctgtactcggaagtttcacttaccatcgaccactctctgattccggaggagaggctctcgcccaccccatccatgcaggatgggctcgacctgcccagtgagacggacttacgcatcctgggctgcgagctcatccaggccgccggcattctcctccggctgccgcaggtggcgatggcaacggggcaggtgttgtttcatcgttttttctactccaaatctttcgtcaaacacagtttcgagattgttgctatggcttgtattaatcttgcatcaaaaatcgaagaagcacctagaagaataagagatgtgattaatgtattccaccacctccgccagttaagaggaaaaaggactccaagccccctgatccttgatcagaactacattaacaccaaaaatcaagttatcaaagcagagaggagggtgctaaaggagttgggattttgtgttcatgtcaagcatcctcataagatcattgttatgtatttacaagtcttagaatgtgaacgtaatcaaaccctggttcaaactgcctgggtagtccatgatggtaagtcatagaactctgccctctgcacttcagcccatgacctcaggatggcctgattggctaccctgctctccagccaatccagtgcaagctctcatccgagattcactgaagtggtccatatccatctggcagcatcttctagttctgtcggggtgtcaaaaggatttgtatatttgcttctagaaggaattacatgaatgacagtcttcgaaccaatgtgtttgttcgatttcaaccagagactatagcatgtgcttgcatctaccttgcagctagagcacttcagattccgttgccaactcgtccccattggtttcttctttttggtactacagaagaggaaatccaggaaatctgcatagaaacacttaggctttataccagaaaaaagccaaactatgaattactggaaaaagaagtagaaaaaagaaaagtagccttacaagaagccaaattaaaagcaaagggattgaatccggatggaactccagccctttcaaccctgggtggattttctccagcctccaagccatcatcaccaagagaagtaaaagctgaagagaaatcaccaatctccattaatgtgaagacagtcaaaaaagaacctgaggatagacaacaggcttccaaaagcccttacaatggtgtaagaaaagacagcaagagaagtagaaatagcagaagtgcaagtcgatcgaggtcaagaacacgatcacgttctagatcacatactccaagaagacactataataataggcggagtcgatctggaacatacagctcgagatcaagaagcaggtcccgcagtcacagtgaaagccctcgaagacatcataatcatggttctcctcaccttaaggccaagcataccagagatgatttaaaaagttcaaacagacatggtcataaaaggaaaaaatctcgttctcgatctcagagcaagtctcgggatcactcagatgcagccaagaaacacaggcatgaaaggggacatcatagggacaggcgtgaacgatctcgctcctttgagaggtcccataaaagcaagcaccatggtggcagtcgctcaggacatggcaggcacaggcgctgactttctcttcctttgagcctgcatcagttcttggttttgcctatctacagtgtgatgtatggactcaatcaaaaacattaaacgcaaactgattaggatttgatttcttgaaaccctctaggtctctagaacactgaggacagtttcttttgaaaagaactatgttaatttttttgcacattaaaatgccctagcagtatctaattaaaaaccatggtcaggttcaattgtactttattatagttgtgtattgtttattgctataagaactggagcgtgaattctgtaaaaatgtatcttatttttatacagataaaattgcagacactgttctatttaagtggttatttgtttaaatgatggtgaatactttcttaacactggtttgtctgcatgtgtaaagatttttacaaggaaataaaatacaaatcttgttttttcta

SEQ ID NO: 543663 - DNA, 113 bp, Homo sapiens
gtgtgaatcgcctatacagctacagcgagcactgcatcaaaactctcatcccaggaattaatataggtcagccacattcatgggcatctcctccactgtagtattgtataaag

SEQ ID NO: 543664 - DNA, 282 bp, Homo sapiens
  misc_feature (108)..(108): n is a, c, g, or t
attctttgtggcgccacagtttggtgtgtgcttccgtgggaccagaccctctttgcccaaaccaccaagggtcttgccacagggcagggtgcctctagcgccatactnaaaaccctgcccaagagggtggtgctggtgttgcgggaacgtggccatttctgccgggacgcgggggtgctgctgggctcgagggccctgagggagcggcaccaggccctgatgggctaccagctcctgccgctacccttcgaggaactggagtcccagagaggcctgccccag

SEQ ID NO: 543665 - DNA, 146 bp, Homo sapiens
  misc_feature (120)..(120): n is a, c, g, or t
tctatgtaagatctacaagacaactactatctctctttatggctgtcttcttcctctccagggtgatagacaacctccgtgcagggatgcgacgcattatatgatctctcatcattttanagcaacaaagtagtcatgcagtcagg

SEQ ID NO: 543666 - DNA, 2036 bp, Homo sapiens
tcccttctgtgttaatagtaaagcatgttgcctaataactacaaccctgaccaaatttgggcctggatctcatgggtcacgtggagttttaaatacgatttttaatttacttgggtaattgagctgaatctttagttttcagattacttttttaaacagataggctcttagaacaaattattaaaaacataataccccattggaggggaatctggattaactacccactgttcccaccccccccaacttttgaaaaattttggccatatagaatgcatgaaaaatcagtatgatcttatgaggactttatagtactgtaaatcttaggagcactttagttgttttgtttgtttgtttgttttaccagtcaaatagcagtgggagattgtataccaactttagtgacactgatattagtaagttctgataacccactaccatcggaccagcctggagcacattactttggccagtggaaagtctcttggagagactttgaggactccaagccccctgatccttgatcagaactacattaacaccaaaaatcaagttatcaaagcagagaggagggtgctaaaggagttgggattttgtgttcatgtcaagcatcctcataagatcattgttatgtatttacaagtcttagaatgtgaacgtaatcaaaccctggttcaaactgcctggaattacatgaatgacagtcttcgaaccaatgtgtttgttcgatttcaaccagagactatagcatgtgcttgcatctaccttgcagctagagcacttcagattccgttgccaactcgtccccattggtttcttctttttggtactacagaagaggaaatccaggaaatctgcatagaaacacttaggctttataccagaaaaaagccaaactatgaattactggaaaaagaagtagaaaaaagaaaagtagccttacaagaagccaaattaaaagcaaagggattgaatccggatggaactccagccctttcaaccctgggtggattttctccagcctccaagccatcatcaccaagagaagtaaaagctgaagagaaatcaccaatctccattaatgtgaagacagtcaaaaaagaacctgaggatagacaacaggcttccaaaagcccttacaatggtgtaagaaaagacagcaagagaagtagaaatagcagaagtgcaagtcgatcgaggtcaagaacacgatcacgttctagatcacatactccaagaagacactataataataggcggagtcgatctggaacatacagctcgagatcaagaagcaggtcccgcagtcacagtgaaagccctcgaagacatcataatcatggttctcctcaccttaaggccaagcataccagagatgatttaaaaagttcaaacagacatggtcataaaaggaaaaaatctcgttctcgatctcagagcaagtctcgggatcactcagatgcagccaagaaacacaggcatgaaaggggacatcatagggacaggcgtgaacgatctcgctcctttgagaggtcccataaaagcaagcaccatggtggcagtcgctcaggacatggcaggcacaggcgctgactttctcttcctttgagcctgcatcagttcttggttttgcctatctacagtgtgatgtatggactcaatcaaaaacattaaacgcaaactgattaggatttgatttcttgaaaccctctaggtctctagaacactgaggacagtttcttttgaaaagaactatgttaatttttttgcacattaaaatgccctagcagtatctaattaaaaaccatggtcaggttcaattgtactttattatagttgtgtattgtttattgctataagaactggagcgtgaattctgtaaaaatgtatcttatttttatacagataaaattgcagacactgttctatttaagtggttatttgtttaaatgatggtgaatactttcttaacactggtttgtctgcatgtgtaaagatttttacaaggaaataaaatacaaatcttgttttttcta

SEQ ID NO: 543667 - DNA, 475 bp, Homo sapiens
ctgcttccacccatggggatccggttcaaatgaggaagtggatgagctgtcagagaagcacctattgcaaaaggggggatttcaattacctcgagttcacccgcctcctgaaacctggagcccaaggccaagatggctggaagaactttagctaaaatcttccagttacattgtcttactcttttttacttttcagaccctccccccccctcataggacctggtgcatgcaacttagtttcccagctttgcctcttctttttgagggatttattcccggcccttttgccccttagcccttggataatccggctgggaatgggggtgaggggggtaattggattgaaaaaggtcgcgaattaaaatcccccaatgtggaagccccgaaaaatatatttggatttttgggtttggtgggtttttccctttttttataataaaaatggttttttgaaataaaggttttgctggcccca

SEQ ID NO: 543668 - DNA, 3134 bp, Homo sapiens
ttttttttttttaaagttaaagcaagtttattaagaaagtaaaggaataaagaatggctactccataggcatagcagccccgagggctgctggttgcccattttaacggttatttcttgatgatatgctaaacaaggggtgtattattcatgcctcccctttttagaccatataggataacttcctgatgttgccatggcatttgtaaactgtcatggcgctggtgggagtgtagcagtgaggacgaccagaggtcactctcgttgccatcttggttttggtgggttttggctggcttctttactgcaaccattttatcagcaagcggctcgctaagactatggcgtccgggcctcattcgacagctactgctgccgcagccgcctcatcggccgccccaagcgcgggcggctccagctccgggacgacgaccacgacgacgaccacgacgggagggatcctgatcggcgatcgcctgtactcggaagtttcacttaccatcgaccactctctgattccggaggagaggctctcgcccaccccatccatgcaggatgggctcgacctgcccagtgagacggacttacgcatcctgggctgcgagctcatccaggccgccggcattctcctccggctgccgcaggtggcgatggcaacggggcaggtgttgtttcatcgttttttctactccaaatctttcgtcaaacacagtttcgagattgttgctatggcttgtattaatcttgcatcaaaaatcgaagaagcacctagaagaataagagatgtgattaatgtattccaccacctccgccagttaagaggaaaaagcgaccagctacatttaccaaagcctgggtgatgtggagtggtacatagagatgaagctgtcgtcatggcaacaaggactccaagccccctgatccttgatcagaactacattaacaccaaaaatcaagttatcaaagcagagaggagggtgctaaaggagttgggattttgtgttcatgtcaagcatcctcataagatcattgttatgtatttacaagtcttagaatgtgaacgtaatcaaaccctggttcaaactgcctggaattacatgaatgacagtcttcgaaccaatgtgtttgttcgatttcaaccagagactatagcatgtgcttgcatctaccttgcagctagagcacttcagattccgttgccaactcgtccccattggtttcttctttttggtactacagaagaggaaatccaggaaatctgcatagaaacacttaggctttataccagaaaaaagccaaactatgaattactggaaaaagaagtagaaaaaagaaaagtagccttacaagaagccaaattaaaagcaaagggattgaatccggatggaactccagccctttcaaccctgggtggattttctccagcctccaagccatcatcaccaagagaagtaaaagctgaagagaaatcaccaatctccattaatgtgaagacagtcaaaaaagaacctgaggatagacaacaggcttccaaaagcccttacaatggtgtaagaaaagacagcaagagaagtagaaatagcagaagtgcaagtcgatcgaggtcaagaacacgatcacgttctagatcacatactccaagaagacagtaagtaaatgttttcttagggaagcagtcttatttggagtttttaaaggttattgctttttctttaaaaattgaacatagattattttcaaagttaggttagaattaggcttttagtatgaggcaaattatgagaaatgagtttggagatgttctggacatacagtatcttaatggcattctgttatattttctcccatgttttttggagaagtgtaggagctacccacaaagtgcttgagggccatagtattgttcataatgtgaaaacttctttttttttttaatttcagttagaaaatgtgtttcattaaccccttattaataaccaataatcaaattaaccagtcaatgaatcttctttagttaggcctgtaattagattgttagctcttcgtggctcttcaatgtcttttgaacatgtgggagatacttaataaaaagcatagctctaggacactataaaaattgctaattactccccttggaataaagacataagaacatttgcttaagatttaatatgttatatataggcttgggcatacagcagtgaggggtggggagattttgaaaagttctggtttgtcatttatgtagctggtagttttgttttgaacctgttatgagcaaccaccggaataatctgttccccatagaaactgaacctaaacttcaaatttttattatctaagctataataataggcggagtcgatctggaacatacagctcgagatcaagaagcaggtcccgcagtcacagtgaaagccctcgaagacatcataatcatggttctcctcaccttaaggccaagcataccagagatgatttaaaaagttcaaacagacatggtcataaaaggaaaaaatctcgttctcgatctcagagcaagtctcgggatcactcagatgcagccaagaaacacaggcatgaaaggggacatcatagggacaggcgtgaacgatctcgctcctttgagaggtcccataaaagcaagcaccatggtggcagtcgctcaggacatggcaggcacaggcgctgactttctcttcctttgagcctgcatcagttcttggttttgcctatctacagtgtgatgtatggactcaatcaaaaacattaaacgcaaactgattaggatttgatttcttgaaaccctctaggtctctagaacactgaggacagtttcttttgaaaagaactatgttaatttttttgcacattaaaatgccctagcagtatctaattaaaaaccatggtcaggttcaattgtactttattatagttgtgtattgtttattgctataagaactggagcgtgaattctgtaaaaatgtatcttatttttatacagataaaattgcagacactgttctatttaagtggttatttgtttaaatgatggtgaatactttcttaacactggtttgtctgcatgtgtaaagatttttacaaggaaataaaatacaaatcttgttttttcta

SEQ ID NO: 543669 - DNA, 349 bp, Homo sapiens
  misc_feature (35)..(35): n is a, c, g, or t
ctgagctgcctcttcaatttagagttgtgtacttnttgctcccccaaacatttctgtatagagggggttgttctaaggatcaaatgtaattaactggataggcagatgtgaaacagtctctgttgtgaggaacaaaaatcaaatgcaggaatgctgccctggcccaggatggcttccaacagcctcatgaaagacccaggacctaatgtcactgccctaccagggcaaagcaacttgcaaaggtggtgactaaatggccaccactaaaggtcccagcccagcccagggtaagtacaggcgctttctcagcttagtgggccccaagagtgctatgtgactctgtcaactc

SEQ ID NO: 543670 - DNA, 173 bp, Homo sapiens
agcatgacgccgaagccagcgccgcgcgccgtgaacgagccgggtttgtgcgcggcatcgagtcgcacgattctcaagcgcgccatcgcgccgctggcggacgcgctgccgcggcgcagcaggaacgcgtggcgcaggcgctgtcgctggtctacggcaccgaagtgttcctg

SEQ ID NO: 543671 - DNA, 767 bp, Homo sapiens
  misc_feature (138)..(138): n is a, c, g, or t
  misc_feature (355)..(355): n is a, c, g, or t
  misc_feature (357)..(357): n is a, c, g, or t
  misc_feature (361)..(361): n is a, c, g, or t
  misc_feature (386)..(386): n is a, c, g, or t
  misc_feature (398)..(398): n is a, c, g, or t
  misc_feature (468)..(468): n is a, c, g, or t
  misc_feature (484)..(484): n is a, c, g, or t
  misc_feature (559)..(559): n is a, c, g, or t
  misc_feature (658)..(658): n is a, c, g, or t
gaagcgtctttcggccggctctgcgcgatggacacggttgagcctgcccgttgcgctgagcgtcacgtccacgtggcccagcccgtcccccagacgggagaaaaggagagagcccggtgaggtcccaggtgcggaagncaaatgagactgccaggcggccacggcgtgggaaaccgggcacttgaacgaagttgtgagggcctccgaagttgatagggtgcgtaccgggtccaggcaacgaaaagccaccttaccctcgaaggtgatccgggaatggcgccgcacggccaggtctgcgatgttaacgcggttgaagattacgtttctatgcagccgcggaagttatgccgatacngnaggnttcttccgcgcggccccaccagacntcgatgaacatntcagtgtcaggttcagcctctcgaagtctccattgagaataaagcgctgcacatagccgtccaggtgaanttacatcgcggccaantcggtcaccgcacatagtgcagtgctggtcattgaggactcgctgcgctcacggtggtgtgacctgtctggctgnataggctgctgccaggctcatgtgcagcagcagtgtgccccctccagctcgagcgtcacgtagtcgccctggggcccctcgggctgcagcagaagaccntccttctcctcggtcttgaagctgaaggcgaacacgtccacaggcttcggctgacccctcgcgggaagcgtaggagatggcatcgtcgccgtcgaaatagagtatgtcg

SEQ ID NO: 543672 - DNA, 685 bp, Homo sapiens
cgagagaagtggggcctgagatctgctgccgtccagcccgcccgccgtcgtctgcgctgctccggcgccctttcccctgtctggcccagtagtggagacccagtgactgaactctccagtgcctcctcccctgagccctgcagctggctggagctcttgccattcctaagtaaaacgaagcacataaagaacacaacaatataagaaaataagaaaaacaaacaatacaacaagataaaacaatacgaaacacacaatacaaaaacaaataagaacacaaacaaaaaacggggcgcgcgcgcgcgcgccctctcaccatcctctctctctcgactgaagagaccacaaatgacaacaacaaatcaaaagcaccaccaaatgaatatattatgaagagaacgaaagagagaaggtctcacaccaatagaggaaggaaaagccacatttaaaaatgaagacccggtgagagagagaagagaatcggaactaatgaacccataaacgaacacaaatacccagctggtaaaacacacagcacaaacagagagaaaagctaataatacagaaacagaaaagcgatctacgggacagaacgtaaaaaacgcctactcgtacagcccgcactgggtggaggaagcggacaatacagtaagagtaacgacaccaaagatagccactgtacaac

SEQ ID NO: 543673 - DNA, 354 bp, Homo sapiens
ccttcctgaaaggatttgtaaaaactggttcttggaaaggggctgcagaagacctcccaaggtggatgtagtagaaccgcccggcgagcaccaaccgtgacaggtccgggcacggccgagcggagcagcgggagaactgccctccgcagccgaaaggggaccacgagaagcgctcctggccggtggcgcagaggtcgaggaagtccgcgaaccgaggcgctccagctccggcgatgccgcctcgccctccccgccgcggttgatgcggcacgtgcacgccgccgcccgcaccaggacctgggccgggtcgcacggcttggcccccggccaccgcttcgacctagctgagtgtgt

SEQ ID NO: 543674 - DNA, 416 bp, Homo sapiens
aaggatcccggtgtgcagacaatattgcctttaagatgttttttgttttgttttgtttgtttgttttcgagacagagtcgcgctttgtcacccaggctggagtgcagtggtgggatcttggcttactgcaagctccgcctcctgggttcatgcaattctgcctcagccttccatgtagctgggactacaggccccgccaccacgcctggataatttttttgtattttcagtagagacagggtttcgccatgttgcccagggtggtctcaaactcctgggctcaagtgatccacccgccttgcctcccaaagtgctgggattgcaggcatggcccactgtgctagcctaggatttttttttttttttaaaaaaagatttagcccttaaaattctattgtgcaatattggtctgcaca

SEQ ID NO: 543675 - DNA, 184 bp, Homo sapiens
acaaggtatgagaaatgggacacccgagacgagcacccaaagtgcacaaagctagagtaaaaagctagcccctatcaagcagaactagactcagttttcaatatccatacctaaaactaccttttaaccacagcttagctatctcaaaggcctaaccaagcctatggcaccgccagatacctat

SEQ ID NO: 543676 - DNA, 800 bp, Homo sapiens
tccattcagtgcacgcgttacttggctaaaaggaggtgagcggcactctgcccttccagagtcaagcatggagcaacaggatcagagacatgaaggaagggaggctgagcgcttgtgcttgaccctggacaaccctggatagtctgcctatgggtcatccattccacggtatggtatactaacatcgggtggtcgttggctgtcgaacatccgcacagcacatgactcatgcgagacaatggtgacaaggagacttacatatgtgtaggaccggtgaattcgatggaagagttcccgctagacgtggctgtggtctgtaagcgtgtccatgttaccattgggagggttgatcggatccctcctgggtcggccctatggatgaagacatattggggccacgaaagaggggcctttgctgttcacaccaacaatagttgtgcgtatcagtgccgtgctggatcgttagatgggatgcatgcatgagtcgccgacctcgattgtgatgcttatcattgatttcgcaagactttctggtgggaatatgtgcaggtgtatcgttccaacgtggtccccatgtacttaggggagctgggcccatataaagacctgctggggggcatctcgtgggtggtgtcctcagactcttcatcactgttggcatccttgtggtccagatcttaggtcttcggaatctccttggctaacgtagatggtgagtacaggaccatactcgggagcatcatccacccttcgacataacctggggctgccctcgcttgtgttcccaacgcacacaacaa

SEQ ID NO: 543677 - DNA, 923 bp, Homo sapiens
tgcggtgtatcttgcctataatcccagacactttggtagtgccgtaggttgggcggatcatcctgaagtcaaggtatttcgagaccagacctggtttacatgtgatgtacccccgtcattactgtcagtactatataacctggtaccagagtgtccgattgggctacattgtcctgtttacctttcatgtcactttgggcagtgcagacgtgtcggtgactaaattaccacgaaggtctgggatgatacgagaacccgatacttggacgtcacctatgatcacttgcctgctgtagcccgggccttgccctcatgttcctgcgggcatataccagactgagtcttcgaagcctctccataagagtgtgtgcaccatagcgtgagtgtatactcagctcaaagcctgtatcctacatccacatgagacatgctttggggtgcggatgtgaagtgggtctactctaggatttactcaatataagtcagtagctaggccatacgaggaattatctatgaaggatcttactataccttgactgaatgtgtcatttggtggcgcatgtcggcaaaaggtaacttttgcttgtttgtctctggtgcttcatgatgctaatcacttcgtgatgcggatagtcttcttatactacaggtacctgtatgactatcacttaaggacctgtctgggtggctattcgtgctagaatggtgttctggttcctaacaacatataacattgcttgagttccaaaaaggccacagcctatgggggggaaaaagcctcttaggaccttctagtacctattcccacttgtagaccgcttcttggtgccccttgcctttgggatcagaatctcagcgggtacgggaacacctgtaccccacctggagccgagaaatccggggcgggggcaacgccagggccg

SEQ ID NO: 543678 - DNA, 163 bp, Homo sapiens
  misc_feature (9)..(9): n is a, c, g, or t
  misc_feature (24)..(24): n is a, c, g, or t
  misc_feature (33)..(33): n is a, c, g, or t
  misc_feature (42)..(42): n is a, c, g, or t
  misc_feature (45)..(45): n is a, c, g, or t
  misc_feature (51)..(51): n is a, c, g, or t
  misc_feature (58)..(58): n is a, c, g, or t
  misc_feature (60)..(60): n is a, c, g, or t
  misc_feature (152)..(152): n is a, c, g, or t
cctgtagtnacctgttgtgctatnaacactagntcttattanttntactgnctatatntnggtgcccattaaccaacctcactccccctgccactacccttctcagcctgtggcaaccatcactctactctatctccactagttcagttgtnttaatttttag

SEQ ID NO: 543679 - DNA, 139 bp, Homo sapiens
tacttgttcccagggtggcaggaaaggctttctgtgccgggggtgatatcagagatgatcgtcggaatgctgaaaaggcaaaacagaagatagctccagttttcttcagatgaagaatatatgctagaataatgctgtt

SEQ ID NO: 543680 - DNA, 610 bp, Homo sapiens
  misc_feature (69)..(69): n is a, c, g, or t
  misc_feature (105)..(105): n is a, c, g, or t
  misc_feature (128)..(128): n is a, c, g, or t
ccccagccgtggtggcacatggaccagacaggccttgccactaacttctatgtgatgtcagtggcctcncacttccagagctcccccaggtgctgcctgtgttcnaagccagtctcccagcctggcgncagcccccttccggtaggtgcccttggctcattcctcacaatcatacggaagccccaaacctcgcagcgcctcagagtttattccaatgcttcattcaaactgagatctgaaatctattttaaactattttaaaaacactcattaaaacacttaacaataacaggttaccctggggggactactgagggtgggggttaggccataaggaactggagggctgatcgccttcttcacctcaatctgagttatggtttcaagagtagagggatgggactgcacagctgtgtggaagtactggatgccactgaattgcacacttaaaaatgcttctggtggcaaatgttatgtgtattttaccacagtataaaaaagcacgatttaaaacagaactcaagatattgctttaaaatgatttcaataaataccagattgagccaaaaaagatgagtataagcataaattaaaaatccatcaagttttg

SEQ ID NO: 543681 - DNA, 178 bp, Homo sapiens
atttcatacggacctcatattaagaaccccacccatcgccaagaaaaaccgcctgtgataagcccttatccacataaggagccgccttacgcggccacacccataaggagccgccacgcggcgaccacagatgaaactcgcctccctcaagcacggccgtgacggaatcctgatagtc

SEQ ID NO: 543682 - DNA, 393 bp, Homo sapiens
ggggccccccccattggggttggggggcccccctccccgtggggaagaaagggttttggccccccccctttgggggggggttccttgggggggaaaaaaattattggtttggggcccccctgggcagggccctggtttaattggttcccttaggggggggggggcccccccctgttcccggggggggccctttgggactgtccctccccccaaagggcccttaagggggcaaaacccctttcctaaaaggggggggggggggggggggggttttttttttttttttttccgggatcccaaaaaacccccgccaaaattcagggcccctgccaaatttttttaaatggccgggtttggggaatttaatcccataaaaccctttttgggggggga

SEQ ID NO: 543683 - DNA, 405 bp, Homo sapiens
tgcgcgcagggcatccagcaattacagttgcgaaataagatattttgactttttggcttcaaatcattattcatcgtaattctgttttcttaaatggctaccactaatggcggagatctttgaggcgagagactgtttaattattgcatgcctggtacctgacacattgactggtatgtggtgtgagctcaatgatcttctgttaaattcatgaataaatgtactcagctgccaatccagttaggttcaagaaaaaaacagaggcttacaaatgaactttatcaattattttctaacattttgcttaatgctttcaagtaaactcttactgacttggatcttaatagaatttgtgaatacaaagtctgaggaaaatgtgtttgctaaaaataaaaacaatgcttg

SEQ ID NO: 543684 - DNA, 455 bp, Homo sapiens
  misc_feature (82)..(82): n is a, c, g, or t
  misc_feature (93)..(93): n is a, c, g, or t
  misc_feature (95)..(95): n is a, c, g, or t
  misc_feature (294)..(294): n is a, c, g, or t
ttcacctttctttcctgccggggttttgcccaagtcaatcggaacggtcaagaaaacccttgaaattgtcaatctggggccnatggaacgganangggtgggggctacccaatggacccactgaactccctggaacatcaggatgctcccatggcaaaggtgttatcatccatgttcttcgtcttcagttcctccctcggcagccttgccctcaccggctttcaatgagctcttcagctgcctggcctcagcctccacgggaccctggcactcgggctgtggctccagctgcgnagctgctctgctggggcagccttcggcatcagtgggtgtgggagcgggtgcgatccggagcaggactgtgtagttgcggccgtggttgttggcccagaaagtgccctcaggggtctcatagcgcaccacgaagttcgcaggcgccccatcgcccgcgccct

SEQ ID NO: 543685 - DNA, 244 bp, Homo sapiens
  misc_feature (133)..(133): n is a, c, g, or t
ttccattggccagtgctggtctctaagtcctggcctcaggtatccacctgacctcagccaaagtgcgtgggattacacggcgtgagccaccatgcccggcctggctgtacatttttctgtattgtcctctacnatctaaatttggtgaagacacaatcacattatacttatatatcgtgttattctaccagttgccttatgactcataggtgatgtactatttcattgaagaactctaggactt

SEQ ID NO: 543686 - DNA, 108 bp, Homo sapiens
tatgtatccaggtatctgcgggaagaggggacatcttcccactgcaggtgggtcagaacataatcggctggactctcatcttcccactgcaggtgggtcagaacatag

SEQ ID NO: 543687 - DNA, 1180 bp, Homo sapiens
  misc_feature (16)..(18): n is a, c, g, or t
  misc_feature (23)..(23): n is a, c, g, or t
tctagaggatccctcnnntctancacagaaaaaagccaaactatgaattactggaaaaagaagtagaaaaaagaaaagtagccttacaagaagccaaattaaaagcaaagggattgaatccggatggaactccagccctttcaaccctgggtggattttctccagcctccaagccatcatcaccaagagaagtaaaagctgaagagaaatcaccaatctccattaatgtgaagacagtcaaaaaagaacctgaggatagacaacaggcttccaaaagcccttacaatggtgtaagaaaagacagcaagagaagtagaaatagcagaagtgcaagtcgatcgaggtcaagaacacgatcacgttctagatcacatactccaagaagacactataataataggcggagtcgatctggaacatacagctcgagatcaagaagcaggtcccgcagtcacagtgaaagccctcgaagacatcataatcatggttctcctcaccttaaggccaagcataccagagatgatttaaaaagttcaaacagacatggtcataaaaggaaaaaatctcgttctcgatctcagagcaagtctcgggatcactcagatgcagccaagaaacacaggcatgaaaggggacatcatagggacaggcgtgaacgatctcgctcctttgagaggtcccataaaagcaagcaccatggtggcagtcgctcaggacatggcaggcacaggcgctgactttctcttcctttgagcctgcatcagttcttggttttgcctatctacagtgtgatgtatggactcaatcaaaaacattaaacgcaaactgattaggatttgatttcttgaaaccctctaggtctctagaacactgaggacagtttcttttgaaaagaactatgttaatttttttgcacattaaaatgccctagcagtatctaattaaaaaccatggtcaggttcaattgtactttattatagttgtgtattgtttattgctataagaactggagcgtgaattctgtaaaaatgtatcttatttttatacagataaaattgcagacactgttctatttaagtggttatttgtttaaatgatggtgaatactttcttaacactggtttgtctgcatgtgtaaagatttttacaaggaaataaaatacaaatcttgttttttcta

SEQ ID NO: 543688 - DNA, 190 bp, Homo sapiens
tggcccaaacccatttttttttttccaaaaaaaaaattttttttaaaaattatttttaaccaaaactttttttatagggaaaaaatgccaaaaaatgtccccccccccggggtaaaatttaatttttattttttttttcaaggtaaattaaaaaaaatttgtaagtaagtaacccttaagggtggactta

SEQ ID NO: 543689 - DNA, 1129 bp, Homo sapiens
  misc_feature (86)..(86): n is a, c, g, or t
ctatactctgccttctgtatattttagttacatggtgtgtcagttgctctgggatgaaggcgctcgacatgaattcatgtcgaggnctttcatccctgggtggattttctccagcctccaagccatcatcaccaagagaagtaaaagctgaagagaaatcaccaatctccattaatgtgaagacagtcaaaaaagaacctgaggatagacaacaggcttccaaaagcccttacaatggtgtaagaaaagacagcaagagaagtagaaatagcagaagtgcaagtcgatcgaggtcaagaacacgatcacgttctagatcacatactccaagaagacactataataataggcggagtcgatctggaacatacagctcgagatcaagaagcaggtcccgcagtcacagtgaaagccctcgaagacatcataatcatggttctcctcaccttaaggccaagcataccagagatgatttaaaaagttcaaacagacatggtcataaaaggaaaaaatctcgttctcgatctcagagcaagtctcgggatcactcagatgcagccaagaaacacaggcatgaaaggggacatcatagggacaggcgtgaacgatctcgctcctttgagaggtcccataaaagcaagcaccatggtggcagtcgctcaggacatggcaggcacaggcgctgactttctcttcctttgagcctgcatcagttcttggttttgcctatctacagtgtgatgtatggactcaatcaaaaacattaaacgcaaactgattaggatttgatttcttgaaaccctctaggtctctagaacactgaggacagtttcttttgaaaagaactatgttaatttttttgcacattaaaatgccctagcagtatctaattaaaaaccatggtcaggttcaattgtactttattatagttgtgtattgtttattgctataagaactggagcgtgaattctgtaaaaatgtatcttatttttatacagataaaattgcagacactgttctatttaagtggttatttgtttaaatgatggtgaatactttcttaacactggtttgtctgcatgtgtaaagatttttacaaggaaataaaatacaaatcttgttttttcta

SEQ ID NO: 543690 - DNA, 383 bp, Homo sapiens
gccccgtgttttagaagttcaatagcacaacaggctgacctatagtcaataatttaattgtacatttaaaatgaactaaaagagtataactggattgtttgtaacacaaaggataaatgcttgagaagatgaataccctacttgccatgatgtattatgcattgcatgcctgtatcaaagtatctcatctaccttataaatatatatacctactatatacccacaaaaattaaaaagttaaaaaaaaagaatttgctattgaaacttctaaaactaggcctagttttagaagtttcaatagcacctagtttaagaagccccaggcagcaatgtacttgctgagtaaaaacaatgctattgaaacttctaaaactagggggtac

SEQ ID NO: 543691 - DNA, 101 bp, Homo sapiens
tatccacagcaaaaaactaaaaaaaaagaaacaactgtaacatatggcaaggcggtaagcgaacgacgagcgcagcgagctagtatagcgagagacagcgg

SEQ ID NO: 543692 - DNA, 4236 bp, Homo sapiens
  misc_feature (81)..(81): n is a, c, g, or t
  misc_feature (420)..(420): n is a, c, g, or t
  misc_feature (423)..(423): n is a, c, g, or t
  misc_feature (3929)..(3930): n is a, c, g, or t
  misc_feature (3937)..(3939): n is a, c, g, or t
gggacccgaatagggtccacagccctgtgttcttcgaatactgtaaagcagccctgctccagattccttgagggtcacttnatattacacattcgtccacacaggacaacaaagtcaccacttccacccgccaaagcgcgctcaggtcggccgccacttcccttggtacacgcggaacgcaagccgcgccgaggctaaaggaagaggccggaatgcagggcgaaggggcgcagagatgctagccaatgctgccacctctattttgggtataagggatcttgtaaagctccgttattcgtgtggctatcacaaacaaggtggtttcgaccggccttggctagagaaggcctcctcagcctctgaggatcccaaggtctgtcgcagcacccaacactcccctcgcaggcccagatgccgagngcngaggcgcggcctggagggactagttggcgcgcggctgcccggcgtggtgacgtcagggcggaagcgcacgcaggcgtgaagcggcccagaacccggcggtcacgggaatatccgtcgcgccgagaacgctggttagtcttgtttcgggttccggctgcgttgggcttgcgtgcggctcgctaagactatggcgtccgggcctcattcgacagctactgctgccgcagccgcctcatcggccgccccaagcgcgggcggctccagctccgggacgacgaccacgacgacgaccacgacgggagggatcctgatcggcgatcgcctgtactcggaagtttcacttaccatcgaccactctctgattccggaggagaggctctcgcccaccccatccatgcaggatgggctcgacctgcccagtgagacggacttacgcatcctgggctgcgagctcatccaggccgccggcattctcctccggctgccgcaggtggcgatggcaacggggcaggtgttgtttcatcgttttttctactccaaatctttcgtcaaacacagtttcgagattgttgctatggcttgtattaatcttgcatcaaaaatcgaagaagcacctagaagaataagagatgtgattaatgtattccaccacctccgccagttaagaggaaaaaggactccaagccccctgatccttgatcagaactacattaacaccaaaaatcaagttatcaaagcagagaggagggtgctaaaggagttgggattttgtgttcatgtcaagcatcctcataagatcattgttatgtatttacaagtcttagaatgtgaacgtaatcaaaccctggttcaaactgcctgggtagtccatgatggtaagtcatagaactctgccctctgcacttcagcccatgacctcaggatggcctgattggctaccctgctctccagccaatccagtgcaagctctcatccgagattcactgaagtggtccatatccatctggcagcatcttctagttctgtcggggtgtcaaaaggatttgtatatttgcttctagaagtaactatttgacatgcctatgtatttaatgtatacttgtaactatcaaaatgaatagttcatttttgatagatttgttgtgcagccattatgaattaaatggtttattaggagtttgactaaatttttatttttagtgtgtatagcatgaatactaccaaaggagacgacaaacttgcagcttaaaatgggcaccagttcccacactggcttaatttatataactgcttggctgtattgcgggtaataatattagaagcaagaagcacttcatttttaaaagagatgttactataatattgcttaaatgctttagcacttggacttcttgagatgcagatgtgtgatttggagtgctggcttatttaaaggtcaagccaaggagtttgtggttcagccacaactactgtttcctaagactattgatgtgaaggacttagtgaagtaatttttatattctgggcttcccagcaagatgtcctttttatgactgccatgcttcttttggactcagtaaatatttgtaatgttagaaaagtctcattatttttataaaatgcatgacattttaagtatgtgttgcataaaatggattatagcagttctcatggtttaggatttttaagaaatagtccatttaatttcagcttaaccttttaaatgatctgtaaaatttctttgatagtttaggaatgttgtggggagggttcattaataaaagttcagcaattttttaactgaaatagtttatctcttttacctagtcacaaaaaaggtatgtaaacaaggccattatatgtgtttattgctctttatttccctatctagattttctaagtatcttagctttcttaatataagtttaacttggtacttactgaaaatgcctttttacccctgttaacggtattttgagcttttgaaaagaacttggttgacactgcttttattgtggataaaggagagatggtcagtaattaatggcttgaagtattattggagtggtttatcatttctgaaactaatcgtgtcagaattgactttgaaaagcattgctttttacagaaatatattaactttttaggagtaatttctagtttggattgtaatatgaaataatttaaaagggcttcgctcatatataggaaaatcgcatatggtcctagtattaaattcttattgcttactgatttttttgagttaagagttgttatatgctagaatatgaggatgtgaatataaataagagaagaaaaaagaataaagtagattgagtctccaattttatgtaagcttcagaagaactggtttgtttacatgcaagcttatagttgaaatatttttcaggaattacatgaatgacagtcttcgaaccaatgtgtttgttcgatttcaaccagagactatagcatgtgcttgcatctaccttgcagctagagcacttcagattccgttgccaactcgtccccattggtttcttctttttggtactacagaagaggaaatccaggaaatctgcatagaaacacttaggctttataccagaaaaaagccaaactatgaattactggaaaaagaagtagaaaaaagaaaagtagccttacaagaagccaaattaaaagcaaagggattgaatccggatggaactccagccctttcaaccctgggtggattttctccagcctccaagccatcatcaccaagagaagtaaaagctgaagagaaatcaccaatctccattaatgtgaagacagtcaaaaaagaacctgaggatagacaacaggcttccaaaagcccttacaatggtgtaagaaaagacagcaagagaagtagaaatagcagaagtgcaagtcgatcgaggtcaagaacacgatcacgttctagatcacatactccaagaagacactataataataggcggagtcgatctggaacatacagctcgagatcaagaagcaggtcccgcagtcacagtgaaagccctcgaagacatcataatcatggttctcctcaccttaaggccaagcataccagagatgatttaaaaagttcaaacagacatggtcataaaaggaaaaaatctcgttctcgatctcagagcaagtctcgggatcactcagatgcagccaagaaacacaggcatgaaaggggacatcatagggacaggcgtgaacgatctcgctcctttgagaggtcccataaaagcaagcaccatggtggcagtcgctcaggacatggcaggcacaggcgctgactttctcttcctttgagcctgcatcagttcttggttttgcctatctacagtgtgatgtatggactcaatcaaaaacattaaacgcaaactgattaggatttgatttcttgaaaccctctaggtctctagaacactgaggacagtttcttttgaaaagaactatgaaaaaaaaaaaaaaaaaaaaataannaccaaannnaaaaaaaaaaaaaaaaaaaacaacaaaaaacattaaaatagttgtgtattgtttattgctataagaactggagcgtgaattctgtaaaaatgtatcttatttttatacagataaaattgcagacactgttctatttaagtggttatttgtttaaatgatggtgaatactttcttaacactggtttgtctgcatgtgtaaagatttttacaaggaaataaaatacaaatcttgttttttctaaactgcttcaaataccttatttaaataaattattaaaaaggaaaattttaatagca

SEQ ID NO: 543693 - DNA, 226 bp, Homo sapiens
tcatcgagctcggtcctgacgcacattataaggagttaaagagatagtagctggtgagctgttacatagactagtcaaccactttattaatctcattgctattgaaacttctaaaactaggcctagttttagaagtttcaatagcacctagtttaagaagccccaggcagcaatgtacttgctgagtaaaaacaatgctattgaaacttctaaaactagggggtac

SEQ ID NO: 543694 - DNA, 110 bp, Homo sapiens
aacctcggttcccagttccaattgcacctgccattcgaaggagtaagggccgtgtctcagtccccttgtggccgttcaccctctcaggccagctgcccatcatcgccttg

SEQ ID NO: 543695 - DNA, 871 bp, Homo sapiens
agagtaacatctgcatgaatctgttcacatatcatgatgaatcgctggtgcatcgaaaggcttacgagaaatccttttctctgagtccacccggatcctcttcttctacacaccctgaaagattgacagactacgccaagaaagcgagagtggttcctgggccccaacaactactacagtattgccagctctgcgctgagcataccagagatgatttaaaaagttcaaacagacatggtcataaaaggaaaaaatctcgttctcgatctcagagcaagtctcgggatcactcagatgcagccaagaaacacaggcatgaaaggggacatcatagggacaggcgtgaacgatctcgctcctttgagaggtcccataaaagcaagcaccatggtggcagtcgctcaggacatggcaggcacaggcgctgactttctcttcctttgagcctgcatcagttcttggttttgcctatctacagtgtgatgtatggactcaatcaaaaacattaaacgcaaactgattaggatttgatttcttgaaaccctctaggtctctagaacactgaggacagtttcttttgaaaagaactatgttaatttttttgcacattaaaatgccctagcagtatctaattaaaaaccatggtcaggttcaattgtactttattatagttgtgtattgtttattgctataagaactggagcgtgaattctgtaaaaatgtatcttatttttatacagataaaattgcagacactgttctatttaagtggttatttgtttaaatgatggtgaatactttcttaacactggtttgtctgcatgtgtaaagatttttacaaggaaataaaatacaaatcttgttttttcta

SEQ ID NO: 543696 - DNA, 238 bp, Homo sapiens
  misc_feature (19)..(20): n is a, c, g, or t
gtcagacgctgaactatgnntttattattgatatagcacttagccttcggcctcccaacactttccctgatagcaccctttactttatctgctatacttaacatttctgatggaaattaactttgcaggatatcatgaaaaggcagtggtagattcacagtccttccattggcttagaacttcaattttgtcattactctgagaatcacatagttcagcgtctgacgggtaccgagct

SEQ ID NO: 543697 - DNA, 734 bp, Homo sapiens
ccgtgaggatcccaaacgacccgaagacatcataatcatggttctcctcaccttaaggccaagcataccagagatgatttaaaaagttcaaacagacatggtcataaaaggaaaaaatctcgttctcgatctcagagcaagtctcgggatcactcagatgcagccaagaaacacaggcatgaaaggggacatcatagggacaggcgtgaacgatctcgctcctttgagaggtcccataaaagcaagcaccatggtggcagtcgctcaggacatggcaggcacaggcgctgactttctcttcctttgagcctgcatcagttcttggttttgcctatctacagtgtgatgtatggactcaatcaaaaacattaaacgcaaactgattaggatttgatttcttgaaaccctctaggtctctagaacactgaggacagtttcttttgaaaagaactatgttaatttttttgcacattaaaatgccctagcagtatctaattaaaaaccatggtcaggttcaattgtactttattatagttgtgtattgtttattgctataagaactggagcgtgaattctgtaaaaatgtatcttatttttatacagataaaattgcagacactgttctatttaagtggttatttgtttaaatgatggtgaatactttcttaacactggtttgtctgcatgtgtaaagatttttacaaggaaataaaatacaaatcttgttttttcta

SEQ ID NO: 543698 - DNA, 3538 bp, Homo sapiens
  misc_feature (81)..(81): n is a, c, g, or t
  misc_feature (420)..(420): n is a, c, g, or t
  misc_feature (423)..(423): n is a, c, g, or t
gggacccgaatagggtccacagccctgtgttcttcgaatactgtaaagcagccctgctccagattccttgagggtcacttnatattacacattcgtccacacaggacaacaaagtcaccacttccacccgccaaagcgcgctcaggtcggccgccacttcccttggtacacgcggaacgcaagccgcgccgaggctaaaggaagaggccggaatgcagggcgaaggggcgcagagatgctagccaatgctgccacctctattttgggtataagggatcttgtaaagctccgttattcgtgtggctatcacaaacaaggtggtttcgaccggccttggctagagaaggcctcctcagcctctgaggatcccaaggtctgtcgcagcacccaacactcccctcgcaggcccagatgccgagngcngaggcgcggcctggagggactagttggcgcgcggctgcccggcgtggtgacgtcagggcggaagcgcacgcaggcgtgaagcggcccagaacccggcggtcacgggaatatccgtcgcgccgagaacgctggttagtcttgtttcgggttccggctgcgttgggcttgcgtgcggctcgctaagactatggcgtccgggcctcattcgacagctactgctgccgcagccgcctcatcggccgccccaagcgcgggcggctccagctccgggacgacgaccacgacgacgaccacgacgggagggatcctgatcggcgatcgcctgtactcggaagtttcacttaccatcgaccactctctgattccggaggagaggctctcgcccaccccatccatgcaggatgggctcgacctgcccagtgagacggacttacgcatcctgggctgcgagctcatccaggccgccggcattctcctccggctgccgcaggtggcgatggcaacggggcaggtgttgtttcatcgttttttctactccaaatctttcgtcaaacacagtttcgagattgttgctatggcttgtattaatcttgcatcaaaaatcgaagaagcacctagaagaataagagatgtgattaatgtattccaccacctccgccagttaagaggaaaaaggactccaagccccctgatccttgatcagaactacattaacaccaaaaatcaagttatcaaagcagagaggagggtgctaaaggagttgggattttgtgttcatgtcaagcatcctcataagatcattgttatgtatttacaagtcttagaatgtgaacgtaatcaaaccctggttcaaactgcctgggtagtccatgatggtaagtcatagaactctgccctctgcacttcagcccatgacctcaggatggcctgattggctaccctgctctccagccaatccagtgcaagctctcatccgagattcactgaagtggtccatatccatctggcagcatcttctagttctgtcggggtgtcaaaaggatttgtatatttgcttctagaagtaactatttgacatgcctatgtatttaatgtatacttgtaactatcaaaatgaatagttcatttttgatagatttgttgtgcagccattatgaattaaatggtttattaggagtttgactaaatttttatttttagtgtgtatagcatgaatactaccaaaggagacgacaaacttgcagcttaaaatgggcaccagttcccacactggcttaatttatataactgcttggctgtattgcgggtaataatattagaagcaagaagcacttcatttttaaaagagatgttactataatattgcttaaatgctttagcacttggacttcttgagatgcagatgtgtgatttggagtgctggcttatttaaaggtcaagccaaggagtttgtggttcagccacaactactgtttcctaagactattgatgtgaaggacttagtgaagtaatttttatattctgggcttcccagcaagatgtcctttttatgactgccatgcttcttttggactcagtaaatatttgtaatgttagaaaagtctcattatttttataaaatgcatgacattttaagtatgtgttgcataaaatggattatagcagttctcatggtttaggatttttaagaaatagtccatttaatttcagcttaaccttttaaatgatctgtaaaatttctttgatagtttaggaatgttgtggggagggttcattaataaaagttcagcaattttttaactgaaatagtttatctcttttacctagtcacaaaaaaggtatgtaaacaaggccattatatgtgtttattgctctttatttccctatctagattttctaagtatcttagctttcttaatataagtttaacttggtacttactgaaaatgcctttttacccctgttaacggtattttgagcttttgaaaagaacttggttgacactgcttttattgtggataaaggagagatggtcagtaattaatggcttgaagtattattggagtggtttatcatttctgaaactaatcgtgtcagaattgactttgaaaagcattgctttttacagaaatatattaactttttaggagtaatttctagtttggattgtaatatgaaataatttaaaagggcttcgctcatatataggaaaatcgcatatggtcctagtattaaattcttattgcttactgatttttttgagttaagagttgttatatgctagaatatgaggatgtgaatataaataagagaagaaaaaagaataaagtagattgagtctccaattttatgtaagcttcagaagaactggtttgtttacatgcaagcttatagttgaaatatttttcaggaattacatgaatgacagtcttcgaaccaatgtgtttgttcgatttcaaccagagactatagcatgtgcttgcatctaccttgcagctagagcacttcagattccgttgccaactcgtccccattggtttcttctttttggtactacagaagaggaaatccaggaaatctgcatagaaacacttaggctttataccagaaaaaagccaaactatgaattactggaaaaagaagtagaaaaaagaaaagtagccttacaagaagccaaattaaaagcaaagggattgaatccggatggaactccagccctttcaaccctgggtggattttctccagcctccaagccatcatcaccaagagaagtaaaagctgaagagaaatcaccaatctccattaatgtgaagacagtcaaaaaagaacctgaggatagacaacaggcttccaaaagcccttacaatggtgtaagaaaagacagcaagagaagtagaaatagcagaagtgcaagtcgatcgaggtcaagaacacgatcacgttctagatcacatactccaagaagacactataataataggcggagtcgatctggaacatacagctcgagatcaagaagcaggtcccgcagtcacagtgaaagccctcgacatgaatcatgtccagggccttcatgccttagaaagggtataggggatgaaagcactgacatgaa

SEQ ID NO: 543699 - DNA, 645 bp, Homo sapiens
taaagagattttcagactaaatagaaatgtcaaaatgatgtatcaatggttcttttttagaacaagttttcaaagcataaaaagaggttgagagaaataacatatttattgattcacataagtatgttttccttcattaatcgtctggagaaacccacttgtcattaattggtttggggctaggttttcaaacttaccaaattgctttaaaaaagcaatttggaaggtaattggataggctttccaatttaaccaaattttttatggtaatcctgggatagtattttggtcttttcaattcattggtcttttccagtatagttttggtcaaggcaaatgtcttcccttaatatccaaatattgctaataaacggtagaagatgcttgggaacattcaaaattatctcgctgtgggttagacttaacactgttaatcttcagccaaatttcactatttggatcaaattatttcctttttggtggtttaccctatcctcaacaacatttttacgtttacattatggtcagagattagacgggggggaaattgaaattatggctccaaaataatagggtgcaagctatttaatgcttaactgtggctctgtcaaaacagctatgcagtgaagttgcattggatgtcta

SEQ ID NO: 543700 - DNA, 123 bp, Homo sapiens
attctactgtctatgtacattatctgccaatgttatggtaaatggaaaaccggtgaatctgggcttatgggatacagctggacaagaagattatgacagattacgcccctcgagcccctaagg

SEQ ID NO: 543701 - DNA, 1947 bp, Homo sapiens
  misc_feature (81)..(81): n is a, c, g, or t
  misc_feature (420)..(420): n is a, c, g, or t
  misc_feature (423)..(423): n is a, c, g, or t
gggacccgaatagggtccacagccctgtgttcttcgaatactgtaaagcagccctgctccagattccttgagggtcacttnatattacacattcgtccacacaggacaacaaagtcaccacttccacccgccaaagcgcgctcaggtcggccgccacttcccttggtacacgcggaacgcaagccgcgccgaggctaaaggaagaggccggaatgcagggcgaaggggcgcagagatgctagccaatgctgccacctctattttgggtataagggatcttgtaaagctccgttattcgtgtggctatcacaaacaaggtggtttcgaccggccttggctagagaaggcctcctcagcctctgaggatcccaaggtctgtcgcagcacccaacactcccctcgcaggcccagatgccgagngcngaggcgcggcctggagggactagttggcgcgcggctgcccggcgtggtgacgtcagggcggaagcgcacgcaggcgtgaagcggcccagaacccggcggtcacgggaatatccgtcgcgccgagaacgctggttagtcttgtttcgggttccggctgcgttgggcttgcgtgcggctcgctaagactatggcgtccgggcctcattcgacagctactgctgccgcagccgcctcatcggccgccccaagcgcgggcggctccagctccgggacgacgaccacgacgacgaccacgacgggagggatcctgatcggcgatcgcctgtactcggaagtttcacttaccatcgaccactctctgattccggaggagaggctctcgcccaccccatccatgcaggatgggctcgacctgcccagtgagacggacttacgcatcctgggctgcgagctcatccaggccgccggcattctcctccggctgccgcaggtggcgatggcaacggggcaggtgttgtttcatcgttttttctactccaaatctttcgtcaaacacagtttcgagattgttgctatggcttgtattaatcttgcatcaaaaatcgaagaagcacctagaagaataagagatgtgattaatgtattccaccacctccgccagttaagaggaaaaaggactccaagccccctgatccttgatcagaactacattaacaccaaaaatcaagttatcaaagcagagaggagggtgctaaaggagttgggattttgtgttcatgtcaagcatcctcataagatcattgttatgtatttacaagtcttagaatgtgaacgtaatcaaaccctggttcaaactgcctggaattacatgaatgacagtcttcgaaccaatgtgtttgttcgatttcaaccagagactatagcatgtgcttgcatctaccttgcagctagagcacttcagattccgttgccaactcgtccccattggtttcttctttttggtactacagaagaggaaatccaggaaatctgcatagaaacacttaggctttataccagaaaaaagccaaactatgaattactggaaaaagaagtagaaaaaagaaaagtagccttacaagaagccaaattaaaagcaaagggattgaatccggatggaactccagccctttcaaccctgggtggattttctccagcctccaagccatcatcaccaagagaagtaaaagctgaagagaaatcaccaatctccattaatgtgaagacagtcaaaaaagaacctgaggatagacaacaggcttccaaaagcccttacaatggtgtaagaaaagacagcaagagaagtagaaatagcagaagtgcaagtcgatcgaggtcaagaacacgatcacgttctagatcacatactccaagaagacaagacgaggtcttgctacgttgcccaggtcggtcacgaactcctggcctcaagtgatcctcccacctcagcctcccaagtattaaattcttaatagtgttgaaatt

SEQ ID NO: 543702 - DNA, 172 bp, Homo sapiens
gatctcctgacctcgtgatctgtccgcctcggcctctcaaagtgctgggattacaagctagtgccaccatgcccagttgatatacacaatcttaaaacaacattgtaatgggtatttttgtttgcttgtttgttttgagacggagttactctgtcgcccagggctggaattc

SEQ ID NO: 543703 - DNA, 650 bp, Homo sapiens
  misc_feature (629)..(629): n is a, c, g, or t
tcagccgctgttctgtaagacagaaactgttccagaatatccctatggattaacccctgagtacccagagtgaattctaatttacagaacttccttattgatctgctggttcttccagatcatattctggctattggtgtggctggcctttctgaaggcaccctgcttgtctattttcctgactcagctcttgcctgcctttttcacatgttgctgcaattagactcaccgtgaggactacagtcaatttcagtctatcttgtgcccaatacaacaaggatttttaatagtaacaacccacacctcacccactaggactcaatgttcacaacaggaaggaccattgctgcatactccttgaccagcaacttttttgaagatatttttaagtgcagagcaggcctctattcctgtatgtaattgctcattttcagcacctggaacctcatctatcgggtctggaaggaatacagcagttcgaaagccgcgtccatttctctccttcagtagtgcagaaatgagtccgattcaccagtacacacagaactgtaccagctcaacctagcaaaagaagaaaagtttccactgtacttaaaatttacagcttgactcaaattgcttcacaaaantattttgatgtagaaggctat

SEQ ID NO: 543704 - DNA, 540 bp, Homo sapiens
  misc_feature (104)..(104): n is a, c, g, or t
actggctcttgacacagcacaacatctgcagatgtgacaggaagctctgttcatatcctgaaggtgtgaatgcttcagtgtgacccagttctcagactctacgnacagtctggaggaaagtcacacagcattgggagataggagttattcagagtcttcatctacatcttcctcggaaagcttgaattcatcagcaccacgtggagaacgttcgagtgagtttttccatttcatgcaactgtgccccatagaggagagagggactcatgatgcttatgaaatctgtggcgtattaaaaccacgcatgagggcctagcgtggtcgtcacgcctgtaatcccagcactttgggaggccgaggtgggtggatcatctgaggtgaggggttcaagacctgactgacctacatggtgaaaccctgtctctactaacaatacaaaaaattagccgggtgtgatggcaggcacctgtaatcccagctacttgggaggctgaggcaggagaatcgtttgaacccaggaggtggaggttgcagttagct

SEQ ID NO: 543705 - DNA, 379 bp, Homo sapiens
  misc_feature (104)..(104): n is a, c, g, or t
  misc_feature (243)..(243): n is a, c, g, or t
  misc_feature (288)..(288): n is a, c, g, or t
actggctcttgacacagcacaacatctgcagatgtgacaggaagctctgttcatatcctgaaggtgtgaatgcttcagtgtgacccagttctcagactctacgnacagtctggaggaaagtcacacagcattgggagataggagttattcagagtcttcatctacatcttcctcggaaagcttgaattcatcagcaccacgtggagaacgttcgaccttggaagacagccgagagccaggccnagcactaggtgacagttccgccaatgcagaggacaggacttctgnggtgccctctctcggcacccacaccttggctactgtcactggaaacggggaacgcacactgcggtctgtcaccctcaccaacaccagcatg

SEQ ID NO: 543706 - DNA, 427 bp, Homo sapiens
gggtgcgagcagtctcacaccagagtgaccaagatacgccggggtgacaaatagtattatgtgaactcaactcttggataccacaaaggacacagcagcagggaagagacaactgtagaaaggaagaacacacttgcacactatccatccaacaagtgactaatattcagaacatgaaaggaactcagaccactcaacaggcaaaaaaaatccaattaacacgtgggcaaaggaaataaatagatgtctctcaaaagaagacatacaaatgtcccaacaaagtatcttacaatgtccaaccgcctctagtcatcagggaaatgcaaatcaaaaccacaatgagtatcatctcacctcaattagaatggctattatcaaacacacacacacacacacacacacacacacaaatgctggtgaggatgcc

SEQ ID NO: 543707 - DNA, 974 bp, Homo sapiens
gtctcgagttttgtttcttttttttttggtacaaaattttataaaagggtctttaaagagcaacatccaaactccaaaatacagctgccaaggaaaccctgtgtattatgcgtggtggggacgtggcgtggggcattggaccggcggcatcgtggcatttcccacccttctcgtgttcgtgaaagtggggggtgggtgggcaagatatctcatctctttaggggtctccacaagtgctcacgttggctcagaggcaggggagctttctatataagggcacaattcttatacacaggtggggctccacatgggcaagcatatgatctctttcaccttgtaatatctgcccaagacacaccctgtgttcgtagaagcaacaacttttggccgccaaatagcatgtgttctcaaccggtgtatgcgtaagttataacacagggggtctcctccgagagtggtgagatctcattacaggcgcacatctcacaagaacactatatcagggtgggaatcataacgcccctctcgtgtgtcccctcaggagaggttttctccgacgaagaacacacaccaaaaacagcgctctcggaagagctcactgtgtgtgggtcgcgcccaaaatctctttccgatatgggaagtgaaacacggcgcgaggcgcagcagcgccaatataagacgaagtgtccccctcttccgcgggaacagaggattgaaaggcgccccctctctaaagagagagtgtttgtggtgaaacccgccaagaagacacttctgttgcgctgtgtgagacgaagtgtggggcccaacgagaaacactgtctataagggtggaccacccctttatttctcaaggacatataaagagccttctttacaacgagttgcccctcttctgtgtgaaaaagggcactaaaaaagccctttcttttcggtggagaaccattagacgggcagaagtgtcaagtgatacg

SEQ ID NO: 543708 - DNA, 208 bp, Homo sapiens
  misc_feature (4)..(4): n is a, c, g, or t
  misc_feature (12)..(12): n is a, c, g, or t
cacncacacacncacacacacacacacacacacacacacacacacacctactttccaaattctttcctcctgtatgaaaaaaacttaaggctgggcacagtggctcatgcttgtaatccagcactttgggaggctgaggcagcaggattgcttgatccaaggagtccaagaccagcctgggcaacatgatgagaccctgtctctacaa

SEQ ID NO: 543709 - DNA, 307 bp, Homo sapiens
  misc_feature (171)..(171): n is a, c, g, or t
  misc_feature (216)..(216): n is a, c, g, or t
caggcgaacagacatctcagataaagaccctaaaagtacaggggagcgtcttggctcccacagcccaggaagtgaggcttggggcacgatcctgtcgctccagccctgcatttttcagccatcctctttcactctacttttagccttggaagacagccgagagccaggccnagcactaggtgacagttccgccaatgcagaggacaggacttctgnggtgccctctctcggcacccacaccttggctactgtcactggaaacggggaacgcacactgcggtctgtcaccctcaccaacaccagcatg

SEQ ID NO: 543710 - DNA, 399 bp, Homo sapiens
  misc_feature (22)..(22): n is a, c, g, or t
  misc_feature (34)..(34): n is a, c, g, or t
  misc_feature (75)..(75): n is a, c, g, or t
  misc_feature (92)..(92): n is a, c, g, or t
  misc_feature (167)..(167): n is a, c, g, or t
  misc_feature (202)..(202): n is a, c, g, or t
  misc_feature (264)..(264): n is a, c, g, or t
ttccttggtgtattccttatgncaaacaatccancaggcagcaaagatgtctgttacatcctaaacttgaataanaaagttttaccaccagntacacataacggcgttggtatggtttatatggattcactttcatccttctagcaataggaaatacagatcattgnaatatatatatatatatatacaggctctgctgaantgaaatggtgaaatcaaatcaccattctaaaaaattattacttatattgataaagcctggantctctcaacttgttttgctttgctttttttctttaaccaatcaatctcttactgatagattttgtgtaaaaagatatatactagtttcttcagaaagattaacaataaaaattgtgtttatttcaaaaaaaaaaa

SEQ ID NO: 543711 - DNA, 86 bp, Homo sapiens
gatcagagcattgtgcaatacagtttcattaactccttccccccctcgccgcgcgtcctccaaaaaataaaaccttaaccgcgggc

SEQ ID NO: 543712 - DNA, 315 bp, Homo sapiens
tgagcgttccaatcactaccacccatgattaatttaatatttgctggttgtgcattattattcatatcaaccgataacggaccgttatctagttgcatattatcagatagtcgtgtgttgatcatgtaatcgccttgtccactgattccactagcaatataaggtggtactccattaactgtattcttaacggcttcaaacgatgattgcaacggtgaataaaaccaccataattgctttaccacaggggtaagcaacgcttgcgtagctgattggcctttgtgtcctttaatccagcagcacgcacaacgatga

SEQ ID NO: 543713 - DNA, 326 bp, Homo sapiens
  misc_feature (26)..(26): n is a, c, g, or t
ggggggggggggggtttccccccaanaacccttttttgtaaggtcttttggtgttttacacaaaatttggtccaacccaaaggggggggggcgtcttggcgcccccagggccccaaggaattaaccccttgtgccccccccccccccagagggcaaaaagggaaaaagagccccccttttttgggggggtccccccccccttaggttccccccccccttttttttccccccccccgggtttttttttgaacccccttaaaggggggggggcctgggggacccccccttttttttgccccccaaaaaagggccctggttccccccca

SEQ ID NO: 543714 - DNA, 127 bp, Homo sapiens
ctgaggatccccttcgtccattctgacttgagcacccataacgccgcgagtttggtccctcggcgtgtgcagcaacaacttcgtccataggtgatttgcggcgttgggaccttcggcgtgtgcagga

SEQ ID NO: 543715 - DNA, 645 bp, Homo sapiens
cggattttttcctatgtgtgcgccggttatccccttttgggagaagatcccacttttaagggcataattgacttttgttcacagggggcctactatcccccaattgtggctgcccccaaggtttttagtgagtccctcgtaagtctcccgcatattttcgcgaggtaggtccacacccacaattgatgggtggcggaaaatggccctttgccatcttctgcccttatagggtgtggcgccaaaatatgctcaattggtgttgaggaaaacagacactgaccctcccccagagggcgggagaactcactgaggatgaggtggaaccagtgatcccgcttatgcagatccccccttgttcaagatgccacgcccggtgtgttgacagacagaaggatgttaagcgatggaaataatagccccggtgccttaacagcattggtgttgggcaaacaacactcttggtgagacactggggccgactggaaaaagattttggcccctaagaagggctgcgtcactttttggtgcccttttgttccaggcccacaccacccagacccagggtccctggccccccccggggggtgtttaaaaaaaagtaatttttagccttttttggttatataaaaaggttttattacccca

SEQ ID NO: 543716 - DNA, 362 bp, Homo sapiens
gggcagagatggacgccaccctgggacacaacctcccagccccatttctgttctgtgcacagacgcagtttgctgttttggtttttacaaaaatggggtcacgccatacatgcattttgaactccatttagaaaaacaaaagtaacaatagattgtgaacattctcccatcggtaaatacaattctactagaatacaaccagcaatcttgatgacatgttttctgcatttttttcctttcagggagaacactttcagtcgaaggagaagcctgggacccttgacacagaagtgacatgtgcattcggaacctctctgtggaaaacacagacccttcatgacacgcaaactcgaagccggtga

SEQ ID NO: 543717 - DNA, 1000 bp, Homo sapiens
caggttatccctgcgaacggcaacattttcaatgcccaaaaaggtttcattcatagttaaggtataccaatcgccccatctacatatatattcctatcctatgtttgccacaaatcgttacacaaggctctcttttgaaaaagggcccctaaccgtgttttttcctccggagccactgtgtggcgacttccgtaattgctccacttaacgctccccccgttgtcccttggggacccccactctggttcaagcgtggtcagttatcacacactggcacaacaatgttccctgacacatgcactaaccgcagacacgttattttcttcgagagattaccttcattctattcttaactcccttaattttcctctataacctcttcggtccttttcacctttcatcgcttcttgaattacttgaattaaaccattgaatcgatctgaactacgcttttagtccagaactttccacacgaggataccatcctatcttttactcacttacttatggggcttttgaaaaattttatttttacaccttctaactttctttactttcctcaaacgcacgataattacttactgtcctgaaatactcgcttttcgtttccttattaatctctaagggtttaacacttccttcttccaaactcactgcttgatctttgctctttgctttttcgttgtctgagaaattgctcttggcgtagactttggcttctggtatagtgtttctgattgcttcctgtcgagcacaaacgtcgagacgactgccatctgagcagccctgccacggggtcgctgttctcacggctgtggcatcgccaggcggcctcctgcaaaccaagggctgggggcaaaggggcatgatccagggtcccccagggtgggctcagctccagggagaggccacccacgtggcagccccacctcttgagagcccccagtgccggagcagaaagactctgacccagattacgattcgtggcggtgtactgaaa

SEQ ID NO: 543718 - DNA, 328 bp, Homo sapiens
  misc_feature (51)..(51): n is a, c, g, or t
  misc_feature (71)..(71): n is a, c, g, or t
  misc_feature (85)..(85): n is a, c, g, or t
  misc_feature (104)..(105): n is a, c, g, or t
  misc_feature (107)..(107): n is a, c, g, or t
  misc_feature (115)..(115): n is a, c, g, or t
  misc_feature (124)..(125): n is a, c, g, or t
  misc_feature (130)..(131): n is a, c, g, or t
  misc_feature (138)..(138): n is a, c, g, or t
  misc_feature (143)..(143): n is a, c, g, or t
  misc_feature (145)..(146): n is a, c, g, or t
  misc_feature (158)..(158): n is a, c, g, or t
  misc_feature (163)..(163): n is a, c, g, or t
  misc_feature (165)..(165): n is a, c, g, or t
  misc_feature (169)..(170): n is a, c, g, or t
  misc_feature (172)..(172): n is a, c, g, or t
  misc_feature (175)..(175): n is a, c, g, or t
  misc_feature (179)..(179): n is a, c, g, or t
  misc_feature (217)..(217): n is a, c, g, or t
  misc_feature (239)..(240): n is a, c, g, or t
  misc_feature (247)..(247): n is a, c, g, or t
  misc_feature (250)..(250): n is a, c, g, or t
  misc_feature (256)..(256): n is a, c, g, or t
  misc_feature (260)..(260): n is a, c, g, or t
  misc_feature (287)..(287): n is a, c, g, or t
tttttcttatgttcctaagaggatattatctttggggaacattttagaganaatttagatctactttcccntcataaagattttnaataattcagtatttgggnngnggttgggnacagggggnnttagnncagtagnggaangnngtggggatatgngtggntngggnntnggntacnatacagttttcgatctctatgatctcgtgatgtttggnatctagtctctctttcctaatnnggatagngtnctattngggntccaattgtcaataccagtcctcaggncctttcctaactttctacctagcacctcaatactctctagg

SEQ ID NO: 543719 - DNA, 537 bp, Homo sapiens
  misc_feature (484)..(484): n is a, c, g, or t
ataataccagtgtatgtttcagttaggatgatttcaaaagcaggcatttgtcttcatggttgcaatacagctgctgcagccccaaccatcacaccttcataaagtactaaccaaagacaggaagaccagggaatgggccctgtgagcaaaaggggagagaagacaatttactgaggctaaagttaaccatcccagatttcatcacccacatttcatggcttagggaagaataagctctggaagttagagtcccacatctccatgtcagcaggccacgctctctctgcaggctctaggggagcccctcctcaccttttccagctcatagcactcctgggtttccttggctggtggctgcatcgctcccgtctccgcctccatcctcacctggccttcttttctgagggtcggtgtctgatgctgatcacgcaaagccgagtcataggagttagccacgggaaaagctactctagagctttcaccnccatgcccttgaaactcaacatattaaagaagcttttatgaaagaaaaaaaaa

SEQ ID NO: 543720 - DNA, 268 bp, Homo sapiens
gcaccccaccattctgatttcttttcttctttctttagagacggggtcttggtctgtcgcccaggcgggagcgcagtgatgcaatcatggcttcctgaaggccttgaattctggactcagcagtgctcccacctcatcctcccgagtagctgagactacagggtgcaccaccatacccagctactatcctgatttctgttaccattgattagtttgcctgttgttgaactttatataatataaatagaatcatacaatatggaaaaaa

SEQ ID NO: 543721 - DNA, 216 bp, Homo sapiens
  misc_feature (77)..(77): n is a, c, g, or t
  misc_feature (180)..(180): n is a, c, g, or t
  misc_feature (195)..(195): n is a, c, g, or t
tttttgagctggagttttgctcttgttgccaggctcctgagcagctgggactacaggcatgcaccaccatgcccggntaactttgtattcccagtagggtttctccatgttggtcaggctgatcccgaactcctgacctcaggtgatccgcctgcctcagcctctgggattataggcgtnagccactgcgcccancctccagttttcttttcttta

SEQ ID NO: 543722 - DNA, 191 bp, Homo sapiens
tttaatctttgtttctattaatttatgaaggccagggtctcactctgtcgctcagaactcccaggctcacatgatctcccacctcagcctcccaagtagctgcgactacaggcaggcaccaccccgcctggctaatttttttattttttatttttgtagaagacggagtttcaccattttgcccagactgg

SEQ ID NO: 543723 - DNA, 214 bp, Homo sapiens
ccccaataaccttggggtcttttattaataaacccctgattgcccttatcccccccttaagtaagggccggttgggtccccctcccccttttggttttttttaaaaagccaaagggagggggccgttttccgggggttcgccaaaaccaacctaaaaataatttaaggcccgttttttggaaattttttttttgaattaatttctttaaattta

SEQ ID NO: 543724 - DNA, 541 bp, Homo sapiens
  misc_feature (232)..(232): n is a, c, g, or t
  misc_feature (503)..(503): n is a, c, g, or t
  misc_feature (508)..(508): n is a, c, g, or t
  misc_feature (531)..(531): n is a, c, g, or t
ctggtgttacatttattccaaaatcaaaagcacaaaacaaaaaacaaaaaacaggagtcccatcaccaggcagccatgaccccatccccgcctgcttcctcgctcctatgctagcaataaataagtttcccagccgcgaataattataagaacctcttcctcatatgccagctgcaacctccgctaggtacgatacagaatgttacacagctacagtatgtacacggggganggggggccaccccagcagcctgtgccctggcctggtctacagttaactccactgtcccgcctcagctgcctctctgagtaagaagatgggagcccccctgagggaaaagttgctttggtgagagtaagaaggccgtcagacctcctccaaacaaaccaactccaccaacctctggctcttaaataacaaacatcatcatccagaaatgtaaggactcagccttggtcaaggtggtaaagggtctgtttgtctccctccattagacaggggnttgtnttgctaccctaatggtaaagggntgacttgggg

SEQ ID NO: 543725 - DNA, 337 bp, Homo sapiens
tgtgtctagaggcggcccatagtccttgggtcatggtcctcttcctctgtcttcaaagccaagagcaccagcaggtcgaagtccgttcgtcatgctgccagtcgtatctgattctctgaccacagcggggtaaaagtgcgtccagtggttaaggactcacatggtgtagatttgggccacttatagatcattggtatcccaaagtccttaaaaccaatcacacctgcgaagcccctttggccattgaaagtagtattcacaggttctgaggattagggcatgggcaaggttggggaatgattctgcttcccaaaatactaaacacaatccgcagatg

SEQ ID NO: 543726 - DNA, 1315 bp, Homo sapiens
  misc_feature (325)..(325): n is a, c, g, or t
attcgggacctatgcaaagacaggataaatgaggacttgatctcgagaatttacctgaccaatttgggatcctgtgttcctcgtaggtaaaccaatgcaaaaacattgaattgttactcttaacatattcctgtctactgtggtgtgggacaaagtaggattatagagccaatgtatttataagtggccttctgtagcttcacttcttagtcagtgttactcttccagtccgtccatagttattggtccgtgttgcgtcagaattttcaagtgtaactctgattgctggtgtgaagcgttctagccaaagcacgaatagtgaagntcaagaaagaagttgggactctatcactctcgtgcgtctttttcttctttcaacttgactttaacacatcatctgtttgcgcgccacagggtatcctctgtggctcccttgattcttaaaaggcatcatcgaagcttaaggatcccgagagaaaacggagaagaattattgatggacacggggttacgagatcgtggaacattggcaggacttgtgatacccacttatatgtaagtttggaagcgtattttcaaagaaggaagggaagggtcaaaggaacttggggagacaacaaatagggaatttgaagtagcacaattgggaaattacgcggagttcaaaaaaattcctccccaacgtgggtggagaaagaaggaactctggggcgcccccaaggttggtgaacatttaaggacccgaagaattgcccaattcctttttaacttgaaggtggcggccacaacccccggatgggtcgcctttgtccaaggatacgttgctcaaccggtagccaaaaaggcgttaagcccgagggcacaccaaagggggggccaaattcgcaaagcagtggggtatttccctgtttgacaaatgggttcgtctcctgtgcggcaccacaagtggctgcgagcttattcaatgcaaggtaatttccacccaaggggaattttcggcaaagcggagcggcgttgtttgtaacccccgcctgaagttgcattgtcaccaactgttgttactcgaattctgccaaaagaaggcctctccagtaaaagtttaacccccaattggtgggcgcaataccaacaagtttcaagtctccgaaattggcggacaactaagacttcgcgcacaaattaacgaggtggacgacataaccgttgagagcatcccacgttgaacaaggcacaaatgcaattaaggtgtgctcccaagagaaagagaaaaatgcagaccagattgtagagtggcaaagggtaagaaaacagtccc

SEQ ID NO: 543727 - DNA, 449 bp, Homo sapiens
aggtggattgaaagattttctgatgggcaattggtttacagagttattatctatagatctggaatcaatagaaaagagtgactgggttaagataggagttgtgaatagaaaggagtgactgggtaaaggtaaggggttgtgaagactgagattcttttttttttttttttttaaacactcttgctctgtcacccaggctggagtgcagtggcaagatttcggcttactgcaatcgcttgaacctgggaggcagaggttgcagtgagcagagatcgtgctgctgctaaaaaacacaaaaattagctgggcgtggtgacgggtgcctgtggtcccagatgctcaggaggctgaggcaggagaatcgcttgagcccggaaggtggaggttgcattgagctgagattgagccattgcactccagcctgggcaacaagagcaaaactccatctc

SEQ ID NO: 543728 - DNA, 258 bp, Homo sapiens
tcataggttcgcaggccatgttggcaggatggtctggaactcctgacctcaggtgatccacccgcctcagctttccaaagtgctgagattacaggcgtgagccaccacgcccggccaactttttatctctcttacaagttggcttaactgttacctcctttaggaatcctcaataattttcttactcttctttggccaggacactcttctgtgtctccgtagtatcttgttcataattctatccctgcgaacctatga

SEQ ID NO: 543729 - DNA, 824 bp, Homo sapiens
gcttgataacctgacagagtgcaacagtgcctacaacgaagcggattctacccttaccattgaggagggaaatctggacattcacaagaccaaagcaggaagaggaagaactcacgggtgacattcagtgaggatgatgagatcatcaacccagaggatgtggatccctcagttgtgtctgacttcaggtagacatggtgccaaactgctacgtggtcccagtctaacgaagaagcgtgtggagggccctggctccctgaggcctgggcaggaatcagggcagcaggcgcattgcagtaactttgccttcagcggaggactctacgggggcctgccccccacacgacgagtgaacgcaggctcccagccacattggcattccatgggagatgcacgtcaatcgtgtggtcttgccccatttgtcctattaacctcggaagaccttgtcccacgtgaatcgtgtgacatttgacttcctggttgtagcctgtacaaggcgaggttgcagatcattgcagatccgctgggaaccaataggccttgcagttctatagaccctggacagctgtaaaatgaacccaagaagaagaaatatgcaaaagaggcttgggccaggccaagaaagccacacaccttccttgctgatttgatatttaaggtcatggagaagggtgggactgggtgggaatggggtggaagggtgatggggaagctaatgaactagggagaaaaactttccatgtttgcgagatcgtctatcagaattgtctcctggcatcctaaaccatgtaatatgacacttgggggtggggttgaaataggca

SEQ ID NO: 543730 - DNA, 899 bp, Homo sapiens
ggcaggcgatgccggacgccgctcgcagcatctggatgagggctgcactgcaaagtgcgggcagcatgacctgtgggagatgccctgtgtgagctggagtctggacacctgcctcggagtggaagaaatgagtgtagcgtgctggttccctggaccctggccatgcccgtcccctgttctctgtgatgcccatgctgcctgtctctgtgccatgtgccatgccctggacacttgatgctggtgcctgatgctgcgatgtcccctgtgctgtcctgtgctgtgatgctgaagattgcatgtgatgtcccctgcttgtgtgacttgcttgcgctggtggccctgcctgctgtggcatgcctgtgacccagtcatcctgaccgctgcacctttgtggcgatgcttgcttgacttagagaaccatgacccagcactgtgtggtggctttacctgtctccaagcactcccttctgggatgtgtagtgtgggatgcacctgtgaccccttgggcacgactcaggcttgtagagaaggttttcgcggcaggggtattgtgtgccccgatgtctcttgacgggcttgtggtgtgttagggggggaccgcgagcctacacggttctgcctgagggacgtttccgttgccagtacttcgtttgccaccaagtcccctgtgggttgccttgttgcgcttgggggcttccgtcgattataattagtggcaacaggccgactgctattcgttacgcagtttctataatcagcatggaacgagttttatatcgcgagcttcccaaacaggcatcagggttacatttttacatacacccatttgcgaatttatatggattggcttttgacctttgaagcaacttcattattggcactacttctgaccgcttatg

SEQ ID NO: 543731 - DNA, 338 bp, Homo sapiens
catgtggtagcatggttccgcgagtgtaaaaggagggcgagtgaactcctgtttcttggtgatcgcaagagccccatgatctatagcgcgcagggcctgaggggctggccccgggttggtaactagatcgtggggtggtcaggtgttcatgagtgaggcaggagtccgaggaggccagttgtggcaataaaacatgattacggatactagtataagcagcatcaggttcgtcctttagtgttgtgtatggttatcatttgttttgaggttagtttgattagccagtagtgggtcagccagtagtgcgtcagccagtcagtgggtcagccagtagtggg

SEQ ID NO: 543732 - DNA, 392 bp, Homo sapiens
  misc_feature (146)..(146): n is a, c, g, or t
  misc_feature (181)..(181): n is a, c, g, or t
  misc_feature (184)..(184): n is a, c, g, or t
  misc_feature (219)..(219): n is a, c, g, or t
  misc_feature (289)..(289): n is a, c, g, or t
  misc_feature (336)..(336): n is a, c, g, or t
aaactgggggatcatcttcatctgggcgtaagttcgtcgacagggtgtctctgatcaagggtgtctgggattctttcaaattttttcttctgactcgcatagtaatttgtagagatgtccttgcccgtttggtacgcttgtgcttncatgattctctccatgttgccagaccatccgtacnggntggccaccaaagcacacggagattctgtcaggcgntgagacaccacagccttttcaatcttgtccttaagggctttatctttcatccaattcaggcagagggctnaaattctttgctcaactgacttacactactacttccttaggttttcntcactttcatggaacttgcactcctttccttggacaacattctggaacctcttccc

SEQ ID NO: 543733 - DNA, 1037 bp, Homo sapiens
ggaaagtattgtgaagacaggcttcttggagtaggggcagccacaattcagaagacactctaggctcggaggcatgcattggatttggcatgctcaggttgggctggttctgtgctgtatggatggacatagtgaccgtggggctggtcatctttcatgtcgtttcctctctgtatcaatggaagtgcaccccgggcgttaactctttcagatagttgtaagccaattcttctcattgtacacttgaggtgaaagtgaataaagagtgagaaaataaagttatgataccatatgagatgatctctacgagatgtgatgtggttgacatcgaaaggggaggtgggtaggctaagtgagtgaatcgtgcgtggactcgttaggatcaaaaggtgcgtgaggaaggtgtagagcaagttgatctcaatggacatgagttgatttcaagtaggcaatagataatactgtgggcttgcatggtggagtccttgagacctagttgtaaagtgggtgaaagcgtgggttttgtgaattcgcctgtggagagggagtgagtgttgagaagccagtacattcgtgtggtacacttgtaatcttagaatcctatgaagggccgaaggtgaaatggggtgagtaagaggatagcggataaggataattgggtgatatcctactcagggaagtggagatgaagtttatgattggaaacagtattataaaaaccagaacttgtgtggaagcaaaagtgtagatctgtttgcagtgcctggacaaatgagattccaagcagcagagtcagaaattagatggcaacccttgtgatagtacaaaggatgaactgggggcaatgtgtgtagatagaaagcattattgagaaaggagggaatcatttgagataaatagaaatgtagcgctgaagtgaaagtaacaggactgagtagagagaggttgaagaagaaaaaaagggagagtaagtaaaagtgggaagaggacttgtataagataacacttaagaagattaactaaggctatgagtagag

SEQ ID NO: 543734 - DNA, 351 bp, Homo sapiens
  misc_feature (282)..(282): n is a, c, g, or t
gggtcacaggttaccggtctctttcagctcaccaagcttcagctcctttacttgctgctccaactgcagtgcactcttgttctcattattctggacagagagaagcaatcagtggccacccactaaaactggagaccccagaacttggtgtctgcctcccatggcaccgggaagggtggaggcaggttagaaaaatatcccctttctcccacagccatcagagcaggactctggctcacaggtgcctttaggaagtaccatttcatgtgaaggctacaatgncccattttacaggtggggggaaacaaaggcctttgagggttaggggaagaggggcagccttccccaggt

SEQ ID NO: 543735 - DNA, 918 bp, Homo sapiens
  misc_feature (11)..(11): n is a, c, g, or t
  misc_feature (20)..(20): n is a, c, g, or t
  misc_feature (41)..(41): n is a, c, g, or t
  misc_feature (47)..(47): n is a, c, g, or t
  misc_feature (60)..(60): n is a, c, g, or t
  misc_feature (67)..(67): n is a, c, g, or t
  misc_feature (74)..(74): n is a, c, g, or t
  misc_feature (135)..(135): n is a, c, g, or t
  misc_feature (142)..(142): n is a, c, g, or t
  misc_feature (144)..(144): n is a, c, g, or t
  misc_feature (147)..(147): n is a, c, g, or t
  misc_feature (173)..(173): n is a, c, g, or t
  misc_feature (191)..(191): n is a, c, g, or t
  misc_feature (196)..(196): n is a, c, g, or t
  misc_feature (207)..(207): n is a, c, g, or t
  misc_feature (215)..(215): n is a, c, g, or t
  misc_feature (241)..(241): n is a, c, g, or t
  misc_feature (248)..(248): n is a, c, g, or t
  misc_feature (279)..(279): n is a, c, g, or t
  misc_feature (281)..(281): n is a, c, g, or t
  misc_feature (294)..(294): n is a, c, g, or t
  misc_feature (296)..(296): n is a, c, g, or t
  misc_feature (300)..(300): n is a, c, g, or t
  misc_feature (302)..(302): n is a, c, g, or t
  misc_feature (306)..(306): n is a, c, g, or t
  misc_feature (327)..(327): n is a, c, g, or t
  misc_feature (334)..(334): n is a, c, g, or t
  misc_feature (352)..(352): n is a, c, g, or t
  misc_feature (355)..(355): n is a, c, g, or t
  misc_feature (368)..(368): n is a, c, g, or t
  misc_feature (374)..(374): n is a, c, g, or t
  misc_feature (381)..(381): n is a, c, g, or t
  misc_feature (384)..(384): n is a, c, g, or t
  misc_feature (386)..(386): n is a, c, g, or t
  misc_feature (415)..(415): n is a, c, g, or t
  misc_feature (422)..(422): n is a, c, g, or t
  misc_feature (547)..(547): n is a, c, g, or t
  misc_feature (551)..(551): n is a, c, g, or t
taaactatgtnggggacggnaaccgggacccggtgtctgcncctgtngccttcgcctccnaatcccnagccacnatgcgtaaatacatctccatccacgttggccaggctggtgtccaaattggcaatgcctgcngggagcncnacngcctggaacacggcatccagcccganggccaaaagccaagtaanaaaancattgggggangaaatgantccttcaacaccttcttcagtaaaangggcgcnggcaagcacgtaccccgggctgtgtttgtananttggaacccacantnattnangaantacgcactggcacctaccgcnaacactnccaccctgaacagctcancanaggcaaggaaaangctgcnaataacnatncncgaaggcactacaccattggcaaggagancattgancttgtgttggaccgaattcgcaagcaggctgaccagtgcaccggtcttcagggcttcttggttttccacagctttggtgggggaactggttctgggttcacctccctgctcatggaacgtctctnagtngattatggcaagaagtccaagctggagttctccatttacccagcaccccaggtttccacagctgtagttgagccctacaactccatcctcaccacccacaccaccctggagcactctgattgtgccttcatggtagacaatgaggccatctatgacatctgtcgtagaaacctcgatatcgagcgcccaacctacactaaccttaaccgccttattagccagattgtgtcctccatcactgcttccctgagatttgatggagccctgaatgttgacctgacagaattccagaccaacctggtgccctacccccgcatccacttccctctggccacatatgcccctgtcatctctgctgagaaagcta

SEQ ID NO: 543736 - DNA, 258 bp, Homo sapiens
  misc_feature (77)..(78): n is a, c, g, or t
  misc_feature (121)..(121): n is a, c, g, or t
  misc_feature (245)..(246): n is a, c, g, or t
gaattatccaacagaaaccactaggtcatagagtacggtagtattctaattaaagcaaataggacactcaccatagnnataaaacgacatattcaccaaatgctgcattcacctttaagtnactccatcataaaaaatatggattgagtcaatattcatatgacataaaatctagaacctggaagccatttcagtagatctctccatgttcgcacaattctaatatctatggttcaggtcactannttggtagtccta

SEQ ID NO: 543737 - DNA, 616 bp, Homo sapiens
acggtacgcagttccccaactttagatcattccttgtattcatatacattgttaatgtttctaatggatgtgtaaccattataaaaacttttttgggtggggtgtggtgtctcatgcctgtagtcccaacgctttgggaggccaaggtgggaggatcgcttgagcctgggagtttgagaccagccaggacaacagcgtgagaccccatctatgcaaaaaaaccaaaaaattagccaggcatggtggtgcatgcctataatcccagcactttgggaggccgaggcgggccgatcacctgaggttaggagttcataagaccagcctgactaacatggagaaaccccacctctactaaaaatgcaaaattagccaggtgtggtggtgcatgcctgtaatcccagctactcgggaggctgaggcaggagaatcccttgaaccccaggagttcaaggttacagtaagctatgatcacaccactgcatttcagcctgggtgacagagacaaactctgtctctaaattagaaaataaaaaaagaaagaaaatatggtggcacagttatacaacatgtttatgttataagctgtttttatgaaagacgtgatatgttacaaaat

SEQ ID NO: 543738 - DNA, 336 bp, Homo sapiens
ttggttattgttgttaaattatattatggagggggagaggtttgaggaaggagtggttgggggtttgaattgtaattagggtttgaataggttgatgttggttgtgtgtgatatgatggttaatttttattttaatgatttggaggtgttgtatgaggatgatgttgagggggagggggagtgggattgatgtttgtagaggtgattgaaaagttgtatgatgatgtttttgatttttttgttggttggagttggttagttgtttgaagtagggaagttgagtgtgttgttttttggtttattgttttttttataaatgtaaatgggttatgttta

SEQ ID NO: 543739 - DNA, 341 bp, Homo sapiens
ctcatatgatgctcgaccctctctgtaatgagatcctattactttcacactttactatacttcctatctataaggcctctgctcttcgagttggttcccatctgacctggcagactctctggcccttcctaagctggctacctctatatctgtccctggcgatgcctgcggctcgacgccgagaggccatcaaccagggcggcaacgcccgccgagctcatcgtcttgttgttctcctctgccatagccaagatctcctctcttaaccccgagctactcgtggaagccgtcgaccacaacggttccgctcttggggtcctgctggatgtcgactaacgccg

SEQ ID NO: 543740 - DNA, 433 bp, Homo sapiens
  misc_feature (20)..(20): n is a, c, g, or t
ggattcgctcctagacggangtatggggtcagagcctgggaaatgtacagcccaatccactatgtgggacaccagagcactcctcctaaagttgggcctaaccaacttacagattctacctctgctgcttctcatctgcaaatgccacctgctggcctgcatagcccattgcaaccattgccagcacaagtgcatagttcttgggacccagaagagcatcttgccactgctactgccatgacccacagcacagcggctgcccaaggacttgagagcctataagcatctgagaaagccatgcagaggcccatgaatcagctcacttggaaccactaacacaggtgccagcatacgtaacaccatgatatgaggatagacatgcttggccaaccactgctacctctgaagcctggagatgagcccatctggcact

SEQ ID NO: 543741 - DNA, 147 bp, Homo sapiens
ggagtaatattagctatgttttctctcagaagaccactttatcttctcaactatagaccaaaatctccttgatccattttagcattgtggtagtataaattccatgtggtttttaaattgttgccttcttaataaactattacattc

SEQ ID NO: 543742 - DNA, 392 bp, Homo sapiens
  misc_feature (226)..(227): n is a, c, g, or t
  misc_feature (244)..(244): n is a, c, g, or t
  misc_feature (322)..(322): n is a, c, g, or t
  misc_feature (368)..(368): n is a, c, g, or t
tcagattctgtacggagaaaatatcgtcaagttccgcttcagtcaacagaccgcgttccagaacgacttcacgtacactcttaccggtttcggcacagattttacccacgatgtcaccgttgtggtgaccgatgaacgggttcaggtaagtaacgataccgatagagttgtaaacgtaaccttcgcacacttctttgttagcagtgatgccaacttagtataaaanngcaggcttcaacggatncatttttctatttcatagcccggagcaacctgtgaacacattttcagtttcccgtctggcgctggcattggcttttgncgtgacgctgaccgcctgtagctcaaccccgcccgatcaacgtccntctgatcaaaccgcgcctggtacc

SEQ ID NO: 543743 - DNA, 107 bp, Homo sapiens
ggctggcagcagcacatacagtatcatgggaggacagaaggcaggaggccaaggaaagaacagaggcccagaaacaaaaagagacctaggcgctagagaaataagag

SEQ ID NO: 543744 - DNA, 132 bp, Homo sapiens
cggcacgagaaggtctctgaaaaatcttcaattggattatgttgacctctaccttattcattttccaggtgtctgtaaagccagtgaggaagtgatcccaaaagatgaaaatggaaaaatactatttaacac

SEQ ID NO: 543745 - DNA, 101 bp, Homo sapiens
agagtctaagtaactggtgctccgtatcagaggtgggatgcagatcttcgtgaagaccctgcactggataagaccatcaccctcgaagtggagcctcatgt

SEQ ID NO: 543746 - DNA, 382 bp, Homo sapiens
aaagggttgatggaggaattcacaggtgactgacacgtctttgtaaagaatgggatctgctcacttctggtctttttggccgggaactcctgattggtgttaaagcggtaatttcccccatgtgagatttaaaatcactgcgtttgagctagatgaattgttaaaatttctggttggctattagactgatgaagtgaaggttattttcatagaaccggtctttaatacaacaaaatgcttacacagagcccagacctaatttttgcctgcgcacaaatgtcttaactaatgggcgggatttttctttaaaaggtaagaatctatttgcggtttgggaaattactgaaaagacatgcctggtttggttaaacccatcaaatgg

SEQ ID NO: 543747 - DNA, 220 bp, Homo sapiens
actacaggactcatttcagaatggccgaacagtaaggggcttattcttcccacaccaccccctaataaaagagaggggaaaagaagaagagactcccacactgtcgacgcaccttttttcagaatggccgaacagtaaggggcttcttcttcccacaccaccccctaataaaagagaggggaaaagaagaagagactcccccacactgtcgacgcacctt

SEQ ID NO: 543748 - DNA, 427 bp, Homo sapiens
  misc_feature (150)..(150): n is a, c, g, or t
gcgatgacggtggatggactatccttccttggcactagtctctctgggcagcgagcagcctttacagtgcactggtggtggtgaatggacttggagcttctagtatctgctccccaaagttcaaggactcatctgcctccttgggtttgngccggggcttcagctgctctagctttttggctgcagcctcaatggcggctgcagctcccaggagggcattgcgcagcaatgactgtggggtcctctgggtctacccattctgttcccttcatggcttcagcagcctggatgagctcagtgacggaaccagccacacgctttgaatgtcctgtcaactgctgcttcagttctgggcttggcttctgcagggtcagcagtacatggtccagcagttcccggtagccattgcactccgggcgggttacga

SEQ ID NO: 543749 - DNA, 483 bp, Homo sapiens
tcgtgttatatcggatatcatattaagattctagccggctgggctcggtagcctcattctcgtgctgccagccacttagtgcacgccgaccgcggctcgggtcacttgctgatcacggagtttgcaagaccagcctggcgtacacttgcggaccctttctccacaagggatttcggatattgattgggcataatggcacacacacttgtaatcctagtagctcaggaggctgaggtgggaggatagcttgagtccagtaatttgaggctgcggtgggctatgattgtgccactgccctccagtctgggtgacagatcgagacctgcttcttaaagaaagattataacagttacccctagaagttttggggtatttgttcagtaatacaaattactgaaattttgagtaagttacttttttaagcacataaaaagattctgaagagacaggcttcttaaaattccttcagtgccctcaccatat

SEQ ID NO: 543750 - DNA, 539 bp, Homo sapiens
ggctgagacaaagctagggcttcatatgtgccagacagtcatcctgtccctgagctacagccccagtccttagactcactgatgaggtctagtgagtttgcagagtcttaagtgaggttaccagagtcctgaaggtcacacagactaataagtttcctgctcttcttgttcaagtcccagaagagagagatctgttattgtcttgtggtttccaaggagtttgctgcccctggaatctacagcttctttcctgggcatagactcttacaggcaactgtgctgggctcaggaggatctgcagagctcctgtgggcctgctctccagatccttacagcgtgggagactcagcaaatcttctttaaggacaggggagatagtttgtacatagcctgtatgtcagaccttttatttgaagattttagaaaaatacaaagttctaaagtatttagacactgggtaatatacaagtgagagtccaaggccagcctggtacttagtgtgtttccaactggctagagcttcattgtgagactgactt

SEQ ID NO: 543751 - DNA, 156 bp, Homo sapiens
attttgacccatttgtgacatagtacagctttacatactttactacttactaggatacgcgggacgatcggcctatcgctattacctacacagcgcgggacgcgttattacggcaggtgtcgggtcctaagccttccacagcggagcgagttaggt

SEQ ID NO: 543752 - DNA, 321 bp, Homo sapiens
tagcaggatccctctttacctcctaaaaatcacgcatctcgtgagtctagtaacggcaataaatatttcttgggattatacttatctgattccacccctataggaagatgatatcttatgttctttgcaactatagaagctgtgaagatcatcacaagtgcctcttaaagcgagtgttaggttcgttagagggtttaatattttctgcaatggttagtaggaatattaataaatgtagtataatatactgagatgataaagtaaaagtactatattaaatatcaaatcaaccaatacattcacatttgtgttaggcacagg

SEQ ID NO: 543753 - DNA, 231 bp, Homo sapiens
ctgccgcctacgtactacctagtgcgtgccggcagcacgaatggaagaatcgatggacatggacatgagcccccgtgagggcccagaactatctttgcggttgtgaactaaatggccggacgaaagattatcactattaatggtgtgataagtgatgaactagtgcagcaccaggttatctttgaatgaacggtgcagtttagtgggtctggtgcaaatggattgagttgc

SEQ ID NO: 543754 - DNA, 364 bp, Homo sapiens
gcactacaggcggctactgccgtaggcagttgcgggcggcaaatcagtgttggtgcgcgcacgctaacgggataaagggcgctaattaacgcgtaaacctgatgagtatggtagacacacacaggccgcgtacgccctgccgtgggggactaccgcgggagcgacgccacgcgtggatgtaccgctgtgtgacccctacaaggagagagacactagttacttgcgtgcgcccgcggtgatataaggagtcacccccgaacactgcccccgattatagcggcatcgttactgcctgactggctaacctgtaccttcatcaaaagtggtcatcacgtacccggggtttacctcgggggggggcggt

SEQ ID NO: 543755 - DNA, 169 bp, Homo sapiens
agcagtgaaccatcgagaatgtcaaggcgaggatacaagataaggaaggcattcctcctgatcagcagaggtagatctttgccggaaaacagctggaacatggtccgtaccctgtctagactaccacatccagaaagagtccaccttgcacctgggtaagggatgctgt

SEQ ID NO: 543756 - DNA, 253 bp, Homo sapiens
cctgtccagccctagatacgatatggatcctgtatgcttcaatataccggaagactgggatgagcgggccaagatcgatatcccacagactccaagcctgaggactgggacaagcccgagcatttccttcaccctcatgctcagaagcccgatgactgtgatgaatatgatcgacggatagtggagaacccccagctgattcagtaaccctgagtaccaggtgcttagtggagagccctcgcgccagtatcga

SEQ ID NO: 543757 - DNA, 384 bp, Homo sapiens
cccccaggcagaaggccgcccaaaggcggggccggtgtcttccaaattaggggctgggggcggccacagcgggcctggaaaccacagcccttaccccaatcccccgagccccgccacgaacccacaggtgtggggtttaaaaaaccatggaaggccggcccccaaccttggggggaacccctttccctcaaagccgggccccggccccgtttgggaagctcatcttgcgaagctgagggagctcagggcaaaggccaggctagcccggcccggaaggggccgaggctgcacgggcctttgccagaacgctcaggacatcccggcctgggttttcaacgctgttaggaaaattaaccaatgaataaagcaccgttcagtgcgcca

SEQ ID NO: 543758 - DNA, 131 bp, Homo sapiens
atcggggttctcgacattacagaacaggctcctctagagggatatgaagcaccgcacaggtccttatgagttactaagctggggctcgtagtgtactaggcgagacagcagtgtaagattaaactagttga

SEQ ID NO: 543759 - DNA, 279 bp, Homo sapiens
cgttttaagccagggtttcgctcattccccccggctggggggcaggggtggaataataactcactgcacccttgaactcccggattcaagcaatcctcctgcctgacccttccgagtaattgggactatggggggggcccccccccccccgcttttttttttttcctcctttttgtaaagacggggtctccctatgttgcccgggggggtttcaaactcaagtgttccttccccccccccctctataaaatttgaataaagttgtagatgagtttggta

SEQ ID NO: 543760 - DNA, 106 bp, Homo sapiens
  misc_feature (98)..(98): n is a, c, g, or t
gatcttctttataattctactttggagtgctggtctccatggtttgatggtatctgaggcagggttgctccacagggtaggctctaggaggggctggnaaacttag

SEQ ID NO: 543761 - DNA, 128 bp, Homo sapiens
actgctctggctgctgggtagcgacacgtacagcttgcgctgatcgttgaccggcttgagtgcggagacagcttgtcacgctccatgcgcgacagaatgccggtcaggctggggcgcaggatgcaggt

SEQ ID NO: 543762 - DNA, 739 bp, Homo sapiens
  misc_feature (497)..(497): n is a, c, g, or t
tctgaaggaaaaattaaatatgatgcaatgctcgacaaggacagtcaaaagacaaggtcatttatagcaaatacactgacctggttccacaggaggttatgaatgcagatgatccagaactgcaaagggccgatgaagaagctattaaagagataacacgaaaagacaagagtagaccttagaaaaatactgtatcacagaaggtcgccgcagccatagccagttcgagcagctgacaaatagggtcctgcgtcacaatataccgatacacaccatactcagcaaggagtggcggatgtcaactctaggagctgaaacaagagaggggatatcggcatcggtcagaaatagcacgaaagatccaataggagcctcccaacagtgtcaacgattcaataagaaaataccccagggggaggcaccatactccatccctgcgccagtcaatgcatactacctaaaccagaacagaaagacactgtcaacagagaaacaancaacgaagatgggagaagaataacactccctcgctatatctacacatggcaaaaaatgcaaaagggggactacaaatccacctcagacaacacgtctggcgtgctgatggaaagaaggacaacacacagaacacatcaacatgaagaatatctgcacaaaggcagaagcctctacatagctgatcggaagatcgcgaaactgcggaaagcgtgcccagtaagagaaaaaggtccacaacaca

SEQ ID NO: 543763 - DNA, 490 bp, Homo sapiens
catacctctgtctaggctatggaagatcaattctgaggacaggctgtatacgcacatattgttttagtcagaaactaggatggagctaggtgctgtgactcacacgtagaatcacagcactttggaaggcccaagtgggaggatgacttgagttcaggagttgaagaccagcctggacaatatggtgaaaccatctttacaaagaatacaaaaaattaggcaggtatggtgctgcgtgcctatagtcccaactgctcaggagaattaggtgagaggatcggctgagacgatcctcccaccctggttcactcctctcaggctagactctctctccttttcattggcttgtcttagctattaataagaagtctcggccgggcgcggtggctcacacatgtaatcccagcactttgggaggccggggcgggtggatcacgaggtcaggagatcgagaccatcctggctaacacggtgaaaccccgtcgttact

SEQ ID NO: 543764 - DNA, 162 bp, Homo sapiens
gggttatagcagtgaagacagaaaacaaatggtggtcgtttcttccttatttagtcttacttcagtgggaatcaggtacattcctatgtgaggccatatttatccttatgctcagggtctgtatgctggggcgaccattgaaggttggacaactccccgctt

SEQ ID NO: 543765 - DNA, 918 bp, Homo sapiens
  misc_feature (369)..(369): n is a, c, g, or t
  misc_feature (372)..(372): n is a, c, g, or t
agtggtgtacaacatgccgtgaggatggcgggtgcatgtaggatcaggtgtgctcctggtcagtcgcgtggccccgtacagtgtagatcggcttggcatctattcgatctgaggtggcttgcgttgtcatcatgcaagtacctcaagggcctcgggtggatgatgcgggagcgttgcatcattcgacatccctttatgtgttgtttctggggtgctcattacctggcatctattccatatcaaggagctacgtatgccgtacatgcgcatgtcaccttgttagtccaccgcaagctgtggagaccatatatttaaacgggtaaccagcccgtttgtcacattgggaagacgtctccaaaagaaccctanaangcctttggaattgaaacttttaacagcggggaaacataatttttgggtacctttttcattcctaatccctttgtgggcatttccacccttttggttggtgcttcctacaggaaaattggtttggcttttaagtggacaaagagcttaaacgaaattctcaccgatggttgaacctggttgacaggttggtccgcagttctcaaggggggattcccaacttttagccaattcttgggcgctggcgattcacaatcaccaccaaaggaaaagaacatggggtggcgtttgtggggcccacatttgaaacatacggaactcttgtgtccagactttaaacttaagacagaattttccgcgaggacttacggttgttgctggtaagaacgggttcctggatctttggcaactaaagaagcggtctcttccattaatttggaccccaaatggaggtcatcaagcattttgagccgtcaaacgaatctcccaagtggggccgaagcgtggaaagaaacctccggttggtgacgggggtcccgtatgtagaga

SEQ ID NO: 543766 - DNA, 323 bp, Homo sapiens
caggaagtcccttgccatcctaaaagcccccccccttctttttaaggggaatggcccagtcctttcccaagtccccacagggggggtgatagccttgctttttgtttaaattatggaaggcaaaattttttttattttccccctaaaaccttttttattttgttttattttgaatgatgggccttcgggcccccccttcccccttttttgtcccccaactttagatgtatgaaggcttttggtttccctgggagtgggtgggggcagccaggggtttcctgttccctgacttggggcccgttgaataaaagggccccccttta

SEQ ID NO: 543767 - DNA, 286 bp, Homo sapiens
cacccaggtagaagtgcagtgccagagatcttggtcaatgcaacccccgtcccaggttcaagcgattctcaagcctcttaaatagctggtattacaggcatgcaccacagcacccggctaatttttgtatttttagtagagacaaagtttcaccacactggtcaggctggtctcgaactgcctggtgatcgaggtgatccacccacctcggcctcccaaagtgctgggattacaggtgtgagccaccgcgcctggcccattttatctttatttttatttttgtggg

SEQ ID NO: 543768 - DNA, 345 bp, Homo sapiens
gtagcagggtgctggcaaaggtggtgggtagctggtgccagtggtttactggccatttgaggttattcctcaggtattggaattaaaatgggatgcaagtcaaggaaatcaattggcaagatcagcatggaacacagcggcaggtcctacaaagcttcccagatataagggtgggatctcaaaagctggcccggtgaggcatttggctttaacaatgggcagttggagcagccaaggtgtggggacccaaaatctgccgggaagataatgtgtaaatgaggggtggtgaagagtattgtgggaggaggggatcatggtggcctgggcagttgggaaaccgggaga

SEQ ID NO: 543769 - DNA, 601 bp, Homo sapiens
  misc_feature (591)..(591): n is a, c, g, or t
tgattaatggcgcatcaggagaaacacaagattgctgctataataaatgcactcttacacgcttgagcggatattcagccaacgtagaagacatgcggacgattaaggtgaagaacttggggtcattaaagaaagtctgacggattggcttgcagcttttgagacggatgataactaccatcagtgagatgacctgaaacaaccactcttaatgacttgaaaaagtacccatcccaaagtcaactatgggttttcaatattgtatatttaactgaagataaagttcatgttaaaacccattttattgaagtgagagaagaatctcgtgtacatcatgattctcaagccatatatgaagaaagagatggcaattacattccgaaagtgtgcattaatatacacaaaatgtgactgtgttacccatgctgtcctcgagctcgtaggttcaagcgaccctcctgccttgaactgccaaagtgctgtgatatcaggcatgagcgcacactcccaggtgtgagtacattactgtgggtgtttaatgccactaacacaggaggttgccgaacacatactgattggcgtaagcacagngattcattct

SEQ ID NO: 543770 - DNA, 267 bp, Homo sapiens
tgagatgaggaggagggtatggaatggaggtgagaaggtggtgccagagttggtattgccttggaagcgcgtggcctggcccctcggaagacagatgccttaggccgggtccgtgttgtctaaagtacaccacgttcccaatggatgatgcttgaagatagagcgtgaggagtccagctgtagcaccagaatgcaagggagctggtacagggatagaaggtcctctaaggatttgaccctgtaagaggttttggtgaccgaaggagt

SEQ ID NO: 543771 - DNA, 99 bp, Homo sapiens
ttcttgggccttggggggggtttctttttccccctgggccccactttggcccttgggccttttttggtgtcccttttgttcctgtttgcccccgggccc

SEQ ID NO: 543772 - DNA, 759 bp, Homo sapiens
tgacccctgtaagttaagatatactgatctctacccagggttcggcagataagtctcccatcattagtcaaactatactaactcacggcaaaggacccaaccattggtgatgaccactatgagtgtgcgtactgagctatgatatcgatgggatacctagtggtcaaccgagagacgcatcaacatcactgatctaaactcgtaaggcgactaagactgtagatacaacgagcatatctctaacctcctgccatacactataatctatctgctatgcacacaccggctgtcaaagtattaagctgacatccgccacactccactgggaagcaatatgaaatgatctgctgcagtgctctagagcgcctaggattcatcttgcttttcggccgtaggtggcctgactggcatgtattagcgaaagctcatgcacatagacatcgtactacacgacacgtactaccgttgtagctcacttccactatgtcctatcaataggagctggattgccatcataggaggcttcattcactgattatcccctattctccaggctacaccgctagaccagacctacgccaaaatccagttcactcatcatattcatcggacgtaaatctaaactttcttcccacaagactgttgctcggactatccggaatgcccccgacgtaactcggacttacccgatggatacaccacatgaaaacatcctatcatctgtaagggtccttcatttctctaacagcagtcatatta

SEQ ID NO: 543773 - DNA, 542 bp, Homo sapiens
ttgttgggggtttcagggtctcccagttaatgtatgtgtctcacctgagtttccagcctgttttgaacttgggcttttgtcgttgatggtggtagtattgttttgtctataactgttgttacaggtctgtacttgatcggcacctcctgctatcttctttcctgatgggttgccagttattgttatcggtggggggagtgggcggccttatagcccatctgcttcttaaagttccctatcccattaattgaacatagtaaattagtaagaattattctctagtattcattcagacatttaatagattttttatactatctgcacttctcgtttatcactctacaatctgcacaggtactttttgattactcttatttcacccctccctccattaaggcttttatttactgtttctggagaatcctcgctcagccacttacgttttcttcccttgattctttcaagcttaggaaactagtatattagactatttttagttttcctaagcttgaaaccaatcccagtacaggaaaaaaaaaaaa

SEQ ID NO: 543774 - DNA, 745 bp, Homo sapiens
ggccccccacattcggggaaccaagggtgccctcccctacaggctggggttgcgcccctctcagggcgaccggtgccctctcctcggtccactcagcttgggcttcccccctactttcatctctcccccacggagatctcccctcccggcggtcccacactttggcgccgcccccccgctgggcgaggtgtccgctgcccagctggcgcgagtctttctttccccttcgcgggagtgccgctcctctcccctgcgcggggtggttgccagccgccaccttcgtccggcttgccccccgtgtattcggcggcctgcagcgtaggaagcagtttccctgggggaatattctcttcatcgccgagtttccgtgcttcaacatgtcccgcgcccggtcgccccaccgtaatactcccccctctggcagccgcctgcgcactcgttgtccgaccgccttcccccacgccgaggtctatcgtccatctgcagaaaggcatctggtgggcagagaggggcccaccccgctgatagagagcggtgccgggcgacacactagtgcgtcccgctttgctcaccacgacagatattagcgccagctctcgctcacatgcgagccgctggcggggatcccctccctgccctccgcgggtgccccccccaggtgggtcgtgcgcgcgcccgccttcgcgggtctcttttctatttgcaagccacatcaaaagacccaacgttcttatcaatgacgaaa

SEQ ID NO: 543775 - DNA, 391 bp, Homo sapiens
tcgctggcgctctgaaggcgtgtgggatggcaggcgtgggacgggagcagtgtggtgctgcgctcccagcgcctctgcttggtcccgatcttgatatgtgcgctgacatctgccggatctcgctgatcttgctgtcctggtgcccgatcacacaggcaatcaaatcgttgggagcaaagaactcctgtgagctggactgagtgacgggatccagtcctggcaacaagctgggtgtggcaaaggggaccgcatggatagagaagcatgttgagcatggtgacctacagttggggtcacaagcccccaatactagaccctggaacagagaaaggccctggtatggcagagaagaagaaaaagtacctagggaagaggctcggatggaagggga

SEQ ID NO: 543776 - DNA, 396 bp, Homo sapiens
tttgcctctcacagtgacagcataacaggatgtgatggccttctctggggttgagacaggctctgtcaatgtggagcgcaagaggagatgttcatataacttggtaaaagcatgttctaaggcatgtgtaagctaggctgctaagttgtgctgtgtgaatgaaaagccaacagtaagcctccagtgaagggttttttgaggccgtatgtgtggtattagaatatattgaggttgatacatgaaaatgcttggaagtgatggggattagtgagaaacttatgatggtgcattgccttttataaacatggagtgaaagccatttgactgaacgtttgctgtgcttgaagaattgcttcaggacccgagcgtttgtatgtatgctgttcctgcagttag

SEQ ID NO: 543777 - DNA, 108 bp, Homo sapiens
  misc_feature (18)..(18): n is a, c, g, or t
gtctcgactctggcctcnaagtgatcacttccttgaactcccaaagtgcacaaagtgctgggattacaggcgtgagccactgcgcccggcctgtaacactcattttag

SEQ ID NO: 543778 - DNA, 207 bp, Homo sapiens
aggccgggtacgctgtcgtcacctcggacgagttcgagggcgatcccgccagcgtcgtcaccgagttcgacccctacgaggcgtgagccttgctccggggcaggtcgcgacctgcctcagtcatgaacggcggtgtggagggggcagcccgaccatccttgtatggacggtctccgtcagtgcgtatatgcacggtctgtatggacg

SEQ ID NO: 543779 - DNA, 862 bp, Homo sapiens
gggcggcgcaggtgagagcgcgcgcttgcggacgcggtggtattaaaacggttgcaggcgtagcagaagtggtcgttgtctttctaggtctcagccggtcgtcgcgacgttcgcccgctcgctctgaggctcctgaagccgaaaccagctagacttttcctccttcccgcctgcctgtagcggcgttgttgccacctccgccaccatgttcgagggcgcgcctgggtccagggcctccatcctcaagaaggtgtggaggcactcaagggacctcatcaacgaggcctgctgggatattagctccagcggtgtaaacctgcagagcatggcactcgctccccaacgtatcattatggtagcagatcacccctgggggtctgagggcttcgacacctaccgtgcgaccgcaaacctggacattgggcgtgaacctcacccagtatgtccaaaatactaacatgcgccggcaaatgaagatatcattacactaagggccgaagatacgcggataccttggcgctaggtatttgaagcacaaagcaggaggacagttcagacttgttgaaatgaagttgatggattaaggatgtgtgaacaacttgggaattccagaacaggagttacgctagtgtaggtacagatgcgttgctgttgaatttgcacgtttattgcggggattaggcatatggggagatgcatgtggaaatttctgtgcataaagaaggggtgaattattaaggggggaatttgaatggaacgtaatggacggaaggaatgcgaaagaggagacacggaactaaagaggaacagtacagtagtgatgggcagaattaaaaggatcaaattaaggaaatttgtgcac

SEQ ID NO: 543780 - DNA, 771 bp, Homo sapiens
ggcttcaattcaacaagaagacctaactatcctaaatatatattcatccaacacaggagcacccagattcataagtaaagttcttagagacctacaaagtatgtttcacagtaatagtgggagactttcacactccaatgacagtattagatcattgaggcaaaaaaatgaacaaagatattcaggacctgaactcaacattggatcaaatggatctgatagacctttacagaactctgcactcaaaaacaacagaatatgcattcctcacatcatcatatgccacatactctaaaatcaaccacataattggacataaagcaatcctcagcaaatgcaaaacaactgaactcataccaaatacacactgagatcacagtgcagtaaaaatagaagactaagaaaattgctgaaaatcatgcaattacatggaaatcaatcaacatgctcctgaatgactttttaataaataatgaaattaaggcagaaaacaagaagttctttgaaaataatgagaacaaagttgcaacatactagagcctctggacatagctaaggcaatgttaggagggaaatttatagcactaaatcccacatcaaaaagttaggaagaactcaaattaataacctaacatcacaacggacaagaactagagaagcaagacaaaacccaaagctagaggaagacaagaaataatgaaaatccgagctgaattcaagaaccgagacatgaagaaacaaaattccaaagatctacggaatcagggtaag

SEQ ID NO: 543781 - DNA, 194 bp, Homo sapiens
cacaatgtttcttccggttcgatattgtgtagaatttatgctcacagccattggctgaccacacacacggctatactcctgtgtgagtcaaaatgtgacggctcagctggtagtccctgatgcaggccttgccacacccttatgccgaaaatactttcagcatcagggtgagttgactgaaatcaaagaacatc

SEQ ID NO: 543782 - DNA, 332 bp, Homo sapiens
  misc_feature (24)..(24): n is a, c, g, or t
gagacagagtctcactctatcacncaggctggagtgcagtggcacaatctgggctcactgcaacctccacctcccgggttcaagcgattctcctgcctcagcctcccgagtagctgggattacaggtgcctgccaccatgcccggctaatttttgtattttagtagaggtggggtttcaccatgttggccaggctggtcttgaactcctgacttcaaataatccacccacctcggcctcccagagttctgggattacaggcatgagccacagcgcctggccccctggatcatccttgattcaccctttgtctgacccttctgtcgtcttctc

SEQ ID NO: 543783 - DNA, 423 bp, Homo sapiens
cctgcacctgataaagttgaaacatttgcgttcgaaattgcgatttgtcttatggcgtgattgaaacaatccacaacaaataaaatcgtattatcattgctcaatgctaaactatgaggctgattgaatcttgcggttagttccaattccgtctgtgaatccaatttgaccaagaaaaccagcaaaaagtgttgcgtttgcgtttgggattgaaattcttcgaattgagtgatcttgaagttcactcacaaaaagagagttacttgaagaatgaaaaatgtttccaaaaggaaaattaaatgaagtactaccaaaagttgaaactgtggataaatccgctgatttttttttattttattgggttttttgtttttcattttcattttcattctcattactagataatctacgaattaaaccatt

SEQ ID NO: 543784 - DNA, 1090 bp, Homo sapiens
ctgtttgccacagaggatgcacctgagaggtcctggcggcagagcctggccacaaagatccaagactgcctgcgagggcgctttcactggacggcagaaattcctccgggctgaacgagatcagccatcatgcatccagtcgtggatggcagtggaacactggagccggaggaaggcagccaagaggaagctgggcaggcacagaccatccggcggcctcatccgaggcttcgtcctgcgccacgccccccgctgccccgagaacgccttcttcctggaccatgtgcgcaccatcttcatttgctaaacctgaggcggcagcatgccccagaatgtcctggacacgctcgtggcccagcgcccaccacctgccctgacgctgaggcctcagagcttctgcgggagtcgtgcataacgaccatggtgtggcaactactgccggagtatcagccctgagctggaagcagcagcctgcaagcagaaggccgctggctacgtgagcatcttccagggcaagaaggataactcaccctcagaagtgtaccccaggcctctctcatcacgcactcgacgcttggtacacgatcgcgatcacgccccgaagtgcttgcaggaccttgggctctgagccaattcacgcactgcggtgcctcgcatgtgacaatccaacccgcaaagggctcaaagcctcgctcccgggaagctgagcgagaaaagcccaacgccgcaccaacacgagaacgacgccccaacgcctaacaccacgactggataggcccaacgccccgggagcaccgccacacgcagagagacaaatacagggcgacaacgtacacagagtcagacaccaagcacaacgggcaacgagcagaataaaaagcacacgaggaacgagaagccgcacacgaccaccctcagagccacagcgaaaaagtgcaacacgactacaggagaaacccacacgaaggagaccagacaaagacggacgactcaacccacgagagagacctgtacccacggacaaggctgcagtgagcacacagaacacgcagaacaagacaccccacaacgagacaccgcaaaacacaca

SEQ ID NO: 543785 - DNA, 184 bp, Homo sapiens
caaaccaaagttgcatcatttaggtcaagtgtttgtcctcagcagggcaaaaacccactgcacacatttcacattagccagtgctgtgcacagcttcttcacctaataccaaggcctcaaaatcagcctgcagtggaggtttcagtcctctgtacaggtgcttagacaaaagccctccgctgat

SEQ ID NO: 543786 - DNA, 279 bp, Homo sapiens
caatgtagctcagggcagcgctgagtggcacgccctccgggccaagtacttcaccgcatccgaagcgccggcaatgatgggcgtctcgaagtatcaaacccgcactgagttgttgcaccagaagaagacgggtatcgctcaggaggtaacagcggcccagcaggctaccttcgaccgcggtcacgcaactgaggagcttgcccgccctatcgtcgagcgaatgatcggcggggatctcttcccggtcgtgggcaccgaagacaatctgctggcctccat

SEQ ID NO: 543787 - DNA, 389 bp, Homo sapiens
ccttcctacaagctgccaaatcagtcacaaaatattaaacaacaagacacctctctaccggtaaacttgagaggggtgtaaaacaaaagactcttgagagcgcacttaagctgtaaaaacactcattcctattcctaaattgagtgtaccaggttacatgtactaagtgccttacaataaaccaggcaatgtgctttatctggagaaagggagccctaacttcaaagttagagttcctccaacttatttaatagttaaatttcaagtacgttagactgaaaatcatatgggtttccacgtcaaagattagaacaaatcatcattaaagatcataacagcagttcaggtctttaaattctattttcctttgttcaccaatatttccgttt

SEQ ID NO: 543788 - DNA, 311 bp, Homo sapiens
gggaggttgtactaccaggtctactgctacactgttcacaattgccaagatttggaagcaatctaagtgtccatcagtaggtgaatgaataaggccgggtgcagtggcttgtgcctgtaaccccagcactttgggatgctgaggtgggcggatcacaaggtcaggagatagagaccatcctggctaacacggtgaaaccccgtctctactaaaaatacaaaataaaaaaaaattagccaggtgtgatggcaggcgcctgtggtcccagctgctcgggaggctgaggcaggagaacagcatgaacccaggag

SEQ ID NO: 543789 - DNA, 223 bp, Homo sapiens
aagtgaactctacttctgtatcaggcagctcagagtagaaagtaaggggcagagtcatacgtgtggccaggaagtagccaggatgaagagagactcggtgcgggcaggagagaatgcctgcggggtccctacacctgagctaggtgagataccggaattcctactgatggtacatgaagcacttctagggttctatcctgtctgctaacccatgggagggtcc

SEQ ID NO: 543790 - DNA, 203 bp, Homo sapiens
accggcccgttgggaaatgcatgtgaggcacttcctcaaagaactaaaagcagaactaccatttgacccagcaatcccattatttggcatatacccagaggaatataaattgttgcatcataaaggcacatgcatgcatatgttcactgcagtgctattcactaagagccacgcgaagagcccgccacgtgccccgccatgcg

SEQ ID NO: 543791 - DNA, 517 bp, Homo sapiens
  misc_feature (170)..(170): n is a, c, g, or t
agcacggttcggtcagggtatcttttccccgcccctaagcgattgggggatagaatagaaagaatggtttgcctcagtttgaaccttgcccctgatgcaaaggtggaagaagaggccgaagaagacccttaaggggccgccgaagccccccccgaaggcccagggccagncgaagattaaaaaatggatgtggggcccgatgaagaagaagaacccgcaaagggatttcccgctgaaaaagatggattgttaattatactctccccctttgggtcctgggtggagagggaatgtgaaatttacctcctttctttttgggggaggcttgttttggatgccccctaatccccttttccccgggcctgtaaaatgtggggttttggggcccaggaaaaagggggttttttagttgaatttttttttaccttcctcctgaagggaaatttgggctttttaactggctttttttgatggaaaattttgtcatggggtttaaaataaaaaaggttcccaatta

SEQ ID NO: 543792 - DNA, 139 bp, Homo sapiens
tggggcccccccttcccccttttttgtcccccaacttgaaatgtttgaaggcttttggtttccctgggggtgggtgggggcagccagggctttcctgttccctgactttagaccagttgaataaaagtgccccccttta

SEQ ID NO: 543793 - DNA, 478 bp, Homo sapiens
  misc_feature (107)..(107): n is a, c, g, or t
  misc_feature (128)..(128): n is a, c, g, or t
  misc_feature (133)..(133): n is a, c, g, or t
  misc_feature (185)..(185): n is a, c, g, or t
  misc_feature (195)..(196): n is a, c, g, or t
  misc_feature (206)..(206): n is a, c, g, or t
  misc_feature (216)..(216): n is a, c, g, or t
atagatatcaaaatggtgccgagagacgatgggaaaaattctagcagatactctgaacaatccagagaatcaaaaaaatcaggccgggctgcccccgggccaaaaanaaaaagggggggaaagggggnaaaanaaaaaaaagaaaggggttttttcctttctcccccccaaaaggggccccaaanaaaaaaaaanncccaaaaaanaaaaattatnattttttcttacaaaatgacataaactgggccatgccttatattcagttgaaacaaattattttttactttgacgaactttatagagaattcttgtataaagtattggtttgtatttgtaaatttaaaaaatgttttcattttaacatgttttataattgatacatctcaaggccctacccataaaattatttgaaaactttcaccagaaagggatgtaagtctcgcttatattttgtgaataaaatgatcaaaagctcaaa

SEQ ID NO: 543794 - DNA, 173 bp, Homo sapiens
gcccacagggtccctgggcggagggcaggagcatccagttggagttgacaaatatttctgtgagtgttgcagagagctgctggacacagtggataactatgccgtcctccagctggatatagtgtggtattacttccgcctggaacagctggaatgccttgatgatgcagaaa

SEQ ID NO: 543795 - DNA, 717 bp, Homo sapiens
cacttgcccctccttgggcctttccatccatcttttccaacctttcccatgattctggtaaactttcttgaatggtttcatgattattggctctcctgtctttctgtgtttctatttcaaactcccatcactcgctatggggctttcagaactagtgttccactttatcttccccacctccgttttctacgtggtctttttgttttggtgtgtgtagtgtgtgtcttcaagacaggatctcactctgaaatgagacggagtctcagcctggagtgcagtggtgcagtcatggctcactgcagcctcaaactcctgggctcaagtgatcctcctgcctcagcctcctgtgtagctcggactacaggtgtgtgccgccacactggctaatttttgtagagatggggtctcgccatgttgcccaggctgttcttgaactgacctcgagtgatcctcacgcctgtgattccagcacttttggggaggctgaggcgggcggatcacctgaggtcaaggagttcagggaccggccgtggccaacaatgggtgaaaacccctgtccactacttaaaaaataccaaaagatgtggctgggcatggcggtgggtgcctgtaagtcccagctactgggaggccggggtaaggaagatcacttgacccagggaggcaaagttgcgggaccggagtgggcattgcgccaccggggcaaaagacagatcg

SEQ ID NO: 543796 - DNA, 433 bp, Homo sapiens
  misc_feature (11)..(11): n is a, c, g, or t
  misc_feature (414)..(414): n is a, c, g, or t
cccagcccccngtggaacctgtgaagtaccattaaaacccctcccttcccttaataaaccttacccccagtcctcaggtatgtcctttatccagccagccatgagaaatggacctaatataagtaaattggtacctgatagagtgaagtgccttctgtaaagataccccacaaatgtggaagcaactttggaactgggcaatatttggagggctcagaagaagacaggaaaatgttggaaagtttggaacttcctagagacttgttgaatggctttgactgaaatgctgataatgatatggaaaatgaaatccaggctgaggtggtctcagatgaagatgaagaacttgttggtaactggagtaaaggtgactcttgctatattttagtaaagagactggcagcgtttactccnaccctagagatttgtggaa

SEQ ID NO: 543797 - DNA, 299 bp, Homo sapiens
cttgcacatttgcccctccccttacactaaaacctttaccgatgtcactctttgcgccacttaacttcaacatttggcctactcacgctcttctgcagttctcctgagatgacttgaatatgaaccaaagctgcactgtgctgtacttttcagcttcaactgggactactcttcccaggataaaagcagctccagtccctgacggtgttcgtgccaacaagcacagcggtaaccctccattctctaacccagttagtcaatatgttttatcgcctcttgatggaaaatattcagaaaaa

SEQ ID NO: 543798 - DNA, 500 bp, Homo sapiens
  misc_feature (212)..(212): n is a, c, g, or t
  misc_feature (267)..(267): n is a, c, g, or t
  misc_feature (317)..(317): n is a, c, g, or t
  misc_feature (327)..(327): n is a, c, g, or t
  misc_feature (335)..(335): n is a, c, g, or t
  misc_feature (337)..(337): n is a, c, g, or t
  misc_feature (349)..(349): n is a, c, g, or t
  misc_feature (455)..(455): n is a, c, g, or t
gacgctgacgatctcctccacgtccgacaagtcctcgttctcgtggtatcgctggcggtcaatcgggcgctgcgaggacccaaaccagagagcccgggacattattgtgggggctggaggtcgcctctcaacctgggcccagcactaacaggtgcagcagccgagcgccccctgcaccccaccattgcaacccaagcaactttgcgcaattnccaaagatgctgaaaagcaggacaaggagaggggcccgcaccccgagggtccagntgcgctctacgcggggtactcccctccggtgtcttcggaagcactgaagngacatctggngaccctcncntgccccccgccnccgaaatgtgctgggcttcgcccactcggccgggagcctggttatgtaacccgcgaagggggctccggacacgggctggcggggcaaatgtaggccccaggagganccgctgcggcgcccggctcggcggtaacagcagccccagcggccg

SEQ ID NO: 543799 - DNA, 773 bp, Homo sapiens
  misc_feature (8)..(8): n is a, c, g, or t
  misc_feature (114)..(114): n is a, c, g, or t
  misc_feature (477)..(477): n is a, c, g, or t
  misc_feature (676)..(676): n is a, c, g, or t
tagccggngactcgcacactagatctctcctcacatagttatgattcctattcttacccactgtcttgcatttcgcttaaatcgggcgccgcttgcccgccatgtattatcgtnatacactttctcattctctcgccacacccatctccttatatctctttactccggtcgaccttgctcgctgcagtgttcctcattttcgctccccatgctattctgcgcttctctgtgtcaatccttttcagcataatccctttttccagtttcgccccttctcaaacctttcccgatccctttcctctccatgacatttctctacacttctccacttctaccttctttctctaccctctttacgactcgttacccctaatatatacaaattcattcctccctacataacctaccttctctttttatctctctcctctctaacaactccatatgtattttttccctcattcatatccttctctngtcacatttatcctatcatcactctgctatattctctcatttcaatatattctgtttgcacaccacacaccacactttcctcttttgtcacatccaatatcctcttatacatcaatcatctctactttctcggaacaattacatcttcatttataacatcctctcacactttcttttacgtttttcatttctcatacanacactatatcctactctctcgcatcatcttctttctcttcatatacatcctttacactacatcttcttatacccatctcatcatctctctcctcccg

SEQ ID NO: 543800 - DNA, 890 bp, Homo sapiens
tggcacgagggcgagaggacctcccgttcttctctccttttttccgtcagagtccgtcctgagtgggaggacgtccctctctccgtctccactttcctcgagtttcctcctcagggggaggacttccagtcttctctccagagtcctgtgacgctgtctgctcttccgttccacttcttctgagtcgttccccgagagtttccctgagagtcctcagagtcctcctgacggggctggtcacgtctcctctccaggagacctgtctagctgcgcttcttctcctacagctttagcgaggtcttagtccaagagttcccatgagagtcctcagagtcctcctgaggggcctgcccagtgtcctctccagagtcctgtgatgctccttgccctcgctccacttcatcgagtctttcccagtaggttccgcctgtgaagactaccttccccttcctgccattttgatcgaaaatgctttccaaggagttgcccctgaggagcttcctacgtccgaagagtaccgtggtgatactccttttcttcgcttcctgcgcaagtttcattgtaggcccattgcagtgtacagtgccatggcaggccccagataagacttaaattagtacaaagttcctccagacaaccccttgacttaatgaagaagatagaattcccctttggatcaaggaacgacggcggaaagatacccttattgagttagaagaaagccgaatgtcccccttttgttttcggaccctaaataacaacctggggttcaaacaacagcgggcgggacccgaaatctccacggcaaggggtttctgttcgcccctctcgaaaaaatcccaggatcgaaagcaagcctatatattacagaaggcgccaaaatattcttc

SEQ ID NO: 543801 - DNA, 846 bp, Homo sapiens
  misc_feature (807)..(807): n is a, c, g, or t
tagtttgttatggggttgtgttaattatactcgatcttgttctgcatttttaacttatctttttgtatatgctattaaaggttctttagggtttttggctatgcaggtcttgttaaatgttatgttactcgtgttcttatgtttatatagaaaccaccccgttgtgtccggtttgccaatctgtgttgattctttagggacttgaatgaattgggaagagttgtagtctagacctagtttagcccgtctctgtggttccttgttacatgttcccatgtaggaggcttaaccatatttctggaagtgtctatgttacttccattaatgactttaattttagtgattatgatggtcttggattgtctgtcctcagttagctattattataacatcaatgttactatctgtatcaggccctacatagtacatacagttgagtgggagtatacattaatagatttacatgcgtgttaatggctgttcgtagagaaatcggatataaaagcctaaactaggactacttcatcacagtgttgtatgttggacacatagatggtgatggcaaaggtttagaacacattattttcaaagactaaatctaataaccctagagtaaacatcaatgctctagtagttagcataatttggagctattcagggattgcagagaatgcattttcacagataatcaagatgttatttttgtatactatatcacttagacaactgtgtttcatttgctgtaatcagtttgttaaaagtcacgatggtaagagttaacgcagggctagatcatattaatgcgangggttcattccataaggtcgggcgtctttcgtcgtgtcg

SEQ ID NO: 543802 - DNA, 394 bp, Homo sapiens
agccttcggtctacaaacacactgatatctacactgttagctctgaaacttcacattaaactgagctgatgtgtacatgacaaataggcataaaatacaaatacagtatctgcttacaggtaatatacggaacaataacaagggactgaaggtacaaaacacacacggacattatggtcataataaatatatagaagtacctaacgttaacaatattagtaagaagttgcacatttagctatattattaaagcatttccccacatatttaatcatctgtagatcctctgcagtaaagattgagcacccccccgaaacttataatttggatacaaagcctcgcactgacactcaaggctggagtgccagtggaatgatcttagctcactacaaac

SEQ ID NO: 543803 - DNA, 951 bp, Homo sapiens
tacacgtatcctgaacactggagggcttcacggctctcatcgctgctcagtacagcggggctcaggtccgcgtgctctccgcaccaccccacttccatttaggccaaaccaaccgcacccctgaatttctccgcgaaattctcctgtccggcaacggtcccagtgatttgagggtgatgatggatatctgtgtgtttgagagctaacgccgagttgccgtactatgtgagcaatgaggagctgctggggaagttactccagaggcagcagcccaggtggtgcgagtagggtgagctttgctgatgccggatatagtgcccccagcgccagtaccctgggtgttccccgaccgttgggcatcatgcaagcacaacgaaacaggccacttgaggaatgcaagaggaggaagtgaaggcgaattctggggctgctggatgcttacgttgaagtacgaggactttgctggtgggcgaacgagtgacattggctgacatcacaggttgtctgcacccctgttgtggcctcttataagcaggttctatgagccttcgtttccgcctaggcctttccgcaaataccaagccgcgtggttccgtcacctgcattaaccagccccagttccgggctgtctgggggaggtgaacctgtgtgcgaagatggcccagtctgatgctacaagtttgctgagacccaaccttaaatagggtctccccacggtgtgagcaggtcacgggaagagaagcggagagcccgggctgagcggctggcgtgtcaccatggggtggccctgcttctgtgggacgggcatgggttgatgtgagccgcgcggtggttgtgccaggcagggccttcgtcccttgccggcgtcctttggttgggggggttaggcgcgtctcctggggagcctcctggggggcgcttctggggcctgtagcgggggccccggacccg

SEQ ID NO: 543804 - DNA, 517 bp, Homo sapiens
  misc_feature (104)..(104): n is a, c, g, or t
gggacaaagtgctgaacagctggacagcgagaaagtggcccatctgtgctcggtcaaaggcatagggctcgtgacagccgccagcctaatgtcctacctccccnagttgggtgaggtgggcaggcacgagatcgccgcattagcaggtgtagccccctataacgacgacagcggcaagcataaaggtaagcgtcacatcagcggtggacggtttgctgtgaggcgctcgttgtacatggccagctggatcgtaattcggtatcagccagaatttaatgcccgatacaagggttacgcgacaaaggcaaatgcccaaagtggcactcatcgcctgcatgcgagtcttgctgatccgcttgaacgcgatgatccgtgacggttctgaatggaaagaacacgtcgcctaatgtggctgcggttgtttccttaagaaattgcatggcctagagctgtgggagcttgaccgtcccttgaaatgattttcaaaaaaacggtcaagacagttgctcgtcgacgc

SEQ ID NO: 543805 - DNA, 202 bp, Homo sapiens
caggctgaggcatgacttctctcatctctcatttctggtccggctgctatgatgggtgcatttatctcctgctatgaactttcatcgtcttcctcatgggagccgggttcctcttacttctcctttacctcctcagaatcatccttcctcaaatggctcctatccttgaccatgtgtgtcctcggtgcgtgtatgggctgat

SEQ ID NO: 543806 - DNA, 319 bp, Homo sapiens
ccaagctagtcccctgtacgactttgacttcagagagaagcaaggttttacacaacaaagatgatctgcttattatcaggatcattcagatgctgggttgagcaccgacacaggggacaacagcagaaacgcgggtcagttagcaggctgcaataatatatgttgtgcaaaagtacttgcagtttagccattacttctaatgtaatgcaaactacttttgcacaaacccataatgagatgagaagtgatacaagctgggaaccagagtggtagttctggaggtagtgcaaacagtgatcatagccaagcatgatggcac

SEQ ID NO: 543807 - DNA, 484 bp, Homo sapiens
  misc_feature (58)..(58): n is a, c, g, or t
  misc_feature (69)..(69): n is a, c, g, or t
  misc_feature (73)..(73): n is a, c, g, or t
  misc_feature (82)..(82): n is a, c, g, or t
  misc_feature (89)..(89): n is a, c, g, or t
  misc_feature (107)..(107): n is a, c, g, or t
  misc_feature (119)..(119): n is a, c, g, or t
  misc_feature (125)..(125): n is a, c, g, or t
  misc_feature (131)..(131): n is a, c, g, or t
  misc_feature (140)..(140): n is a, c, g, or t
  misc_feature (146)..(146): n is a, c, g, or t
  misc_feature (153)..(153): n is a, c, g, or t
  misc_feature (155)..(155): n is a, c, g, or t
  misc_feature (161)..(161): n is a, c, g, or t
  misc_feature (163)..(163): n is a, c, g, or t
  misc_feature (166)..(166): n is a, c, g, or t
  misc_feature (168)..(168): n is a, c, g, or t
  misc_feature (172)..(172): n is a, c, g, or t
  misc_feature (176)..(176): n is a, c, g, or t
  misc_feature (383)..(383): n is a, c, g, or t
  misc_feature (398)..(398): n is a, c, g, or t
  misc_feature (420)..(420): n is a, c, g, or t
  misc_feature (425)..(425): n is a, c, g, or t
  misc_feature (435)..(435): n is a, c, g, or t
aggttgaagtggtgagacgacgccacagaggttagacgtacagtcccagtcttggagntcgcctggctncctnagaaatttnaaggccngcttggagaacaccttanggaggtggaggncccctncccctncaaatggancagctnaacgggntncttttncnccntnagtnaaanctggcccaacccgggcaaaggggcagcgccaggccccggagtattaggcccttcttaacatcaaggtcaaactggagggtgagattcccccccccccccccctgttggaaaatggggagggcttttattttggtgatgccttgggcagcagcaactccatgcaaaccatccaaaagaccccccccccccggatagtggatggcaaantggggttttagaccnatgaccccaaagtttttaggcnttaanccaccaaaancaggggaccctttggggagcaggaggcccataaaaagttcagagttcca

SEQ ID NO: 543808 - DNA, 214 bp, Homo sapiens
caccgctcctgccacaggttaaaaggggcaaggtacacctcaggccatggcttcagagggtgcaagttccaagcctttcaggttctaggtggtgttaagcctgcagatgcaccgaagaattaacgttcatgaacctccgcctagatttcagaagatgtatgaaaatgcctggaaatccaggccaaagttggctgtgcacgggagcggtggagca

SEQ ID NO: 543809 - DNA, 849 bp, Homo sapiens
  misc_feature (397)..(397): n is a, c, g, or t
tggactataaaccatttttttggtaatacagtttagggggggaaaataaaacgggggccaaccccatataaaaaattaaaaaaaccatgtttaaaaatatattggcagggacgtatttttttttctcaaagtcccccctcttttattgttcctctctcgagtgtgtgtggtccctttaagcatctcaacgtggtgggggtgggagtgatgactagcaaagatcttatgggcataacaatttatttgtggggcgtgctcagcattagaggaaaactccaaccatttatatctgggggtagatccaaaagctctatgtgaatctccctcctctagtcccgcccggctctctatattgctcttaaagtcacttgtgccgaaaggcagaatgggggctttncaacagcctataaagattaaaaaccgagctttcctctcgcccgaccactaaatgtttgcgtggtcaccaaactccccctccttttaaatagggtagaacacggacaaaggttgagggagttgagaaacacttatcacttgggacgagaattctgggagagactacacgtggcaactaaagggggccccaaaaccccggaaaatgggcgataagcgaaccttgcaaaatgtcgaaaaagacgcgggcaaaccccccagttccataacagttattacaaaagtctactacagcagatcctcggcgaggacaaaaagcatcgggtacagggacagatggaccaaaggcctgaaaagacacagcgaaaaccaaatcaccccacaacgagagcagttgacccaggggcccccatgaaggcgcccagaaaccacagcgcacagaagcacaaaaaagga

SEQ ID NO: 543810 - DNA, 643 bp, Homo sapiens
  misc_feature (344)..(344): n is a, c, g, or t
ttcatcttcacaccttctctgcgcacccatggtgtgtggctggagccctggagtctgtgcggatcctaaagagcgctgagggacgggtgcttccccgccagccccagcgcaacgtcaaactcatgagacaaatgttaatggatgccggcctccctgttgtcccctgccccagccacatcatccctgtgggggttgcagatgctgctaaaaacccagaagtttgtgatgaactaatgagcagacataccatttccgggcaagcaatcaattacccttgggtgccccggggaaaaaagttccttgggattgcccccccccctcccccccccccccagatgatgaantacttccttgagaatttgctagtcccatggaagcaagtggggctggaactaaaccccccttcctcaggtgagtgcaacttttgcagggggcccctgcctttttaagtgatgagtgaaaaaaaaaagtcctttttttcgggcttgagcaagttgggttttgctcaggcctgggcatgcccccaattttttcccttaacccccggcccttttcatatccaaatggttttcaaagttgtctttatatgtgaattaagttattttaaattttaatttatagtaaaaacatagtcctggaaata

SEQ ID NO: 543811 - DNA, 296 bp, Homo sapiens
  misc_feature (232)..(232): n is a, c, g, or t
agaggggcctgcaatttcgtgggtccttgtgaagaaaacgtctcaagcctcctcttcctgctggcccaatgccccccggccgccacccgccgtcccacggaaacttggagacctcagtgcccgccctggggtgggggagccaggttggatttccctcctgggcacctctcacctgcctggacaccttggacctcatccgttcctctcccagggcctctggagggaggaaggntcccacaggagcaggtgcaatggaaggcagcctggtcagctctggtccatgggctacacagggc

SEQ ID NO: 543812 - DNA, 152 bp, Homo sapiens
ctaggaattgctaagaatggttagaattgctggcattgctaggaatggttagaatgctaggaattgctaggaatgctaagaattgttaggaatggctaggaattgttaggaatggttaggaatggctaagaattgttaggaattgctaggga

SEQ ID NO: 543813 - DNA, 262 bp, Homo sapiens
tccatctcgtcccagccccgagttgacccacgttgttgctcctcaccccatggtgatgcaggtctcgtagtgtgggcacaggtgtggatacatcatctttgtagtgcctctgtcctcttccacaggatgggctcccacaggtgcagcagctggccccgtacttgagcatgtgtggttatcctctagagcttttcccaagaagggtgtttgaattgagagtcttaataaaatcttaccaaataaactttgagaatgatcgtca

SEQ ID NO: 543814 - DNA, 113 bp, Homo sapiens
gctttatataaggttactccagacatgtacacaaacacagcactcttgaaatcacaagtcaaccacagagagtcctcactcttacacgagtactgcagtgatgcgacccatgg

SEQ ID NO: 543815 - DNA, 168 bp, Homo sapiens
tcagtgctgaagctattatgacttggcagggcttatgtcctgacaacctccatatgataagggagccttcaaatcgaaatcactttccagcagagtacccattcaaaccaccgaagatcacatgtaaaacaaagatctatcacccaaactcgcgggtactgagctcga

SEQ ID NO: 543816 - DNA, 719 bp, Homo sapiens
tgtgggggacatttgattcaggccaaaaggggctggcagttcgggaccccccgaaccacatttggagtggtgggtattcccataagggccctttgtaaacccaaaaaacctttatggcttttggggaaaatatgggggattaaaaaaaacccccctataagggatagattctcaaaaattcccacaccggggctgttttgaccttgtgggaaacaaaaatatttttggggaaaatttttgtgagactagttccgcgggtgtctctaggaccaaaaaaagggggttttttatttccagaattaatatccccggattttgagaaaaattttccacgcgaggggaggatcctctagggtttatattttagcggtgttttttttttgtgtaggagagaaatctttctccgcattcacgttcttgtggaaaaagaacccgaagaaaaagtctttgataagggcctccttgttttttgtaaaaaggggcaacacgcgggggggggggaagcgcttaacaggaaccccgggggggaaatgtaacagtgtggccgaaggggtttttaaaagggagggggggggccccccctcttttggggtattgattaaaggagctgggtgctattgttttttccaaaggagctttgttgtttaagaacccgactccacaaaaaaaaaatgggggctttcttttataataagggggaccatatttagaagttcttg

SEQ ID NO: 543817 - DNA, 322 bp, Homo sapiens
ccagctcccagcccccctggctaaaattttttttttgttgagacggattctctatgttgcccaggctggtctcaggctcctgggctcaaatggtcctcccccctccaccttccaaaggcacaggccaagttgtagctttgtcccttcccctcatgcccaacaaaaggttttatcccttttaatgaattgcctttcataaattggttatgttggtgggcaagttctttaagctggaaattgtaaattccccctgaaatgttttttcatcccgttcccctgaactaatactccaataaaggatggttttgggggtccattttta

SEQ ID NO: 543818 - DNA, 682 bp, Homo sapiens
  misc_feature (43)..(43): n is a, c, g, or t
  misc_feature (216)..(216): n is a, c, g, or t
  misc_feature (234)..(234): n is a, c, g, or t
  misc_feature (279)..(279): n is a, c, g, or t
  misc_feature (600)..(600): n is a, c, g, or t
  misc_feature (618)..(618): n is a, c, g, or t
  misc_feature (630)..(630): n is a, c, g, or t
agtggccattttgaaactggggcccctaaatggttgaaaccancccagcccatgggaaagggttttggggaaacaggataatgcaaaggcccctgtggtggaaacaacccagctgtggttgaggaacaacagcaaggcagccagtgtggctggaagtggaagtgagcagggtgggcccaggggtgagggagaacaggcccagagagagggattagnaccaggtcttgtagggcnttttatggcatagaaggagctctgaagcaatgaagtgccttgccntgtgtcacataccagccgagacagtctgcctaactcgggagcccaagctcgctgctgggcttgaggcccctataagaggacaatgtaacccaggctggtatgggcacattctgcatttccacttaaactcagatggcaagcccatcaaaccttggtgccatggctgccctggtaattcctggctgaccagtgcaaccagggagctggcccatgacctgggtggcagctgagtagccaggactcatgcggccaagagtcagccttcttcctgtgactcatccaggtgcaccctgcgacatctgaaggtcaggctttcagccnctgtggcttccacttccnactggctccacntccccccggaaggatcacatagaactttgcccacacaatctattgcgtgtta

SEQ ID NO: 543819 - DNA, 934 bp, Homo sapiens
gcaggctggcctcaaactcctgggctcaaggcaatcctcagcttcccaagccggacacggtggttcacacctgtaatcccagaattttgggaggccgaggcgtgcaaatcacaaggtcaggagttcgaaaccagcctggacaacatgtctgccgaatgcctgcgattgcaggcacgcgccgccacgcctgactggttttggtggagacggggtttcgctgtgttggccgggccggtctccagtcccctaaccgctggagtgatctgccaacctcggcctcccgaggtgccgggattgcagacggagtctcgttcactcagtgctcaatggtgcccaggctggagtgcagtggcgtgatctcggctcactacaacctacacctcccagctgcctgccttggcctcccaaagtgccgagattgcagcctctgcccggcgccaccccgtctgggaagtgaggagcgtctctgcctggccgtccatcgtctgggatgtgaggagcccctctgctggctgccagtctggaaagtgaggagcgtctccgcccggcgcatcccatctaggaagtgaggagcgccccgccggcagcgcccgccgggaggtgaggggcgctcggccggcgccctactgggaagtgaggagccctcagccggcacaccatctggaagtgaggagcggtctcgacccggcagtccgcccggtccggagcgaaatgggggggggcagccaaggcggcagccgcacccacgtgagaagcgtgagcaacaccacgcggacacagacaaaaacataggagacacaccacaccaaaaacccgaccaccaacacgaaacagcaccacctacaataaacgccccactcacgcaccgacatacacacacgcctaccgcgcacagacacagaagcacctcacccccccacaccgccgacaccaa

SEQ ID NO: 543820 - DNA, 491 bp, Homo sapiens
tagcaaggtaagtgaaaaataaaaagattggcacaagcattctaaaggctatacactaaacctacctatagtggtgtaccacataatatttgggtcagcgagggaccactattcaaggatagtcccataagattataaggaacggccctataacaggtatacttttttttgcacggtaccttttctagttaagatacacaaatacttatcatggtgtcacagtagtcagggtagtcaggcggggcgggttggtagccaaaaagcaagcaacaggctatataccatatagcctaggtatatagcaggccatacaccatatagcccaggtatatagcaggctatacaccatatagcctaggtatatagcaggctatacaccatatagccaaggtatatagcaggctatacaccatatagcccaggcacatagcaggctacaccacaagtccctaagccccggggcatggaccattaccagtccattaccagtc

SEQ ID NO: 543821 - DNA, 212 bp, Homo sapiens
cccatcccagctacgcagtcacataccagtgtatatgccatctcttcccagggtggactgaaggcctggggtgggatgtggcacggtcctcactgggatctcatcaacatgagcgatccaggcccgggccttagcaagagcctccttgagagcctggatgttgggcaggtgagcagggatgttgaccgcctcacggattatggcctcaagtg

SEQ ID NO: 543822 - DNA, 1129 bp, Homo sapiens
gggaaactcaagagaagtgagcctgggacttagagctacttttcccataagggcacctgctgattctggaagaggcagctaagaagctgagtagaactttcaacaacttcttgtgttagggagccagcttcatgaatgctggcagaaaacacaggattacttgggcagagactactgctcagggcacagcaggcagtgtgttagccttggtctcccttgccctccaagtcccacagggcaatactggcaggcccaggaaagtgttacacactgcaggtttgcatgacggctaaggaaccacaatcttagggagatactatctctgtcttctaaggccatttgctgtacaaaaatccttgaaatacctgggcacagtggcacacctataatcctagcactttgggaggctgaggcaggcggatcacctgaggttgggagttccagaccagcctgaccaacatggagaaatcccgtctctactaaaaatacaaaaattagccaagcgtggtggcgcgagcctgtaatccagctactcgggaggctgaggcaggagaatcgcttgaacccaggaggcggaggttgtggtgagccaagatcacgcgttgcactccagcctgggcaacaagagtgaaactccatctcaagaaatgaaaatcttggacatagtctggaacaacaatctgtcaaccattctcagaccacaaagtatcaccaaattggcattcggtgcatttcaccaactttcaccgtggggtcaaacgcgttacaaattctgaccactttagtacacccaaaagaaaatccgaaatgatcttccccattcagattgtttctatacacctgggcccccccaaattttgtcaaggggcgcaacacctcgtcataaaaccccgtgtgggtctgaacctggtgacaaccatgaggtgaacccacgaatctcccgactatgagacacaggagcaacaaggtagcggacaacaaatcaccaccgatgaactcaccgaagagacacacgagaagtataccacacacacactacacaaacaacaagacgacggaccataccgacccaacatcgcacgcgccgacggcattcgtcacgaagcgacaccaacgagagccgatcacc

SEQ ID NO: 543823 - DNA, 189 bp, Homo sapiens
acgacacggcgatccatatgaaattccctcttggtatctgcactagaacatctctacttttcttaagcctcaaactttgctcatctctttgacccttcagtctctacagagtgatctgttctcctcactttccaaacattgttcaagtgtcatcttgatgaagtggccgtctaatttatttttcacgta

SEQ ID NO: 543824 - DNA, 196 bp, Homo sapiens
tgcgacgcacggagatgcgacgtcagagcgctgcgcgaaagtgcccccgcttgtcactgggatcaccttcctgtctggaggcagagtgaggaggaggcgtcatcaacctcaatgccattaataagtgcccccatgctgaagccctgggccctgacccttctcctacggccgcagccctgcatggccctctgccctt

SEQ ID NO: 543825 - DNA, 224 bp, Homo sapiens
cgtgcaccgctcgtcatttgttcacagccatcagcactagcatgggggcggcacacctgtcagtaggtggcagcagagctggcaggacaggacggctgggcctggtctggtcaggtgtagcatgtcccagcagaacagcagcaacagtatagccgtcccagcaggctgtgaggcaggtggatagacctaagactcatctcttctatggtcttctaccacataca

SEQ ID NO: 543826 - DNA, 523 bp, Homo sapiens
  misc_feature (92)..(92): n is a, c, g, or t
  misc_feature (134)..(134): n is a, c, g, or t
  misc_feature (138)..(138): n is a, c, g, or t
  misc_feature (149)..(149): n is a, c, g, or t
  misc_feature (152)..(152): n is a, c, g, or t
  misc_feature (160)..(160): n is a, c, g, or t
  misc_feature (162)..(162): n is a, c, g, or t
  misc_feature (166)..(166): n is a, c, g, or t
  misc_feature (169)..(169): n is a, c, g, or t
  misc_feature (171)..(171): n is a, c, g, or t
  misc_feature (178)..(179): n is a, c, g, or t
  misc_feature (184)..(184): n is a, c, g, or t
  misc_feature (189)..(189): n is a, c, g, or t
  misc_feature (192)..(193): n is a, c, g, or t
  misc_feature (195)..(195): n is a, c, g, or t
  misc_feature (200)..(200): n is a, c, g, or t
  misc_feature (204)..(204): n is a, c, g, or t
  misc_feature (208)..(208): n is a, c, g, or t
  misc_feature (217)..(217): n is a, c, g, or t
  misc_feature (246)..(246): n is a, c, g, or t
  misc_feature (257)..(257): n is a, c, g, or t
  misc_feature (259)..(259): n is a, c, g, or t
  misc_feature (261)..(262): n is a, c, g, or t
  misc_feature (275)..(275): n is a, c, g, or t
  misc_feature (281)..(282): n is a, c, g, or t
  misc_feature (289)..(289): n is a, c, g, or t
  misc_feature (292)..(292): n is a, c, g, or t
  misc_feature (314)..(314): n is a, c, g, or t
  misc_feature (322)..(322): n is a, c, g, or t
  misc_feature (329)..(330): n is a, c, g, or t
  misc_feature (333)..(333): n is a, c, g, or t
  misc_feature (335)..(335): n is a, c, g, or t
  misc_feature (338)..(339): n is a, c, g, or t
  misc_feature (344)..(344): n is a, c, g, or t
  misc_feature (349)..(349): n is a, c, g, or t
  misc_feature (352)..(352): n is a, c, g, or t
  misc_feature (355)..(355): n is a, c, g, or t
  misc_feature (359)..(360): n is a, c, g, or t
  misc_feature (363)..(363): n is a, c, g, or t
  misc_feature (366)..(366): n is a, c, g, or t
  misc_feature (376)..(376): n is a, c, g, or t
  misc_feature (405)..(405): n is a, c, g, or t
  misc_feature (422)..(422): n is a, c, g, or t
  misc_feature (427)..(427): n is a, c, g, or t
  misc_feature (436)..(436): n is a, c, g, or t
  misc_feature (461)..(461): n is a, c, g, or t
  misc_feature (471)..(471): n is a, c, g, or t
tcaacgaccctcaaagtgacagtcattgtcagataacaagcacaatctgctacagtctgtgacctggtaaagagaccaccttttcattttgngtcccatcaccaactatgccaatgtccaacctaccacacagntcanaatgactcagnggnacattttngngtcngancngcaaagnnatatngggcnggnngngcaangggnaagngtccttggngtattagacagggtaaatacaaacaaggnataaagggggnangnnaacttcttctgtngcctgnntccctangtntcttccatcttttctcatgatngggggcgnggggggnnggngnggnnagggnggggnctnggncgtnnggnggngggggggggntgtttgccttggaagactaaagaaagggngaatattcacatgaggnaagancttgaagtnggggttataatacataggccaagtntgcctgctgncaacccatctctgtaactccaactttgggcctgcatgaattctgcgacatgg

SEQ ID NO: 543827 - DNA, 483 bp, Homo sapiens
agaagcaacagagttactgttacatcgcgccagcagaatacacaaattcctcatcggcaggggggcgggcaacaatcgcaaggtgcgcgacagcactggagcacgttcatccttcctgcggctgaggcaaggaccaggtactgatcaccatcattggaaaggaggacgccgtccgagaggcaccagaagagctggaggccttgatccaaaacctggtagggagcgggcctcggcggccgactctgctggggccgtgatggggtggcttatcttccatctcttcttaacactgcaggataatgtggtggaagactccatgctggtggaccccaagcaccaacggcacttcgtcatacgcagaggccaggtcttgcgggagattgctgaagagtatggcggggtgatggtcagcttcccacgctctggcacacagagcgacaaagtcaccctcaagggcgccaaggactgtgtggaggcagccaa

SEQ ID NO: 543828 - DNA, 128 bp, Homo sapiens
gcacggtgtgagtgccgccctggaggtgcgagtgcctcagtgaccaggctggctcctgggatggcaggtacaaccggatgccagcccgtgccagagcctgaggaagtgggaaccctccctactgtgga

SEQ ID NO: 543829 - DNA, 767 bp, Homo sapiens
taagggcacatcccgcgagctgcctgccagcgcgcagacagagcccagggagcaagagaacgggcggtgcgggtggtgtgctcacggcctagggatggcgcggagcgcatctggcagaggctgtgtgtccggtgctgggccagcttggggtcacgacgcggagggagcgggttgccggggcctgaagctggggcgttgggcgcggagcgcgcttggggggcaccgaaccacctcacctggcatgcctgggtgcttgaggggccgcggtggtgtgggtgctgcggagcagttctaatggggagccatctggtgtgggcatgcgtgcgcactggggtcctcgccaatgaccccgtggggctgcccaggacaatccctagactgcatggcggtgggcctggaatcatgtgcgtgtcgcttggttggcccagtgcgacggaaacgggcatgagagaaggcttatatcccctgcaggaaactcctttcggtggagggcgcgaccccaatttgacctggtgtcgcgccgctgtgaaccatggagataacccgttggccttacacaactggaagcgggtgctgattgttttgtgatgcaaacgcctgcatatattcggtgttcgtggtcttttgcttcgcaacggttgggtgcgacagcacgcgaaatcgcccgcattgatgattcacctcaaaaccggaaactagcagaggactggcaaggtcttttcacgaggcgcaacggcaaaccggagcagagcccgggcccaatcggg

SEQ ID NO: 543830 - DNA, 622 bp, Homo sapiens
  misc_feature (1)..(1): n is a, c, g, or t
  misc_feature (4)..(4): n is a, c, g, or t
  misc_feature (10)..(10): n is a, c, g, or t
  misc_feature (86)..(86): n is a, c, g, or t
  misc_feature (294)..(294): n is a, c, g, or t
  misc_feature (411)..(412): n is a, c, g, or t
  misc_feature (461)..(461): n is a, c, g, or t
  misc_feature (474)..(474): n is a, c, g, or t
  misc_feature (491)..(491): n is a, c, g, or t
  misc_feature (546)..(546): n is a, c, g, or t
  misc_feature (560)..(560): n is a, c, g, or t
  misc_feature (609)..(609): n is a, c, g, or t
  misc_feature (613)..(613): n is a, c, g, or t
nagngtttgnctgtgtccctacccaaatctcatctcaaattgtaatccccacatgtcaggggagggacgggtgggaggtgattggnccatgggggtggtttcccccatgctattcttgtgatagtgagtgagttctcactagatctgatggtttggtaagcagctgtttcccctactctctgctcttttcctgctgccttgtgaagaaggtacttgcttctccttcaccttacgccatgattgagtttcctgaggcttccccaatcaatcaggcagaactgtgagttaattaanccttttctcctttataaattacccagtctctggtggtatctttatagcagtgtgaaaatggaatacaggagattataggcatgaaccaccacgtctagccaaaattattattatttnnggagacagggtcttgctctgtcacacaggctagagtgcagtggtgtgtncacaactcactgnagcctcgacctcctggnctcaagtgatcctcccacctcagtcctcctgagtatctgggactacaggcatgtnccatcatgcctggntaattaagaaaaaaaaattttttttggggagagatgaggtctcactatnttgnggaggtttg

SEQ ID NO: 543831 - DNA, 475 bp, Homo sapiens
ccccggccacccccgtagaagctgtcagatctagggctggactctaaggagctggactctcacctgtccctggtttcatggggaacaggaaacaggctgggctggctggttccctcccttcagggcagcctccagctcaccacagcagatggaagggctggacagagctcagcatcgatgtcagggaggcctgcactcagcaggactttcaaaagccacctgatcctttgggctctctggagggttctgggtacctaaccctcctctctgatccacccaccctgggcatcccagaaactcaagagcctgctgtattcacttgcccgctgccctgcttggcacctaccctggtcttcctcctcatgtatccagccatttcatttcggactgtatggcctggggtggggggtggggctcccacggtgacttgtttacagctgggtgtgactcagtaaagtgaaattttttttccttt

SEQ ID NO: 543832 - DNA, 451 bp, Homo sapiens
ctgaaacaggaatgcgttgagactgagttaattaataaagaaaaggggttggctgggcacggtagctcacacctgtaatcccagcactttaggaggcagagacgggtggatcacttgaggccaggagtctgagaccagcctagccaacaggtgaaatcccgtctctgctaaaaatacaaaaatgacccgggcatggtggcgtgcacctgtaaacccagctactcgggaggctgaggcacgagaattactcggacccaggagatggaggttgcagtgagcagagatttcaccattgcactccaacctgggcagcaaagcgagattccatctcaaaacaaaacaaaacaaaacaaaaaaacaattaaggtagggtaagtggcacagagtggtggggtgttcagattgtagatgaggtggccaggcaaggtcctttggataagatcaccatatc

SEQ ID NO: 543833 - DNA, 1012 bp, Homo sapiens
  misc_feature (765)..(765): n is a, c, g, or t
ttccaccagtgtccgggttttatcggtgggttccttttatgcgagcatgttcggtctacccgctcgcggttgttccccgtcacaaagggtatctctctccgcggactttagggtctcaaccgggcgccggcatgttgcggcgccttgtaccattcccccgcacctaattgtttggcccgtcagagcaccttggccggcctttattttcgcgcgaggccccccccgctcggttgcgcccggagttttcttccaacgcgctttgttctctgcgggatagtccgacaggggcgtcaattccttttgcttcggcagcagttgtgtcgcttgccccgctgcgctcaatttagtgctggccatcagaactggggtgccttttataaatcggcgattaggaccagcgtgcatccgagttctatagtggcaagagtagcccgtcccccccttcggggtcgttggcggaagaagaccacgcattgtcgtggtcaataaccctgtttatctgcgcagaattctgacaggctctttcttaacgagcacagtggtctcacagagaaaagcgcgcgctatcttctttgagagagcatctatcctaggaataacagttcgccagtgctgccacaaatagcgggccccccgcggcgctctctatgtatggagtcgtcgttaatctcgcccgccgccctccgcctgtgtgcgtttgctgcgcaccgtggggacccgccacgcagaagtcttgtcgcctgtatacgatcaacaatttgcgcnccgtaggtctcggcacgtggcaaaaaaattcgttagttacttatggagagactcgtgtctccccccttctatgctgtttataatactcccatgcggactttctgctcgttattaacaataactgtacgtacgaagagcttgggtacgtatacgaaaagaaagagggtgtcgggcaagactctggtagaacaccagaagatcggtccactgggaaaaaaaaatcccccaagttttttcaaacataaca

SEQ ID NO: 543834 - DNA, 343 bp, Homo sapiens
taacgataacagataaagtaattgtgttaaatcaaatttattatacttataatatagacccactcttcaggttacagtctctagcttcgccatgtacatggaccttccgtgtccatggatagggcggtgaggtaacataaaagatccatttacacaatacagtagatgatcatgctacatgaggtaaggtcctcataatcacacacttccaacacacggtagatcagaaacccactatgatactcgctacctgtctgtaagctaaggcactaataaacatggctagaaagtttaatttgcaaaccttatgcctccatttggaatagtagacaccagttcagag

SEQ ID NO: 543835 - DNA, 149 bp, Homo sapiens
agtcacacatgctcattgtagaatattttacagctggtgcggtggtctaagactatctttatctccctaggtatggtgaacatgtgcacacaagatgaccgtcctaaattccttcattctgcattcaagcctccttccatgagcgtggt

SEQ ID NO: 543836 - DNA, 139 bp, Homo sapiens
aggacccagaagattaaactcatgcattcagtctgtggctgtgcaatgttctaattcaaggcagcatttgtcagggcagcattagtatagagaggtagagttttttttgtgatagtggttcactggctcaccaatatag

SEQ ID NO: 543837 - DNA, 326 bp, Homo sapiens
tccgctcctagtcatagatacatagtgaaatgaaaacatgtctatgcaagactgtctatgctacgtttcattgcagcgttattcataataacccctgacaggaagtagcccatatagcccctagctgtggaaatgggtgagcaaatttgtggtatagtcctatgtatgaattatgactcagcaatcacacacaggaatgaaatattatatcacacaatgacaagaagtcaattcaaagacatgctagagaaaagaagtcaaacacaaaagatcatatatggtatggttctttttcatgaaattctagaaaatgcgaaatagaatct

SEQ ID NO: 543838 - DNA, 180 bp, Homo sapiens
tctagaggatctcctgctgctccctcttcatagttcttgtgtctttgccttattcatcatttttaaggctaatctaattaactgtgtatggaactgctataaatacatcaacaaaccggaaacgtggcggagattgctgtgtaccctggcctttggaagccaccttcctccagtacgttt

SEQ ID NO: 543839 - DNA, 1892 bp, Homo sapiens
  misc_feature (346)..(346): n is a, c, g, or t
aggccggtgagggaaacaccgtgttgtattagcacatggtcaaccccgagctgtgtgtcttacgaccacttgctcggtcgagcgcgtggagcccttggggtccgcggtactctcgtttgatgctgtaatgcacgcacatagtgtactcgcaagagcacagacgaggaacatatttatcgatgctcctgatgcagctgtgagcagtaccaggattttgagcttgatacaggcggttgtcctgacgttgacaccaggacacttgagttcccaagggggttgtccactgtgtgtcaggcggtagagatgacctttgcgacggcgtgcccagtacattaagtgcatcttngtgttagagcaaaagctcgcgagtcctagtcgtgtgcgagtgaatcggttcttgagagtgagttcgatcgagacctctctaagtcctttaactatggctactaaccgcgggatcccttggactaccttctgtggatctcaggtcgcgtcaggcatgccatcgtgaggccctcaaacaaccaatactcgtgattccccaattgtatgtatatcaaatctttggcgttcctgaccaaagggattctggacgttagtggtatcggaacttgcggcgaaaaggcgaggtggaatgtgactgtatcctgtagaggcaacgaacgttgtgaaccacgggagacgcgtcgatttggacaacgtacgatttgcgctgtcactgtggcccaacgttagaaggaacaggcggtactgagcccagaggtcccgagtgagattacctgtcgcggaattgaacacaatttgcgacggagagacggacctcagcccgaatgtaagacattgtccccatggaatgaggatccaccaattggtgggacggggtacacagctttcaaggagggtcctcgcctgggatagtggtacaattcccttataggcgggcgaaacacaccaagatactgtagaattggtaccccctaattcaggtagttagaacgggcctaccaagtgagtcaaggatacggcggagaacattctggtccccaaagagtcccctagagagaaaaagggtcggagcagacgcaaaggcacaaataaacagttaacgtaggaggcattgacagcgggtatgcggatccatccaggcgataggcagtggcatacacaagtgagtgccgacaggtgatttccccaaagatagagttatcaggacccgatgtcgcgtgggcgcccttgatcaaacaagtttaggctttgtgagagcaataaggaacagttttagcagaaccaactggatgcaccacagcctaggcagtagtcgacatctggatatccacacaaaatatgagaaacaccctatcagaaattaagtcatgttatctaccccaatatgaaaggaccacagacggatgggtagagcaccaccgaccggcagacacataggaagaaagacccgagagaacagacgaggactaaaaccaagaagaggaaacgtcaccgacaagggtgagcgaaaaggagcgcatgaaacaccgtgcttagtgccgaggacaccaaaaatagaaggagagcagcaacaacgctgaatagacaccacacgcagggtccgccagataaagacgagaacagtcgaaaaataagaggaagaagacaggcgaaccaaccgcctatgttaccaaacaagaaccacaccaaacaggagggaagaatgaagacacaagacagataaaacaagacatcaccgacagagacgataagacaacccacatacgaataaaacgcgaaaagaaggggaagaacgaatgaaaggagaaacagtaacgagcaacacgtatgacagctcactgacgtacaacgcaagcagcataacgcagactgagagaaacaagaac

SEQ ID NO: 543840 - DNA, 260 bp, Homo sapiens
cgctttaaacagagagatgccatagaaagcctgaagtttatggcatataatataatgagtggttagcttggggttttggtggaggacccacagttcatatccaaatcagcttaacagggccgggagctgacaggttataagcacgggtgaaggcacgggagtggcaaacacaggaatgagtaacaaccttgcatcctctatggcacatgacgccttcccatgtgctttcatgtgacttaatccatcccatccccgaaatg

SEQ ID NO: 543841 - DNA, 504 bp, Homo sapiens
cgcggtggctcacgcctgtaattccagcactttgggaggcctaggtgggcggatcagctgaggtcgagagttcgaggccagtctgaccaacatggtgaaaccccatctctactaaaaatacagaaaattagctgggtctggtggtggatgcctgtaatcccagctactcgggaggctgaggcaggagaattggcttgaaaaaccccccaaaggcggaaaggggttgggggaacccgggggttgcaaggtgaggcttaattaactccagccgtgggcaacaagagcgaaactctgtccttaaacacataaataacatacaacactacaataatacacaaacaagaacaaccgtggtgtgcgggcgccgccctgggggccccccttggggaaaaagacgctctctctctgtgagaacaccccacttgcgccggattgtggggggccccggcgccgccggcgggggcccccccccgggttagcggtatcgggtgcaccagtgggccc

SEQ ID NO: 543842 - DNA, 140 bp, Homo sapiens
gtctggtctccccgtgggagagctgagaaaggcaagttcaggggctccccgcaccaaaccatggaatcggctgtctatggtgaggcccaactctgtgattaacaagctctctagatgattcttacgcacacgcaagttag

SEQ ID NO: 543843 - DNA, 821 bp, Homo sapiens
ggtttatttatatggtctcttgtttctttttgttttgagatggagtctcactctttggtccaggccagactgcagtggcgctatctcacctcactgcaagctccacctcctgggattcaaggggattctcctgcctcagcctcccgagtagctgggactacaggcgcatgccaccacagctggctaatttttggtattttgtaatagagacggggtttcaccgtgtaggccaggatggtctcgagtctcctgaccttgtgatctgcccgccttggactcccaaaagtgctgggattacaggcgtgagaccaccgcgcccgcctggggcgtctaggtatctagatctccgatgggggtcggactgctcgtgctcgtgtactagccaggtaccataccagcagtgcttgatctgcaagatccgctttcgtagtgtggacacaaggtcaggaagctgttgaggccaaccaacagataggtacctgtccaagaggtgccatgggacggttatacgacgatcgacactctacgaagaattgccagtatctcacagtgcgggcggggtagcagctcgcccagggtcgctaccgacaaccagacaagcttcctggggcgggagcgccagacaaatgcgcagtgaggcacgggtcgtaccccgagtcccacggacaaccacgggcagctgccactgccccaatcccaatgcgcagagcgaacacaatacctggcaatagtcagcgcctgacagcactcacgaaggaccgcgccagacggccccaaagcaagaggcgccgggccgacgcgatcaccccaggcagcgcaca

SEQ ID NO: 543844 - DNA, 428 bp, Homo sapiens
tgagtaagacaagctcctgcccgcaccagttcaccaactaatacagaaagtgacaaggagcaagccattagaaggcagcacatgagtgtggcacgcaccagcagtcccagctacttcggaggctgaggtgggagcatcgcttgagcccagaggttcaaggccagcctggacaacgtagtgagatcctgtctcttaaaaaataaaaaagagaggctgggtgcagtggcttatacctgtaatcctagcactttgggaggccgaggtgggtgaatcatctgaggtcaggagttcaagaccagcctggccaacatggtgaaaccccatctctactaaattgggcgtcatggcaggtgcctgtaatcccagctacttgggaggctgagacaggagaattccttgaacacgggagacggtggttgcagtaagcc

SEQ ID NO: 543845 - DNA, 125 bp, Homo sapiens
catctaagattcttcaatttctcctaaaaacatcacctctttctgactgcaggtttttggccaaaatttcagcagtcctctgatcactggctctgttagtgttgtatctttctccaggaactgta

SEQ ID NO: 543846 - DNA, 304 bp, Homo sapiens
  misc_feature (192)..(192): n is a, c, g, or t
taattttctctttaatttttacttttatattttaactttttattatattttctttttttttttattttttttatttcaattttattctttattctttttttgttattctttctttctctattttatatttattattttatttatagtttttgagtgttttttttgcattttattttatttattttgtttttncattatttttttttacttttttaattttctatttcctttctttatatctatcttatttttttttttattccttctttctacttatttatcttttagttttttattttctttt

SEQ ID NO: 543847 - DNA, 319 bp, Homo sapiens
  misc_feature (49)..(49): n is a, c, g, or t
aatttccatttttggtcagatttcccccctttcccttgcatttatgggntacccccagtttacactcccaatcatttttttcccagactggtcccctttgttttgtgttttttttaggggaaataaagaaaaataaatgggggccggtttggaaagctgcttcccgtggatagtttattagaatcctggcccaaagaaggccccccttgctgttgggataaacaaatgggcctatggggggggagggggggtccccttccccctgtggggttttttggggaagggtttcccccaatttccattaaccagtggacagtga

SEQ ID NO: 543848 - DNA, 739 bp, Homo sapiens
  misc_feature (318)..(318): n is a, c, g, or t
ctgcacggtgtctcctgtttgcattacattcttggaagatttcaatatgtaattttgatggcttgatgctttgaagtcttccataaatatttagagttttgaggcctatgcgacctgaaggcttactgctgaattcaattaggtagcaatctgcaaatatttagcacctataatttgctaaatactggaattagatacggatttataatggggtagaggcccttgcccttgagtttactgtcctgtagttgaaattacttcaatctaaggaacatttttgaactccttcctgcactgtgctaaattcttgaagaaacnaaggatatagacacatacctgtgacaaggttaaacatttagtgacaagtattctaacttttccagggacaagggtttgtatgttagagtggaggaggtttgtgaaagttttggaactcactggtgataaggagtagaaccttatcatattggaaaccagaagaaaccagaacactcgagtgtttgaagagactagtttggctggaatggtggtttttcagggagtagtagactgggatggatggagaggtcagttttagattatggagggccataaaaacaaggttaggaatgtggactttatcttgtggagagttactgaaggcttttccagcagaaggctgacataatagcaaagagatggtttagagacagtatcgcacatttgtgtgtagggtgaagttggggatacacgttcgcga

SEQ ID NO: 543849 - DNA, 156 bp, Homo sapiens
ttggcgacattttacagactcgtgcgtccttcttttccaggcactcacagacagaaatgcaataaatatgatattgtatcaaatagtaaccaagttggatttctgtgattgaggctggagcgtattttaatggtgtcggggagacaggggaagctt

SEQ ID NO: 543850 - DNA, 182 bp, Homo sapiens
ctactctgatctccgcgagcatcttcacgacacttctttcaattcatcctgaggtgacttgtaagggagatttttagccaaaatgtgttctcgcatctcgctctttcttactgtctttgcctttgggtttctctagtttaatttacagtcgccaaaagaactatacaaaccagtgagttcca

SEQ ID NO: 543851 - DNA, 1380 bp, Homo sapiens
  misc_feature (220)..(220): n is a, c, g, or t
gcgatgtcctggcgccgggatgaggagcggggagccatgcctggagacggagctcctagctgcacctgcgcctgcgcaggcgcgcggctctgcccagtccctctaccacagcgtgctcccggtccccgctagctcgtggacgacaattcgaacgcttgccaggtccgccctcagtgcaaggattcatgctgagccgcgtatgggcatgagtgctttgccntacggttgcatgacgaattggtaacctgatggcccaagaccaagcaaatggttaacgccgagggacaactccttggactagtgagtcctgcatttctgttgctgaagcttgctccaactcccaggcggtgtgagtagacccatcgtccctagttcgtgtctgcctagtgggcgttcgttgcccgatgctccccttgatcggcggcttgttcgccggctaggtaccctcgtatcgctcagtcccagcggtgctatcggttcctagcggacggtgattgtttctccttcgcgttgaccgttgcggtacgattcgggtggcatggaactgtgtgggaactgttgtccacaggttcgcccgtggttgggtcccactgtgaggcgctttggtgagggctcgcccgtcgtatccgatcgttacgaggacgagcccgtctcgagctcactgttccattcggttgagtgaacggtcgcccaattgtttgactccttgtccgggcttgccggcgggggctgaccttaggcgctctggcttcgtcttcactttgactggctttggcgccttacatgtctttagcaaacggcgctctaggggagaccgttaacccttagttggggagaaggttacagcccagcgcggagtcttttcaattcccttggccgccccaggggttccacatcgggcccttgcccccccgtgcgggaagctttacttccccgagggtttcgaacctttttttgacgttttccatttgtgtggcccgttacaattcaaacgcgctcttgggagcgctaaaagggcacacaggttggcccccgttggttgtattccttaagctgaggggagcccccttcagattccactttgggaacgcacaaagtttccaattcaatttcaccgtccaaatcaacgcgcgattcccgggcccattcccgggttttccggaccataggggaaccggcctggaagcccccctgggtggggaagcccacaatggccggtgtcgcccccattagggcgcctatggccacacactggggccaatggttcaggaggactttgaacttggatcacagtggacagccgggggtgtgggagggggccctgtggcgaatcattctcctttgggcaacgttcctttggagccgaacgggaagaaccaa

SEQ ID NO: 543852 - DNA, 393 bp, Homo sapiens
tccactagtgtaggcactcacaacaaaactaaacatatgggattatatcaaactaaaaggcttctgcacaacaaaggaagcaatcaacatagtgaagaaacaacccagagaatgggagaaaatatttgcaaactattcatataacagggaattaatatctggaatacacacggaactcaaacatctcaacaacaaaattgtataaaaatggacaaataatctgaatagacacttcccaaaaagaagacatacaaatgaccaacaaatatatgaaaaaatgctcaccatcatcaatcatcagggaaatgcaaatctgcaaatcaaaaccactatgaggtataatctcaccccagttaggatggctattatcaagacagcaaacaacaaatgctg

SEQ ID NO: 543853 - DNA, 724 bp, Homo sapiens
cgggctgcaggaattcggcacgatatatagatatatatatagtagtagtagtagtagtagtagagagatagagagatagcgagtgatatacctatattcctttgttgataaatgcctgacatactcctctctttaacctattctcccctctagtcccgcctatatctacatcttcatttcttttcttctaacctttttctgggctacttctatccttaccttctttcctgtactcttccccactctgattactaccttctctcttactgcttctttcttcacatgatctcactcttctatcaccacactcagattggtcagaatgcttactctcctttagctattcacaatgcctcttccaacctcttttatcacccccttagcttcctcagccttcccttaacttttacgtacacacgttacatatccttctctctactctgatacactacctacattattatcttttacattctatattcgcctgtgcacatcgtctcacacctgcactcccttccttttctgccgctcatattacatgattcctttacgcctgtccttgcactacatgccttgccttcatccttcgaccttcactatccctcttctccctttcacctttcccgctgctttgccctaccccctctataccttgccttttgcatcgtttcccttcatccctctcccttgtctctactccaccccttatccctcttttttctct

SEQ ID NO: 543854 - DNA, 635 bp, Homo sapiens
gcctacctgtaccccagacagacttttctgtcttagaactacctgtccctctttgaacagtgtcttcctggtagtacacatgaagatgtcccgctctcccctgctcaaggagagagtgcctgacctgagctgggcccatcagatccagtacttacctggaatacgaaaaagatggagagagtgaccaaagattacaaaaatctctgaagcttatctacttgagagagagtccctgaagatactggcctctcattcctgctatgtatatccaatgtgactgaactctgaataaaatatacaagttataacaatgtagcaattgacccagcaaacgaggacacaaacgtgttggagggtaaggtggtgagaggcgtgtttgggggtggtggtgatgagcaagtatgtgaaggagaggtagtgcctaaacttgaaaatcaaaaagtaataatatctatttagacataaggagataaataacgaaataattgcttctatgtgatgaaactctgggagtacacaaggggactgctattttactaaacaaattttcaaatatatataactttgataaagtatccaaataaaataattcctttcccatataagtatgtgtatatatgtattccattgtattt

SEQ ID NO: 543855 - DNA, 231 bp, Homo sapiens
cccgactagcccgacaggcgtatatgacaagctgcatctgtctagcgagaagagagagctaggatcggtcatggcatagctgcttcaatgcaggcacatagcgcctcgtagtaacagccattctcatccgaagcccctgaagcttcacgggggcagtcattctcataatcggccacgggctttacatcctcattactattctgtcgggctagtcgggggggtaccgagctc

SEQ ID NO: 543856 - DNA, 150 bp, Homo sapiens
tccgaaggggctctgagttctggggtgggagttttgctctctgtcaggtgtgataaaatcgtcgacccctccccaccaccactttttttcttctacaaccagggatgtctgttgaaatcaaacattcagtccgacaaacaaaaaaacaca

SEQ ID NO: 543857 - DNA, 583 bp, Homo sapiens
ggaatttggcccgaaaaggaaaaaaatgggcattttattaattccttaggggcccaaggagggcaaaaaaaggtgattttttgaaatttgaaaaacgtttttagatgcccaagcaaaaagactttaaaaaatggtaatgaaaatggaatgcagctcctgcaggtaataaaaaattttaaaaagcaattgtttcacccatatgcctttataggtagcccttagaattatgaaagcatggggttaacccttttattatttttcccccccttttcagggttttaaaaaaagggaaaaaaaaaagttttgcctgccaattgaaagattttgtagctgaagtaaaaacatttaggtttttggagcattaaattgggaagacaactgggggggggcttattgaaaaaactttttgtatgtcctaaaaaaaaaaacaaaaatgggggggttttgattttttttgcattttaaattttcagccaccccccacccatgttttttagcccagggatatccccatgactttccaaaaagggtttaaaatttggacccttccccccaaatgaaaaaaaaaattgattaaaggtta

SEQ ID NO: 543858 - DNA, 426 bp, Homo sapiens
  misc_feature (8)..(8): n is a, c, g, or t
  misc_feature (426)..(426): n is a, c, g, or t
taattttnccagacacctcagacccaatactgttgggccccagaagagtgtgcagtctgccaaaggctaggtttgaaaatgacaacttgttgtagctgcttagatcgcagaaagggtgtgggaagcagtgcaagcacactcgctagagcagtttcatctcacagtatcctggaaacttcctgtgttagtttcagggactaggaggttcaaggggctctccccttggcaagattgcacagttctactgtggggatgtgggccactggaagtctctcacttatcactctctgtgttgcttatttccaaatcccacccaatcccagccaaacagactgcaactttccttctccgtccttgcttttggtgtttcctgtcacttttctgttgttcaatgttctttctttgattgtttttgtgtccttgttn

SEQ ID NO: 543859 - DNA, 1124 bp, Homo sapiens
  misc_feature (910)..(910): n is a, c, g, or t
ctaccagacaaccttagccaaaccatttacccaaataaatgtatagtgcgatagaaattgaaacctggctgcaatagatatatgtacctgcaagggaaatgatgaaaaattataaccaatgcataatatagcaatggactaacccctataccttctgcataatgaattaactagaaataactttgcaatggagagccaaatgctaagaccccctgaaaccatgactgagctacctaatgaacatgctaaaatgatgcacaccctgtctattgtagcaaaatatgtgtggaatgatttatacgtgtagatgtgctgacaaacctacctgagccatgtgtgatcagcttggttgtccacagcatcagaatcttcagttcaacatttaaattttgccacacagcaacccatctaaatcccacttgtaaatttaacttgtatacgtcccaacagcagtgaaccagctccttatggcacaactcaggaccaaaacccttgctagaagaagcagtaaaacaaatttcaaccaccccataagtacggcctcaacaatgcagcacaacccaactatccagaaaatgctgttccaagcctcaaagcacccagctacctaaagaaaatcccaaaacatatcaacttgaaactccttcaccaccccaaatttggagccagagtcatattcacacacattatacgaaagaaagctaaagtgttgaagttactcacggtaaaaccattgcaacaacaatcacatcccatcccgacacttacacgcccatggccggtcacgaatttacacaaagccactctggaaaactggacaactttaaaagcaatgcccccaaaactcattcttaaccaagattcaaaacccagcacacaacagatccccatctgtaactattaacacacncttaccagctttgggatccaaatcaccccaacaccaacaatggttgcacatttgcctccacagttacattgtgggcatcatgggtgtttcacacaacaacagacaggtcacaccactatgtgacaccttcaggtgcagcacatgacctttgaaccccccctggacactggatgtatcacaccccagaaagtaatcagtttaacacctaccatag

SEQ ID NO: 543860 - DNA, 217 bp, Homo sapiens
cgcacttaaacagtcagtggagaaataacatgttcagaactgtatgctgggtgggaccatgtacttgtatgactggcgaagataggcctttgagtggctgcaagggcttctggagtgggaatgcgaaaattctctgctaagactttttcaggtgaacataacagacttaggcaagctagcatcttagcggaagacagatctccaatgctcttacgcc

SEQ ID NO: 543861 - DNA, 364 bp, Homo sapiens
atgagaatggctgttactctagggctatgtggctgattgaagagtatgaatgagcgattttaggtctgctgtcccacgcagatggagcttgttataattatgcctcatacggatatgtccatgacgcaaggggtaggctatgtgttttgtcagggggtcgagaatgagtgtgaggcgtattataccatagccgcctagttttaagagtactgcggcaagtactattgacccatcgatgggggcttcgacatgggctttatggagtcataagtggagtccgtaaagaggtatctttactattaaagctattgtgtgagctagtcttattatattgccgattcttcctatcctttctacggggtac

SEQ ID NO: 543862 - DNA, 380 bp, Homo sapiens
acactgtcaaacagttgtgtgacagaacggcggtaccgggtggataacttcgcaaatgctagatatatcctactgaagatgtgctcgaaagctgtgagccacggcaataaacccttcagtcatcacgtgagataactgcgagccagcattacccccgggaccattctgatcatcctcactggacgccacattgtctagagggtggtatacctgaagcagctggctagtggcttattacttgtgactggacctctggtcctcaatcgagtacctctacgaagaacacaccagaaatttgtcattgccacttcaaccaaaatcgatatcatgcatgtaccaatcccataacatcttactgatgcttacttcaagacgaagaa

SEQ ID NO: 543863 - DNA, 747 bp, Homo sapiens
gatgtggaaggatctacttctcctcaaataggagataaggttgaatttagtattagtgacaaacagaggcctggacagcaggttgcaaccttgtgtgcgacttgttaggtcgtaattctaactccaagaggcgtctgggttatgtggcaactctgaaggataatcttggattgtattgaaacagccaatcatgataaggaaaatctgttttccacttacagtgagttctctggtgatgttgatagcctggaactgggggacatggtcgagtatagctggtccaaaggcaaaggcaacaaagtcagtgcagaaaaagtgaacataaatactactcgaagtgaatggcattactggaggaagcgtgatcccaccatttatctctggcacaaacgtatcttcgacccctgaggagtgtcgatccaactacagactgagtaaccaaggtaatgatggagatgtggaggagggcgatatgaaaggtgaggtctatgcattaggtcatcgttgggatggcaacaaagtgggattgctgtagaaaggtggagagcgtcaggttctcaattgtgtgtctctgggcataatgtacaaattatggtttacaaatcaaaccgtggcagggcccagtggaatgtgtgaaagatcagtgggttcattagctatgaagtaggagatagaagaagatcttttccatgtgaaagaagtcaggcgggttgagacaggggagatgaggggagccaggatctaaag

SEQ ID NO: 543864 - DNA, 418 bp, Homo sapiens
  misc_feature (27)..(27): n is a, c, g, or t
  misc_feature (99)..(99): n is a, c, g, or t
  misc_feature (169)..(169): n is a, c, g, or t
  misc_feature (184)..(184): n is a, c, g, or t
  misc_feature (186)..(186): n is a, c, g, or t
  misc_feature (210)..(210): n is a, c, g, or t
  misc_feature (223)..(223): n is a, c, g, or t
  misc_feature (244)..(244): n is a, c, g, or t
  misc_feature (253)..(253): n is a, c, g, or t
  misc_feature (267)..(267): n is a, c, g, or t
  misc_feature (299)..(299): n is a, c, g, or t
  misc_feature (306)..(306): n is a, c, g, or t
  misc_feature (317)..(317): n is a, c, g, or t
  misc_feature (334)..(334): n is a, c, g, or t
  misc_feature (395)..(395): n is a, c, g, or t
  misc_feature (402)..(402): n is a, c, g, or t
ttgaagtatccgggtcaaatgaaaaanccaccatcctaccctgcctgccccaagtggtcgaaatccaaccgtgaagtggccttaacccacccaaaaatntagattacgtggccccctccatccatgaagcagtccccaaaatccagtgaagaaacccccccgtccagtncccccaaagtagttntntgtcatgtgtgttccctgcctgcncaaacctacatgnacataccatggattagagacncttgcaggnctgaaaggctgctntggtgaggcagcctctgtttaaaccggccccncatgaanagaacatcccntgagacgaatttggagnctgggattagagcctttggaggtcaaagcaaattaagatttttatttaagaataaaagagnactttgntcatgagaaaaaaaaa

SEQ ID NO: 543865 - DNA, 147 bp, Homo sapiens
ccttccctccaccatccagcaaacacgctggcaggcatctgcctcattggcacagaaaactcccctgctcctcatgctccctccacctccagttgctaactgactactgggtacctgatgctctgaattctgtaatacatgtgtcat

SEQ ID NO: 543866 - DNA, 130 bp, Homo sapiens
tcgagggcgagaagagaggcttcctcagttggggacctgggagcaggcagcattatgcagaaatccaggtgtggatgagatttcaatgagtatgctgtaaaaaaatgggcatcgaccataagggacaggt

SEQ ID NO: 543867 - DNA, 414 bp, Homo sapiens
  misc_feature (6)..(6): n is a, c, g, or t
  misc_feature (34)..(34): n is a, c, g, or t
ctggcnagtgtaatatccagatgtttaacctatnggaccccagaacctaagatgtggagacctattgccccatagacccacaatgtaaatttttaaagtgaggaaggaaaaatcaggaatcaaaaggggccccaggtgcagtggctcacatcctataatccccagagctttgggagttcgaggcaggaggatcacttgaagccagttttgagaccagcctatgcaacacattgagaccctatctctacaaaaaatagattagctgggcacggtggtgcatgcctattgtcctacctactgtggaggctgaagtaggaaatcacttgagcccgagagtttgaggttacagtgagctatgattataccactgcactccagcctgggcaagagagcaagaccttgtctcttaaagaa

SEQ ID NO: 543868 - DNA, 870 bp, Homo sapiens
  misc_feature (412)..(412): n is a, c, g, or t
  misc_feature (483)..(483): n is a, c, g, or t
  misc_feature (526)..(526): n is a, c, g, or t
  misc_feature (555)..(555): n is a, c, g, or t
gccggaggtcgcacagcgtgagacttctccggcgcctccgccgcagacgccgccgcgatgcgctacgtcagcctcctacctgctgggtgccctagaggggcaactcctccctcgcagcgccgaaggatcatcatagaaggatcttgagacagcgctggagtatcgaaggcgagacagacagaccggactcaacaaggttatcagtgagctgaatgcgaaaaaacattgaagacgtcattgcccagggtattggcaagcttgccagtgtaactgctggtggggctgtagccgtctctgctgcccctaggctctgtcagccccatgctgctggttctgcgccctgctggcagcagaggagaagaaagatgagaagaaggaggagtctgaagagtcagactgatcgacatggganttccggcgcgtttgggattatagttgcctgctcgcccgtgcaagagtaaacgcgcttattctacctacatngcagcattaccaataacaaatgaactaccttgagagatacttntggagcgaggagtggcaagctgccggtanttcaagtccggtgtcccaagtgggtgcaactaactcgagtatacctgggacctcgaagttatcccttgtggtgacagaatgcgggatcagaatgcaggtgggggtgcaccacctctttaaggagagtgtctggactgaaatgcccgcatgagaggtcccggtatagccctggcgattaccgaagggggggggcacaatcccctggagggaaaagtggggaatggagcgacgaaagaacgaacctgaacaagggcgcatcctcgatcctgttccttctgaccaaaggaattcgccttgtgaggaagagttctccga

SEQ ID NO: 543869 - DNA, 1037 bp, Homo sapiens
gcgcgcgtcgctgctagtgacccgggcatggctggagctgggctgggatcccgatgctcgtgcagcagctgcagctggtgccggcccacctgctggtgccctgggaggctctgagccccggttggcgcccgggcccacgcggaaggacggggtcggagatgcagatgccactcccgtcgtggactgctcctgcgggttccctgtccaggaagaatgcggttggagttggatgatgaactttatgataccgagcgtcccgtccagaaacgagctcgaagtgggccccagcccagactggcgcctcgcatgacctgttgcccctgtagccgcgagcctagctgcttccagatcgtgcaactgcatgtggccacgtgcctcccgtcttggtgccctatgtcctcctggagcccgaggagtggcgggcgggcctaccgaggccctgcactgccctacagggcacgtgagtatacctgcaatgtgtaccccgtccagggaagccctggccgtgctggagccctatgcgcggttgcccccggacaagcagtgtggctcggccactgaggtcctggctggtacccatggtcctctatcgcctttttcactcgtgacccatggggactatggcacagcctggtgctgaagccgccagcgtatcccttgagcctgaggctgccgtgctcttccagcagatggccacgcgcctggccgcactgtcaccagcaccggtctggtcctgcgtgatctcgagctgtgtcgcgttgtcttcgctgaccggtgacaggaagaagcttggtgcttggagaagcttggaggactcctgcgtgtgactggggccagattgattcctgtggggacaagcacggcgtggaccagcctaagttgtgacttgagatactcacgtcaaggggcctcttactcgggcaaggcaccgagacttggagctgagattgcgcccttacatgctggcgggatatccttcaggacggagctgtctgtctacaggaaaggcgggggcacgttgctgggcctggcctgcg

SEQ ID NO: 543870 - DNA, 1020 bp, Homo sapiens
gagttggttaatatcgtggtaagaggaattagcttggtaaattaagaggtaatttacgggtgcaagttaagcagatatggtcctgtggaacggaaaatttcgcccgtcacggattcagggcatttgtcaaacgtgctgatgctggtggaacaaggaagggggaggaacggaataggttcgagacctttgaaggagcattcgtgtagcgctgttaacactgagggtccgtcattggttatagctgggtgctcctacgttactaggctagtgatttttggggaaatggggccatccaccttatgtagatcccagagtccgtggactctgagcatcgctccactttcctcatctggacatgctcgcagtgtctgccttgggaatggtcaagatcagagatggtatcgtgcagccatctggtcatccacacagtgagagtccagggcatcagggcatgctcaagaccaaggcttcccagttgatgctgtcacttcgggtgatcagacatgggggacctgttaatctttagtacgccggcaaaggcaagtcgtagaaacagtgttgatctgtaactctcaggattcgtcacatgctaaggaacaccttaagtcgcacaacattgctctgctctcctctttgcagaggggacagggagctccagcccagagagcgctacttattagcagtgaggagcagaagcagctgatgctgtactatcacagaagatcaagaggagctcaaggtagcaggggacacgatgggctttatgcagtgcgtggcgcccacacattagccgtgatgtgcagttacctggggctgactggggagcagagagctcgtgcagaactgccggggaggggtctttctagagcgtctgtctgcaggtctgtgcaggggtcctgacacaggtcgtcacctggtgttagacatgggcagtatcatgctctaagagggcagggagagggggaggtacagtcatggactctttcttcagtctcttaatacgccaaagattttctgatt

SEQ ID NO: 543871 - DNA, 186 bp, Homo sapiens
gcaatttctaacattttgtgcacatgttgaactactactgtatgtattcttaatagttagctagctatatccttgatataactagttttattattttatttttggttttggagacggacttacttcagtcgcccaggctgagtccagtggtcattctgaatactagcagttggaggccacgaggag

SEQ ID NO: 543872 - DNA, 1096 bp, Homo sapiens
gtgtaaatgatggcggcggaggaaccttcagggagctataagcaggagccgctgggcagcgactgcgaaggtgttaactgtctggcctatgatgaagccatcatggctcagccaggaccgagattcagcaagagattgctgtgcagaaccctctgtgtgtcatagcgtgttggaagctctcgcgtcctatacaatggaggtatgctgaagcatgacaagcagtcgtatcgaacagaaagatcaagggacctcgcacaaaaatgtactcgtactatcctcaagatcaggcctgacggcaactgtttctatcgggcttccggattctcccacttggaggcactgctgtatgacagcaacggagttgcagcgagttcacaggctgtgtctcgcctaagagcgagaggcaagacctggtgtcccagggcttctctgaattcgacaattgagcgattctccacaaagaggttcatggacctgatcgcagcaggtgcgcatgcaagcacgacctctgtcgtcgacctgttggcctccttcaatgaccagagcacctccgactaccttgtggtctacctgcggctgctcacctcgggctacctgtcagtcgctgagagcaagttcttcgagcacttcatcgagggtggacggactgtcaaggagttctgccagcaggaggtggagcccatgtgcaaggagagcgaccacatccacatcattgcgctggcccaggccctcagcgtgtccatccaggtggagtacatggaccgcggcgagggcggcaccaccacatcattgcgctggcccaggccctcagcgtgtccatccaggtggagtacatggaccgcggcgagggcggcaccaccaatccgcacatcttccctgagggctccgagcccaaggtctaccttctctaccggcctggacactacgatatcctctacaaatagggctggctccagcccgctgctgccctgctgcccccctctgccaggcgctagacatgtacagaggtttttctgtggttgtaaatggtcctatttcacccccttcttcctgttcacatgaccccccccccatgtttttattaaagggggtgctg

SEQ ID NO: 543873 - DNA, 766 bp, Homo sapiens
cgccctgttggtgccggccactcccttggttgccccccacccctactttggcaatgcgtggtaggctcccggggcagtctcttcggttcgttaccccctggtggggccccggggtgtttccccccgaagtgccctcgtgttgtcgcccgcgtcgcgacctttctactccccctgtggggacacagccgacgagggtgccgcccgctgtgctccacacatgagtaagaccaccacataagcagaggcgactaagtcaatataaatgttagtgtgaggtgcgacatacacacacgagttataaatagataaagtatatgtacactgttcactctcacgacatgttataaagatatagtgcaccgtgagctgcttcctcactgtgaaaatcacctctcatagtagattgcgagcaccctctctaatagaacatcttatataattgtgacaaatatatccacacatatatgttagggatatatatatctcttaaaaatgtatcagtgacttatatagccctccctgactcgacaccgccctcctccatctgtcctctctgttaaccgacttggtattcacacaggatgtgttctcttgtgaaaatatcagtaatgtggcgcacacgcggctctgtggtgaggagcttgtgggattctaaggtttgtgggtcacgcaggaagttcacgcggagagccacagcccgggttgcccgcacttttaaataaaaggtggtaacgcacgggcccacagccatcaataaacaagaaat

SEQ ID NO: 543874 - DNA, 187 bp, Homo sapiens
ccgaccgtccaatctgatctgaatccctggctacccacatggccatggcatgttctgaatgttcctgagcccactgcatcttcattacaagtgacactgacagggctgttgacaacactacatggagtgaacgcagcacacaactaccccctgccctcacccctgctcctgatcttcttagccctag

SEQ ID NO: 543875 - DNA, 1103 bp, Homo sapiens
  misc_feature (2)..(2): n is a, c, g, or t
angagcagagagtatgactgtcagattcttcaggagagaatggagctcttacagcaagcccatcagagaattcgtgacttagaagataaaacagacatccagaaaagacaaataaaagacttagaagaaaagtttctgtttctattcttgttcttctctcttgcctttattctatggccttgatgtcaaggtgcctcttaaagagtaaccgaaaacatggataagatcccaggaagacaagtgcttctaaaccttcaaagatggcaaaattgtttacaccagtgagagggagatcaaaagctaagaactaccctgtagccaggactacaactgtgtattttaaagccattattcaaggtttcttacttgacagttcctacacaaccctgttgaaaatctacaatatatgctgcatttaatgaaacatgtatatgtcaaatcagaagagaagaactataaacatatattgtgtaaagaaaaagttcagcaatggaactagtttctgcagatcaagcaaagatgtgtcttgggcatggaaccaaagttacaatgaaatattcaacccctgctgtgcaggggggtcattttaatgtaacaccacaccccatggaaacactagtcctgataataaacatcattttaaaagatcaaaacaaacaaacaaaaaaaacaagggtgggtggggagtgaagcacgaggaatacctatgaagagctatttacaataaaatgtttcatttgaaaaaaaaaaaaaaaaaaaaaaaaaaaaaaaaaaaaaagaaaaacaaaaaaacaacaaaaagaaacaaaaacacacaaaacagcaacacaaacaaagaataaaaacacactgaggggcggcgccccacacacggcaaaccccccgaagcaggaacaaaaacgggcacaaaacggcaagatccaagagagcacagagcgacacacacaaaaagagagagatagaaaaaagaagcgcaagggcgcaggcccgacacaaaaacagcaaggagacgacaccaacagcaccgaaagcagagagcgcctagagaaacacaacacaaaccaccaggaccgcagaggacacggaggagcaacaacagaccg

SEQ ID NO: 543876 - DNA, 951 bp, Homo sapiens
cacgcttcttctttgttattgatttatcagccggtcgtgcgttctgtgttcccccccgctttttctcccgcgtgtgtgggtcatcattgggaaccccctcgtggggtacccccccgcccctcacgtgtgttgtagtgctctctcccccccggggttgttttccctcttccgcgacgtattttgctgcgctctggtattggttgctcctcctcctctcgttggattctgttccgccgtcgtggttggtcccaaccacttgtgttcgtgctcgtcgtcctctgtttggtgagcggggattttaccaccacgggtggtggttgttggtccccccccctttttctttgttgttgttgacccaaccctgttggtggtgcgtcaggacatctaattatgttcccctgctgggcggccatagactttttctgctgccgtttcttccccccgggacgatttctgttcccccccgcggcgtgtgtgtggctttctctttttgtgagaacaaccagctcgatgcttttcttgctctcgcgccgtagtaaaaagacagcctggttgtttttttcgccccccaccacccgctgtgtgtggtgtggtttcccccccctccttttctgtggtggtggtgttccccctccgtggggcccctcctctttctcccccccattttgtctggctgaggtcgagatcctcctcccctcccccgtcctcttctttttttttgggggggccccccccctacatgatattgttgtggctgatcatttatgatgatggctgaggaacgacatccttcttctgtgggctggtgttttttctcatcactctctttcttcttctgtctgccgcccccccccgcacgtcttcactttttttttttgtcccccccccccctttttaaataatttttttttttccccattttttttttcccccaaaaaaccccccccccca

SEQ ID NO: 543877 - DNA, 487 bp, Homo sapiens
  misc_feature (431)..(432): n is a, c, g, or t
  misc_feature (483)..(483): n is a, c, g, or t
aagaaccattaattgttttatatgcattgtgttgcaacaacctttgacatagagacttctattttctcccttaaaattaaagtaactaagcttagagatgtaacttgcataagatcatacacatcaaagcagtggtaaagaataaaaaatttgtgtctttttttaaagtttgttttttatgattcagctattaacaaaattgatacataaataatttttttcctctgttttacagagtaaccgaaaacatggataagatcccaggaagacaagtgcttctaaaccttcaaagatggcaaaattgtttacaccagtgagagggagatcaaaagctaagaactaccctgtagccaggactacaactgtgtattttaaagccattattcaaggtttcttacttgacagttcctacacaaccctgttggaaaatnntaccatttttggctgccttttaatggaacctggtatttggttccaaattcngggt

SEQ ID NO: 543878 - DNA, 140 bp, Homo sapiens
atcagctcggtaccttttattttattttattttatttttttgagacagagtctctgtcaccaactgcagtgcagtggtgcgatctcagctcactgcaacctccacctcctggactaaatcattcctcccgcctcagcctt

SEQ ID NO: 543879 - DNA, 739 bp, Homo sapiens
gccccagaacccagatccacacggaactacacagacaaccttagccaaaccatgtgacccaaataaagtataggcgatagaaattgaaacctggcgcaatagacatagtaccgcaagggaaagcactgaaaaattatgaaccaagcataaatatagcaaggactaacccctataccgtccgcataaggaaagcaatctagaaaagaactctgcaaggagaaccaagagctaagacccccggaaaccagacgaagcatacgtaagaacagctaaaaagagcacacccgtctagtgtagcaaaatagtgggaagatttataggtagaggcgacaaacgggtaccgagcctggtgatagctggttgtcgcaagactagcaatcttagttcaactttataatttgcgccacagaactcctggaaatccccttgtaaatttaactggtagtccaatagaggaacagctctcttggagcagctaggaaagaaccttgtagagagagtaaacaatgtaacacccatagtaggccataaaagcagccaccaattaagaaagcagttcaagctcgaacacccactacctgaaccaatcccagacatataacgtgaactcttcacacccgaattggaccaatgtatcaccctatagaagaactcaatgtgagtataagtaacatgaaaacattctcctacgcataaggcgtgcgtcagaataaacacggaaacctgacaactaacagcc

SEQ ID NO: 543880 - DNA, 741 bp, Homo sapiens
  misc_feature (2)..(2): n is a, c, g, or t
angagcagagagtatgactgtcagattcttcaggagagaatggagctcttacagcaagcccatcagagaattcgtgacttagaagataaaacagacatccagaaaagacaaataaaagacttagaagaaaagtttctgtttctattcttgttcttctctcttgcctttattctatggccttgatgtcaaggtgcctcttaaagagtaaccgaaaacatggataagatcccaggaagacaagtgcttctaaaccttcaaagatggcaaaattgtttacaccagtgagagggagatcaaaagctaagaactaccctgtagccaggactacaactgtgtattttaaagccattattcaaggtttcttacttgacagttcctacacaaccctgttgaaaatctacaatatatgctgcatttaatgaaacatgtatatgtcaaatcagaagagaagaactataaacatatattgtgtaaagaaaaagttcagcaatggaactagtttctgcagatcaagcaaagatgtgtcttgggcatggaaccaaagttacaatgaaatattcaacccctgctgtgcaggggggtcattttaatgtaacaccacaccccatggaaacactagtcctgataataaacatcattttaaaagatcaaaacaaacaaacaaaaaaaacaagggtgggtggggagtgaagcacgaggaatacctatgaagagctatttacaataaaatgtttcatttga

SEQ ID NO: 543881 - DNA, 666 bp, Homo sapiens
ggcatataccattagactagaaatacaagaaaaaaaaaacggaaacaaaacttagttgtcagctatctattcttgttcttctctcttgcctttattctatggccttgatgtcaaggtgcctcttaaagagtaaccgaaaacatggataagatcccaggaagacaagtgcttctaaaccttcaaagatggcaaaattgtttacaccagtgagagggagatcaaaagctaagaactaccctgtagccaggactacaactgtgtattttaaagccattattcaaggtttcttacttgacagttcctacacaaccctgttgaaaatctacaatatatgctgcatttaatgaaacatgtatatgtcaaatcagaagagaagaactataaacatatattgtgtaaagaaaaagttcagcaatggaactagtttctgcagatcaagcaaagatgtgtcttgggcatggaaccaaagttacaatgaaatattcaacccctgctgtgcaggggggtcattttaatgtaacaccacaccccatggaaacactagtcctgataataaacatcattttaaaagatcaaaacaaacaaacaaaaaaaacaagggtgggtggggagtgaagcacgaggaatacctatgaagagctatttacaataaaatgtttcatttga

SEQ ID NO: 543882 - DNA, 620 bp, Homo sapiens
tatggccgggtagcaacattattaataaagtattttaattataactatattggagtaaatgaccatgaatgtggtctctcaaaatatcttgaactgtacttaacccttgtgatggtatgagatgatccactgcctatgtgatgagatgaagtaaggtgaatgatagtggccatacttctgtagttttgagttgcgacagcgtgttctttacttttctgagacagagtcttgctctgttgcccaggctggagcacagtgccacaatgtcagttcagtgcagcctccacctgggttcaagtgattcttgtgccctagcctcccaagtagctgagattacaggtgtgtgccactgcactcatctaatttctatatttttagtagagatggagtttcatcatgttggccagcctggccttgaacttgtggccttaagtgaactgtccacctgggccttccaaagtgctgggattacaggtgttagccacaaccctggtgagaagaattatttttaacatagatcttagaattcttagcatacctttcttttcctttattaagtggagaccttttaaccttttcaacttaagggaagcacttttattggcttctttttgggattc

SEQ ID NO: 543883 - DNA, 773 bp, Homo sapiens
aagaaccattaattgttttatatgcattgtgttgcaacaacctttgacatagagacttctattttctcccttaaaattaaagtaactaagcttagagatgtaacttgcataagatcatacacatcaaagcagtggtaaagaataaaaaatttgtgtctttttttaaagtttgttttttatgattcagctattaacaaaattgatacataaataatttttttcctctgttttacagagtaaccgaaaacatggataagatcccaggaagacaagtgcttctaaaccttcaaagatggcaaaattgtttacaccagtgagagggagatcaaaagctaagaactaccctgtagccaggactacaactgtgtattttaaagccattattcaaggtttcttacttgacagttcctacacaaccctgttgaaaatctacaatatatgctgcatttaatgaaacatgtatatgtcaaatcagaagagaagaactataaacatatattgtgtaaagaaaaagttcagcaatggaactagtttctgcagatcaagcaaagatgtgtcttgggcatggaaccaaagttacaatgaaatattcaacccctgctgtgcaggggggtcattttaatgtaacaccacaccccatggaaacactagtcctgataataaacatcattttaaaagatcaaaacaaacaaacaaaaaaaacaagggtgggtggggagtgaagcacgaggaatacctatgaagagctatttacaataaaatgtttcatttga

SEQ ID NO: 543884 - DNA, 775 bp, Homo sapiens
aatggcaatgaagacctgtggaacgacattgcatgccctgcctcaacatcccagtcagccaggtgaaccccagggcatgccaaggcctgcgtagtacacggcagctgcatctacaaggacatgaccgtccgaagcagcatggatgacattttgacagtaccacactgagatagtgtttgccaggacctcccctcagccagaagctcatcattgtggaaggctgccaaagacagggtgctatctgtggctgtgactggtgacgtgctgtgacatgactctccacgcttcgacccccactgctcgaccatatggggcttcgcctatgcgcggcatggcctggcctcaccaatctgtgctccaaagcacagcctggcctgaacccttgactttcattcctgggcacttgaccaacacttaacggcccatcaaatcggtgacctgggcaagctaaacacgcgacacacgcggatcggcgcctggaactccttctcggacctaacctttcgcacaccacgcccttccccaaattagggcattcacttagcccgtaacaccccatgtgtcaacccacttattcacccggacgaagaatacaactaccgcagtatctcccccctgtcacttatcttactaaacatacacatatgggcaaacaaatcacactttgacccccagagtataaaccaccaaccatgagcagtgagaacccaagagcatacaaccccaacattcccaatacattcgggccaactttacgggaacagccctagggtgg

SEQ ID NO: 543885 - DNA, 136 bp, Homo sapiens
ccttgctatgctacattgggacggccgaggagagaacgagcacacacggtacactgacaccacgtgtgtgttacgctacgctttctctatgattctttgaagcctggtgtctgctattgaaacttctaaacctagg

SEQ ID NO: 543886 - DNA, 1287 bp, Homo sapiens
tgggctctaaagggggtaaagggggtgctatagggataaattaggggccctatattttcaaaaatttttatgggggaatttaatttcttaggacgagtgggcattgaaacgtggtggttgtgcgtccacagtattttcagaagacatttgacgcgtagttataccccgcggttcggtgtacggcgggtagaaagtgtggttatgtggtttataaagcgctcccgggaaattgtgcattctgtggtttgaataagcctatagatgtggtgtggagacaggcctcagtgaagtgtgacagaaaaggttctatgtggtgaacgtgttaatattagtatactagcaaaatgtgcgcgggacttctccaaatctgcggggagaattatacctatacatctgcgaatgtgtgtctccaacgcggtctccaagagggacgtctcgcccaagtgtctcgccgcgttggggtctcttaaggagaaatagagtggggggaacaggctcttgttcaggccagttgtgcacacaaatttagtctccgcgcagaaaagactgcggggtgtttcacctcgattaggggtttcccagagatacccactttgtggggtgctgccacatctgtggctccttgtcgacgtgggctacacgggagaagggagaatctcggtgtgcaaccctctcggtcggtggtaaagtgtctaaacaggggaagtcgcagtttagggcgaagtggggagatgggggcagatatagagaggactttacgagaactgatgtgcggcgggggacaggagatataagcttcaacgaaaccgggtatcatcatatattactcacattgaaggcgggttctttgaaacattgtttctagataacttagaagtatacagttcttattaggtgtggtggagacagctgtcttcggggaaaacacgaggtggctcttatctaacagaggaggcctcttcaatggtcagacgcccacgaatattaagcggcgacaacacgtctgagctaattctatagaggagcggcgagtgataactaccgtatgaccaggggcgttggcctagagcgcgccagtctgtgttaaatctaattaagcgggggaacagagatacgacgcagtgctactggtggatcaacccacctggtcttgttatggtggcgagcaccaaccataaaaatttaacaccacccccaactattatcctcccgtgattcaagcatatatgtttgccttcaatcataccaagctctagctaacgtttttaacacaccagatatcacaca

SEQ ID NO: 543887 - DNA, 143 bp, Homo sapiens
cacgagggcgatccccatcctcagtccatcatccttttctctatcactgaatgagagcgttgctctggagaccgctgctgagctggttcagggccacgccatcgggaacggaatcgattctgagctcgtgcatgcagtggatg

SEQ ID NO: 543888 - DNA, 655 bp, Homo sapiens
tacgtcttaacaattacagaagaaccatgagatgtgccaagataatcactagggagaaagatgccacaccacagacagacgaaagcagatctgtactggaggggaactcaagggccactttggaggggaatgggtaatagaggatggttagaatcatcacctaacacaatgtagaactatggaagagaaaataccataaggctaaactgtctccaacaaaaagaaaactagctcctcaatagataaacaacaaatgaaaaatactaaagaccacaagtctaatctacaagctatccactgccttgctcatagaccttgggacggactcttccttcctacatcacaatatctacactgcaaaaatagaagtataacatcgctattccttacagggaagtaacacacattactaaaagtgactataagctatacttcaaattgcaccagagaactaaactattatacaaatattacatcctcaaagggtaaacttacagctaactgtctcccttaaagaattttatcataaagaagacttacctgtaaaaaatgtaccatcttaaggaaaattgctaagccagtactaccaataatgtcgggcataagatacacaagaggatcacccctccagttatctggtatatcacatacccat

SEQ ID NO: 543889 - DNA, 141 bp, Homo sapiens
tttgtagttcttgtgcttgggagcgatcttcttaccccaatgacaccttcgacagattgttgccctggttggtagcttgacaaaaccacgagactaatcacccagctaaaccactctcagatttcttgaggctcagaaact

SEQ ID NO: 543890 - DNA, 148 bp, Homo sapiens
ttaaaaagaaatatgataattttcttaatgcatggaaatgtagtaagaacaaaaattcttaaaaacgactaaaatttatacttctatagcaattaacataaacattttttaaaccattcatcagtttattttcacatacccccaaaag

SEQ ID NO: 543891 - DNA, 462 bp, Homo sapiens
acccataataatacaacatggaaaataagctttttcttaggacctctgtacacacgtctgacttctgggtaaataggatcaggctaatgatgagacagcctaaatagagatgtcatgacagagaattctgtcatcagccaacaattccagtgtgagaagttgaagatacttcgtatttgtttagattatgagattgctttaatgtgtggatttcaaactactatgttttgtttgtaagataaaatgtgtgttgaagagaagttttgtttgtaagataaaatgtgtatctacagagaagtgcatggagttttagccaggtgaacacaccacataagcagcactcagatcgagtaacaggctttgcgagtcctgatatttctaaggctccctaccactaagttgtaagctccctaagagcagggactgagtaccattctggtttaaaatatagtacattaatgg

SEQ ID NO: 543892 - DNA, 835 bp, Homo sapiens
  misc_feature (169)..(169): n is a, c, g, or t
  misc_feature (219)..(219): n is a, c, g, or t
gcccctgaattccagcctggtgcgagaagatgatgggcttcgtccgggagtaatagagtttcgctacgctgtctaccagctgtgcttggcaacaaacttgacagaatggacgaggagcaattgacctagtgcggtacctgcggtgactccttgacttagagggccattngtatcatcgtacttgcacatggatcatgacgagctatcacttacgtggtngagaccacgcgtcatgaatgtactatagggacgcgaccaaacgagcatcggacttctaatggtaaataccttgtacctaattgatgaagccgtagagagagatgagtatatcgtagggcatcgcattaaacttaaaccccacgagcatagtctggcctaccgggtttcagttgtttacatgtagtttataaccaatatcctttcaattccattgggacaccgaggaccctacaaatacccttcccaaattgggcgaaatcgccgatgaggatggccccccgaagaaaaacgtttctagctcaggattggtccttccgaatcggtattccttttgtgtggcttccaatttaggtgcttctcaacttggacatgcaggagcgcaagtgaacaactcacggggaatcgtcggaagtaatcggtccttcttaggagtttaatgaccttccaaatttcacacgggctctttcctcttaacctttgtgtcagtctggttttccgcggaaaaaaaggggacaccttaggagttggatcgcgcccatagggcgtgttcgctctaggccatatgtcaaccacccctatgggaaaggcgcgaaaaccggatatacctttatttcac

SEQ ID NO: 543893 - DNA, 1692 bp, Homo sapiens
gggagatctggggggagttggtacagctctgttcttcccttgatcctataccgggttccctggaggaggacacacgaacacaaacgaacctcaaaaaaaaaaatgacaagaaaacacgcacaacacacaccacacacacaacagagctcaccgctcaccaaccccctcgcaccatcacacacaaaaaaaaatataaactataaacgaacacacacaacacgcaaaaacaacacaccatatattaaaaacaaaccaagacgctatacgctgacaatgagaaacacttagagagaaacacaaaaaccggcagatcagcgtcaagtaaacagatatgtacgtgagagacgctcgtacactgaaggacagccacgcaagacaggtcaaggcggacaactgttaatcgtcaacacgaatgacggaagcacactgagaacaaaggaaagcgtagaggaagagaggcaggacagcgggacaggagggggcggagaaggagacagcggacagagacagaaggaaggcgaggaaggagagggggggagcaggggagggggaagagagaagagaagggaagcaggggacgagagggaggaaaaagcaggagacggacgagaggagagagcgaggggagaaggagaaaggaagagaggagacgacgacgaccaagaagaggggagagaacaagagagcgagaggaaagaggaagagaagaaaaagggagaaagaacatggacgggaaagagccggcagagagcgggtgaaggagcaagagagaggacaagagggaaggcaaaagagacgagagaggagggaagagaagagacggggaagaaaaggggaaggaacgagagagaggagagcgacggagaggcaagggcagggaggggaggaagagagagagggaacagaaaaagaggaaagagagagcgagaggagaagacggagaagaggggagaggaggggagggacaaggagagagaggaggaggaaggaaaggagaaggacgagggagaagaagagaagaaggggcaacacaaaaggaaaagaggaaaaaaacagagcaagagggggaggagcaaaagaacacaggtaggagcgaaagcgaacgacgaagcgcaagcaggaagaagcagaacgacggcgaaagaggcaggagcaaggaaaacagagggaaggagagctagaaggagagagagaagagagggagagagcggacgaagggatgaagaggagaagagaagtggagcggaaacacgtggaagaagagacagagaaggcgagagagcagaaaggaagaaggaagggcaggaccagaaaggaagaacagagagaaggagaagagatgagagagagaagagagagaagagacgaaggacaggagcgagagaaggggagagaaaagacaagaaagagagtccaccagataaggatgcagagaggagggagaagagagagaagagaagagaaaggagagaggaaaagcagagagaccaaacgcgacgagagaagacgagagagaagaggaaggatgagagacagagaagaggagagcgaggagaggagagatagagaagaggcggcaaagagcagaggatgacagagagaggcacaaggtaagacagggacgtgaggagcacagaagcggagagtagaagaagagacagaggaaaagagaggagggagacggaaagaaga

SEQ ID NO: 543894 - DNA, 934 bp, Homo sapiens
cacagcgtcgcggacgcgtggatgaccactccgtactggacgtgaatgcccgataagctaccatggtgggcccgcccggggaccatgacggtagtatgccatctaacatcatcgatcatatcggggctggccaaggagtacatcagagcccgagaccaagaagcacatcccgtagccgcgagcacaatgagcctgacgggcacggtgcgctacagtgaggcactcaacacgcacctgggccaaaggagcagagccgccgcgacgacctgagaggcgctgggccacgtgtacatgtacttcctgcgcggatgcctcccctggcatggggctcaggggcgacacgctcagggagcggtaccagaagatcgtgggacaccaaagcgccacgcccatcgaggtgctttgcgagagcttcccagaggagatggccacgtacctgcgctatgtgcggcgcctggacttcttcgagaagcccgattatgactaccgtgcggaatgcttcttcaacgactcttcgacgcagtggcttcgtgttcgactatgagtacgactgggccgggaagcccctgccgacccccatcggaacgtccacaccgactgccctcccagctcagtccgggacaaaaccagcgacagaaaaacaaggcgtgaactcaccaacgggagctgatgcggacaccccacggcggcgagccaacgcccgatacaagcgctgcagaggtgagtggcgtgaacaatgcgtggctcaaagggaaagaaatcgtgcgcgacaagtgcctggcgcgggcctgaatttcagggaccttgggggcctgagaggatggcccaaggacggcttgtgacaagaatggcgaggaaggccccgcggaccaagagaacggggcgcacacaaggagaacgcaccgaaaacaacaaaacaacacacagagcacca

SEQ ID NO: 543895 - DNA, 145 bp, Homo sapiens
  misc_feature (15)..(15): n is a, c, g, or t
  misc_feature (101)..(101): n is a, c, g, or t
  misc_feature (115)..(115): n is a, c, g, or t
  misc_feature (143)..(143): n is a, c, g, or t
ctcctgtaccctctntctcggaatctgaagagccagatttaggccgggcaaaggggctcacccctataatcccaggactttgggaggccaaggcaggaggntcacttgagtccanaaattcaagacccgcctgggcatcatantg

SEQ ID NO: 543896 - DNA, 327 bp, Homo sapiens
cacgctgctgctgtgtgtcactctagatgatccccatcaggcgacttacttgggtggatatttaataacggagggcgtggagtaattgactcctggaatgaggaagggagcttacttgcttgggaggagaggagatcttgtagattatgagaactgtggacggtggtattctggctgaaagtaagtttcctgctttctagagctaagctggctaccacttctagtgctttaaagcagtgtggccaccctttgattgtgttatctcagtcgtatagacgaggtaatgctaggtgggtgcaaatggaatgtgatgtgcaggtgtctttc

SEQ ID NO: 543897 - DNA, 870 bp, Homo sapiens
gcttgatgtactttggaagcgaacaggccgcccgccttctgggcagcccctgcttacgggcctctaccatgcctggctggcagcagtggtcatcttgggccgctttctgcagttccatgtcaaccctcggactatcttctccagtcacggcaacttcttcaacatagaattgtgaattcagcctggtggcttggacatgcactttctttagggggcttggtgttgctggtggtgtgcctggctactcggcgcgtggtagtaactggcagacacctgtagccgacgtggtagtaggggcagccgtgtggcggggacgccgtcgtgccttcctgctcatcgaggacctgaactggctcctgaattcgcagcccctgcccaggttctgtgctccacgaggtgctgagcgctcgtatgtgctctggttggcgtgctaccagtggggaggtttactccggtcctcccgatacgttcctgctcaccttttgtgctgctcatggcggggaaccgcgctgtgttgcgcaagtacctggccatggggttctggcggggcccactgcgctggtttcctggtgaacgtctgatgttgcgcctctggaagtcttggtggtctgaccggcactatttgccacaggtcacttcacaggtgttggcccgaagtggaccgttgctggtaactcactatggacgtggagtctaccctgttcaggagccggcaggggtctccccgccaatcagcgggctactgaaataaccttgggcggaaaaataaacaaaaaacaacaaacaaaaaaagcaaacgagatcaaagaacacaagaaaacacaagaacaaatcactcccatcgagaacaaacaaggaacaaaacaacac

SEQ ID NO: 543898 - DNA, 368 bp, Homo sapiens
  misc_feature (216)..(216): n is a, c, g, or t
  misc_feature (219)..(219): n is a, c, g, or t
  misc_feature (223)..(223): n is a, c, g, or t
  misc_feature (303)..(303): n is a, c, g, or t
  misc_feature (310)..(310): n is a, c, g, or t
  misc_feature (313)..(313): n is a, c, g, or t
tgatgagttgcatttgcaaacgctcacacaattcaaacagcgtggcgatagaacgagcatccagtcgcgctgcttcatcgaggaacagcaggcggcaaggagagatatctttaccgcgcaggcgtcgagattcatcttcccagctttgtaccaccatcaccagaatcgacataccggtaccaatcgcctcaccggtcgacaatgcaccagactctncgngcancagccatcggaaccacggttaacctcaacttccatttccagatagttgcggtaatccagcagttcttcaccgatggtctncggcgtncgntgccccattatcaatctgcgggtttaagacgtttgatacagtttttgccagtgct

SEQ ID NO: 543899 - DNA, 403 bp, Homo sapiens
gagtagaacttcagcgataatcccgctctcaaggagcttatggcacagctgggaagaagagaccactttcagcttaaatccttctttcctcacactttgtagttaagtaccagagcactgaagagactacagacccccaacttccagcaacactgtcctatcacactactcagatcactcagccttcagtacccctctgtgtacatttcacagatcaactcctttctcgtctcctcctagtgttataagctttttcttttgtctttgaagaagtgggaattattttcatctctctatttccctccatcaccagggagtatgtcaagagggttaacttaaggagctaacaaaaaaacgtacaagaggataacttctctattgctgttaatgttgggaaagagcc

SEQ ID NO: 543900 - DNA, 178 bp, Homo sapiens
tgcgctggtcttactttctaatactattttgtaaaaggaatgtgagacttggccatagaacagacacacagaccctaaggaaagaatagaaaatctcagcaaataagctacactaccacactaacatctcatttttgacatggctgacgaaagctatacgtgataagaacttcctttt

SEQ ID NO: 543901 - DNA, 88 bp, Homo sapiens
cccccccaaaaaggggggggcaaagggggggttttttttcccctttccaggaaaagggcccttttttttaaaaggtttttttttttta

SEQ ID NO: 543902 - DNA, 209 bp, Homo sapiens
  misc_feature (203)..(203): n is a, c, g, or t
ctttaaactaaaaaaacctttttttggggggaaattttaggcctttaaaaacctgggttttttttttttaaaaaggttaaatattccggaatttggaaaaaggttcgttgaaaggagggcaaaaccggttgaaggggtttcctttgaaaaaatgaaggattttgggccctaaaattttggttttttaaaaaaaaaggtttggnttttga

SEQ ID NO: 543903 - DNA, 268 bp, Homo sapiens
gacccccctgcgacagaacacttgaaaaagggcgactactgttcctggagccgccttttcagcaatcgttctgcttccagatgtaacaggcactcttggtacattatcatagacatccaagatagttattaagactttcgctctgtctcgaagacctggcccatcccgggcttcaacacccagctcataaaaactcgagtcctcatagtctagatttgcagaagttgaaatttctccagtcaaaacattcaaacagaaaatttgtgag

SEQ ID NO: 543904 - DNA, 108 bp, Homo sapiens
taaaaaatgaagtctctacttaggtcagtcaactaagaaaaaaacgcagaacgcatcccaaaacacaggttcaagaaatgttttcagacagattaccgtattcgcata

SEQ ID NO: 543905 - DNA, 112 bp, Homo sapiens
gagcacaagatgtaaacacgactctgccagtttatttcactgaacggcgagggcttgatttatgagcggggcagcggcgaacaaacttcatatagcatacatatacgaagta

SEQ ID NO: 543906 - DNA, 597 bp, Homo sapiens
agatgatagctgacgaacccccagtgcctcgatgcagagaaggtgctttttttgtttataaattttccaacgcagataaggctagaaccttagtcagtgtctttactctgtaatatgcattgtgagccattcgggtagagtctcagtggcacccaggtctgggtcacagaatgtgtctgtctagggaatgtgggttcagtgaaggaccgttggctcaggtggttcggcgaggtgtattgctgtaccagtttcaaaccaggtgactacgtgttaggacgtagcaatctgaagcccttctgaaaggaacatgttttattaaaagtgccttgtaagccaccatgtcaaatctagccaagatgctggtggacaacccattagtcactttattcagagatcagattctaactgcccatagggctgaaatcttgggccagattttcccaggaggagccctcagagaacagtggcccaggtgcccaacaggaccctacacagtcggtttcttcccttgttcggggacagacagagcgatcggcgatagctgttaccatctcacttaaaaatacttgagcaagttatttccctcctcgggagctc

SEQ ID NO: 543907 - DNA, 109 bp, Homo sapiens
acgtctatgagagactaggatgcaccattggctcctggtatgaaatgatgcaggcactcctggtgagcgaaagcccactgacgctccaccgaaacgagtcactggaagt

SEQ ID NO: 543908 - DNA, 367 bp, Homo sapiens
cggaaaaagcatcgaagaaatgtgtaatcaaaaggaaatatgcacgaaatgcaaaccataaaaaggcatgatagaacctgaactcagccagcaagcacatccagacagacctgattagacctaggacgaataactaataccgaccccaatggagcaaacacaggaaaagcgacacgcaacgccaagctccacacatcggaccacagcatgtacacactaaaaacagagccgaacagacaacacaccagaggaattcggacagaagaacgaaaccaacataatcatcaaacaaaaaccataagcgacaacataagggcaaggaacacgaccaaacacacccacaaacaaactcagaaaaaaataagcg

SEQ ID NO: 543909 - DNA, 105 bp, Homo sapiens
agtcttgtctgactgtaaggcgtagaatctgtccgtcgtgccctcctgcacgaagccagctgggcccacctaggcacttgagttgcagctgctttctctcacaca

SEQ ID NO: 543910 - DNA, 251 bp, Homo sapiens
  misc_feature (212)..(212): n is a, c, g, or t
ctaccacacctggctgattttttttgttttagtagagacagggtttcaaccatgttgcccaggttggtctcaaactcctgagctcaggcaatccacccgccttggctcccaaagtgctaggattacaggtgtgagccaccacacccagctattttgtctttcggtttttaattttaaagttggggggggtctcaaatttttaccccgcttgnctcgaactcccgatttaagcgatcccttggtcaaagcaa

SEQ ID NO: 543911 - DNA, 108 bp, Homo sapiens
gtagctatggaccatatgcatagtaccgcgcaaactagctgcgaagtagatgatcaggctaagctgttagatttccgggtattgtgcatccatgtaaagttactgtat

SEQ ID NO: 543912 - DNA, 263 bp, Homo sapiens
atcactctcgcggcgctaatcgcaatgcccccggccgtccctcattcatccatggcccccagttcctgcacacacaccaacacacacatcagcacaccgcggtcctcattcccattcttcctagctgcagtctcccggcggctcgggcctgctttgcaccactctacattttttcaaagtacacgcttcgggccccgcgagcacatcagctcaagcagccatcgcagggggcgccgagaggccaaggggcggggccgggcggt

SEQ ID NO: 543913 - DNA, 569 bp, Homo sapiens
  misc_feature (1)..(1): n is a, c, g, or t
ntatactttttgtcccgagcgcgcctgtgtgtacccggaatcggcttatggcggggggcatggggacccgcggggcgtttgtgaggggccacccgctttgggaaacccccaaaaaatttttttttttgaagaggggaggataccccccccctaaaaaaaatgggcaggggggccaaaaaattttgcggcgcgggtttttccccccttttttttccccgggggtttaaaaaaaaaaataacccctctaaaaccggggggggagaaaaaaaaaaaatttttttacacacccggggggggggggggaaaatttttttgtggggggaaaatttttttttataaaaaaaaggggggggggggggggcccccccccccccaaaaataaaaaaaaagaggggggggggttgtttatataaaaaggaggggggcgcccccccccccccctatttttttattggggggggggggggaggaaaaaaaaaaagagggggggttttgtataaaaaaaaaaaaaaaagagggaggggatatattttccccctcccccccccgcgggggggggggggggggga

SEQ ID NO: 543914 - DNA, 220 bp, Homo sapiens
tcttaacgcccaaactcactctgtgaatgtattctctatgaacagccataacacactccagtgaagggtctctctgaacagatttaacacactccagtgaagggttctctctgaacatgcctaacacactccattgaagggtactctctgaacatgcctaacacactccagtgaaagtgttctctcataatcatgtcctaacacactccagtgaagcgta

SEQ ID NO: 543915 - DNA, 745 bp, Homo sapiens
ggagacctggagcaggcacgcgcgtaattcatggtgtcagtaattaacactgtggtagtacctcctcatgatggacatgattcacgacagcccagatggactactatgggcacccgcctgggaatctgctcatcagatcaggtccgtcgaaacatctttgactgtgtcgcaatggagtggcagatccttatcgccagaccatcaggggtcatgacgggtcctgtgtggcataggtggcctgggcatcaccccatgtgcggctacatcctggcattgtgctcctatgagcggaaagtcattatctggagagaggtaaaactggcaccctgggagaagagccatcgagcatgcggatagactgaattctctcatgtgaactcgtgtgtgcctgggcctcccatgtactgactggcctgatcctggcctgtgtgagctcggatggggccatctccctgttgacttacaccggggaaggccaatgggaagtaaagaagatcagcaatgctcacaccagttgggtgcaatgccgtcagtctggtgaccctgctgttggtacgcgtggaagcctcatagaccacccatcggggcagaaacccaattacatcaagaggtttgcatcaggtgggctgtgacaacctcatcaagctgtggaaggaggagaaggacggcccagtggaaggaggaagcaagaagctaaaaagcgcaccaagtgactgggttcgcgaatgttggcctgggcccctcg

SEQ ID NO: 543916 - DNA, 252 bp, Homo sapiens
tggacaaaactggacacttcctaaacacaaaactttttgacaatactgtggatgctgaccggagcttgtgaagaaatgacatcaagtcactcaccttcccaagaggaggttaaaaaatgaaccttggggagccaggtgtgttggttcacacctgttgtaatcccatgcactttgggagggtgaggcaggagcactgctcgtgcacaggatgggcaacatagcgagcccttgtctatatttacaaaaaaaaaa

SEQ ID NO: 543917 - DNA, 1178 bp, Homo sapiens
  misc_feature (228)..(228): n is a, c, g, or t
  misc_feature (280)..(280): n is a, c, g, or t
  misc_feature (293)..(293): n is a, c, g, or t
  misc_feature (295)..(295): n is a, c, g, or t
  misc_feature (322)..(322): n is a, c, g, or t
  misc_feature (334)..(334): n is a, c, g, or t
  misc_feature (423)..(423): n is a, c, g, or t
  misc_feature (429)..(429): n is a, c, g, or t
  misc_feature (432)..(432): n is a, c, g, or t
  misc_feature (434)..(435): n is a, c, g, or t
  misc_feature (440)..(441): n is a, c, g, or t
  misc_feature (444)..(444): n is a, c, g, or t
ataaccatgcacactactataaccaccctaaccctgacttccctaattccccccatccttaccaccctcgttaaccctaacaaaaaaaactcatacccccattatgtaaaatccattgtcgcatccacctttattatcagtctcttccccacaacaatattcatgtgcctagaccaagaagttattatctcgaacttgacactgagccacaacccaaacaacccagcntctccctaagcttcaaactagactacttctccataatattcatcccctgtangcaattgttcgantnacatggtccatcatagaattctcactngtgatatataanactcagacccaaacattaatcagttcttcaaatatctactcatcttcctaattaccatactaatcttagatataccgataacaaacctnttccanctntnnatggnntgngcagggcgtacggccatccatatcctaactatgcatcatccagtatgatgataacgcccagaggcagatgccaaacacagcagaccatatcaagcaatcctatacaagccgtatcggcgatatcggcttcatcctcgccttagcatgatagatcctacactaccaactcatgaggacccagaacacaatagccacttctacaagctaatccaaaggctcagcccactactaggactcctcctagcagcagcaggcatatcaggccaataaggtcatcgacaactgactcaccatcaggacatagaagagacacatcacagtcatcagccctacttccacgtaaggcactatcagacgcaggagaggcgcgacttaccgcatgcgatacagcccgtagcacgaacaatcgcccttactgcgacacccgcaacaagcacaagagcatgacactagtacggaaagcggacccctgacacaggactgacacacacggcgaacgcgtgctagacacgatagaagaagacgcaccggatagcacacgcagcaaggacgggaaaacgacacaggcacataaagaccagaacggagacggggagccagaacagcgacgagcacaactacaaaggcgagccagcacagcacactcaacacggcacaggacacaccggacagcaagagagcacaacaaggaaacgacgcgcagcagcgagcgcgtaatcggaagagcgcgcaaa

SEQ ID NO: 543918 - DNA, 716 bp, Homo sapiens
cccgggggaaccatttctgcgtcccatcgcgcgggggagttttctgtggcccccttgggcagaaaattctcggggacgattccttccaactgttgggcgtgcatctatcgctccgcacgtccccccacgggcacgtttgcccgcagttggaccaccagcccccccagggggcttttcctcatattccccggcagccccgcctgcggcggatgtttctcccccgtggaactagtgaccgacccaatgttctctcgccacaggcacttcaaaaagacccgccggatcgtgggtgtctcctcctgcgggaaccacacgccgtcctcgcccgaagctggggcgagcaggccaccaaacgagtgagagagtaaagagagagtcctcacacacgaattcgagggacgaatacggagcaccacctcccgcgcttcttcccacaactacgcgcgcggcgcgccacccgccacaatcgacgtgttgcccgcaccgggctaccccgcgccccactccccggtcacttcggatgagtagcgccgcgcagagggcagcgcagactgccactggggggcagcaatgtggaggccgccccgcaccacgcggacacatacatgtgtgcagagccacgctggaggtgtcaccacgctgctaacatcgcgtcacgcgcactcactaaacaatgtcgcggtgggagcgaggcccgcccacaacaaatgaacaaa

SEQ ID NO: 543919 - DNA, 800 bp, Homo sapiens
gataaataaaagcttcccaaacgtagatctgggtgaggttatgcagctgtttttggtaccattttaatttttgcaacttacttgtaagttggtagctgtttccaaataaaaagtttacaaaaaggaaggaataaatttgtcatatttttctgtttaaatcataaacctttaacttctagaaaagaagcttttttttaacttttattcagtaattatacttcttctagaaatttgtattggaataatcagtgatagtcacaaacacacactatatacatgaatatatgaatagtcatcactgtcttatcacaataaaaaatttaaacaacctaaatattaagcaaaagcagaattgttaaataaacatattcatatgtctgatattttttaacatttacataatatataccaaacatagattcacccacagcataagaatatggttatcactgggtgataatgagtggtttcagttctctttaccatgtattttaaatatactgtaagttatctctgattcacccacaacataagatggttatcactgggcattaatgagtggtttcagttctctttaccatatgttttaaatataagttatctgtagtggtaaatatttatttcataattgggtacaaagaaataataaggaatacttagaagataagtttaagtttacttttctgaaatttactaattaaccatctcccaggtaaaatttgacttgataatttagtgagagtgtctcatgaaataattttagagagtgattagtacaaaacttatttgaaagaaaaaaa

SEQ ID NO: 543920 - DNA, 346 bp, Homo sapiens
tggaaacagagtctcgctcggtcacccaggagggggtgcaaggacacaacctgggtttacggcaacatcggcctccggggttcaagtgattctccggcctcagcctcccaagtagcggggataacgggtacccgccaccacaccaagctaatttgggtattttaagtagagagggggtttggccaggtgggccaggcgggtctcaaactcttgacctcaggtgatcggccggcctgggccacccaaggggctggggatcacgggcatgagccaccaggcccagctagggcataacctttggatggtactcatggaccaaggttcggaggggaagcccttggggggg

SEQ ID NO: 543921 - DNA, 1291 bp, Homo sapiens
atcctctgttgtttgcccatagtttggggacaattttatactgtaggggcggacacatttacctttcacgccccttggttgatatctcgggctttctccccacagttagtatttttctttgttctcacaccttttaatatttgttccccccccctggaccccccttgtttaatccccccttgggtgaatttgtagaccttggtttggttcccacaagggggggtacaacgccttctttgggcacaacgacatggggtaaacaaccccttgttaagagagatgaatgtttaaacaatggtttaacaaaccgcccgtgtggttgtgccccgttatatagcctcgccctccccccttgtttagtgatatgcgctgttcaaaaagcgttttaacaacaatgtctacgttccccctttgtataattttcccccccatccctcgttattgttccttgggaaacgttcccctgcaaacaagaccccaccaaattgtgggggacaccacatttgttgttcacccccccctctttatgagaaggagattctaatattgtttatggtaaataataagtatagacccttgtgaaacaactgtgtcttcctcccgcgactttaaagacccttgcgttccacgatgtttaaaacaccttgagaattcgaccccacttttttaacacggccccaacatatgtttaccacatatccacacctcacacaaaatgtcactttatgtttagacctctcccacacgtgtgtcacacacccccaaacaccacgggcacacgttctctcaataagggagaacggggttttatataaaatattattaaaaaggggacatttcggcgccataatttcttatacccccgccccgtcgtgtgttatacccacaagaacactccacacctctctcaggacactttcaccccacgctattatagaggggccccccgccctggcgcccagtgagcaaacatagagtttaaccggccccccggtgacaccctaacccgggccaaagagtgtagcgataaataccacctgtgtgcccctaaatatagggcacaccgtgatagaataggcgtccccggagggtgtctaacatgttttttacacttttaacccaatggaattgacacctgccccgtgaaagaggccgggccactgacccacgccagaccgaaggagacccctattggagggctttaaatttatattaaagccaacacccggaccctcacccaaccccccggtccttaactacccaacccgccatttaaaatttcgggttggga

SEQ ID NO: 543922 - DNA, 916 bp, Homo sapiens
  misc_feature (12)..(12): n is a, c, g, or t
  misc_feature (80)..(80): n is a, c, g, or t
  misc_feature (107)..(107): n is a, c, g, or t
  misc_feature (116)..(116): n is a, c, g, or t
  misc_feature (122)..(125): n is a, c, g, or t
  misc_feature (127)..(127): n is a, c, g, or t
  misc_feature (134)..(134): n is a, c, g, or t
  misc_feature (172)..(172): n is a, c, g, or t
  misc_feature (176)..(176): n is a, c, g, or t
  misc_feature (211)..(211): n is a, c, g, or t
  misc_feature (229)..(230): n is a, c, g, or t
  misc_feature (261)..(261): n is a, c, g, or t
  misc_feature (277)..(277): n is a, c, g, or t
  misc_feature (282)..(282): n is a, c, g, or t
  misc_feature (285)..(285): n is a, c, g, or t
  misc_feature (287)..(288): n is a, c, g, or t
  misc_feature (296)..(296): n is a, c, g, or t
  misc_feature (305)..(305): n is a, c, g, or t
  misc_feature (307)..(307): n is a, c, g, or t
  misc_feature (311)..(311): n is a, c, g, or t
  misc_feature (323)..(323): n is a, c, g, or t
  misc_feature (335)..(335): n is a, c, g, or t
  misc_feature (366)..(366): n is a, c, g, or t
  misc_feature (370)..(370): n is a, c, g, or t
  misc_feature (383)..(383): n is a, c, g, or t
  misc_feature (385)..(386): n is a, c, g, or t
  misc_feature (402)..(404): n is a, c, g, or t
  misc_feature (406)..(406): n is a, c, g, or t
  misc_feature (427)..(427): n is a, c, g, or t
  misc_feature (431)..(431): n is a, c, g, or t
  misc_feature (447)..(447): n is a, c, g, or t
  misc_feature (453)..(453): n is a, c, g, or t
  misc_feature (462)..(462): n is a, c, g, or t
  misc_feature (473)..(474): n is a, c, g, or t
  misc_feature (479)..(479): n is a, c, g, or t
  misc_feature (517)..(517): n is a, c, g, or t
  misc_feature (530)..(530): n is a, c, g, or t
  misc_feature (876)..(876): n is a, c, g, or t
tggaagaatatntagaaataaaatttaaaataaattttgctttcacagacagaaatatgtcatgctactatctgaaaacngtaagttaacttactctaaggcaaaancatggagtnattttnnnntnattttanaagcaccattaacacagacttttacatagaaatttgtntgancctatctgacaaacctaaacaaattacaataaaanatatcagcttagtaaagnnccatcattttatacatcagtcatgttaaagngcagagaggcatttgncttanggntnntgccaganatatttttntnatgngatccattagantcatcataattnatagtgtgttagagagggaagcatcaggggntaancacaacagaattngnngttaagtgtccaaatnnngntcagtgaatacatgagttganacanaacggtacagagaccnattatnccaccaagngcatcattttnngtgtnctttgtagctgactacaagagtgaggagtaccattttnttcaatagaagtngggggagctgagcgagcaagggactagctagtagctgtactgggcgagatcacatggttgacttgcacggtaagatcacaaccaccccactgcacattaagccctgcataagccaaggaaagaaaagaaaaaggaggctgcttcaggtgttcattagccaatgacttcagtccctgaatcaaggttactggttatgtaaatccaatatgacacaagtctttccctgaaccccttcattctgtgacgtaccatcaacaccatctgcggtttcgctttcttcttcttcttcttctagcatttcaaaaggagtcattatatcatagagaaatgagagggaacataaaancaatctgacctttctctgctaaaaaattaaggattcctca

SEQ ID NO: 543923 - DNA, 337 bp, Homo sapiens
  misc_feature (13)..(13): n is a, c, g, or t
  misc_feature (51)..(51): n is a, c, g, or t
  misc_feature (80)..(80): n is a, c, g, or t
  misc_feature (152)..(152): n is a, c, g, or t
  misc_feature (193)..(193): n is a, c, g, or t
aaattgcattcanatgtattttacactttaggcagttcttaaaaaaggganaatgcagtttcttgaccttaacatttaanggttttattgggccacattaatcttcctcacaaaagttttaagttatctataagttcttaaaaatgtcaaanaaaaaaaaaaaaaactgactaaggggcggtggaaacaacancaacttggcaataattctgcaaccgactttgcgtgttcaggcatcctttttctccagtaaaattttgtgcaactcgtctgcatcctcgctggttttacccgaaatcaacatggtgactgggcatggtgggcattcttctcgtca

SEQ ID NO: 543924 - DNA, 456 bp, Homo sapiens
  misc_feature (39)..(39): n is a, c, g, or t
  misc_feature (77)..(77): n is a, c, g, or t
cggccacgcttataggtgttggatcttaaactgctgagnacaacggatctccaaatgtgggaaactttttgacatgntctagaaacagattcactgctgaatagggattttagagctgtgagcaaagtgtataccgtttaatacacatccccttcttttatatttgagagaactgtggccagagaggtaagttgccttgttcagcctcgttaagcttaagcttaacgaggcctatggcacagcaacgtgggctctgatccaagacctaccccacagctcacagcaacaccagatcattaacccactgagcagagctgggaatcgaacccctgtcgtcttgtatactagttgggtttgttactgctgagccataacgggaactcttaacattaaaaatgtttttctatctagaatttatttttatttatgacaggcgcaatctaagtcttttttttt

SEQ ID NO: 543925 - DNA, 581 bp, Homo sapiens
gaggatccctgcgggtctcttcgacctcaagtgatctgcccacctcggctcccaaagtgctgggattaaatgtgtgagccaccatgcctgtctcagtagattcttatatggtcttttcttctttaacctcttagattaaacatgaatttaagttggagcccaagacaaaagagaaagggaaaaaaaatgttgggatgtgggtggctaaagaagggaggtgaacatctttttcgaaggtgtacttaccttcaggtgtcacagaaacaaacataaatggcattagttaagccattaaatatgaatatttattaagctaggccctattccaagcacggtaatataacagcaaacaaaatagctcttatgaaactcttattttagtggggaagaaggtgacaataaacaagatagataagtagaatatatgatatattagaaatgagtgcttgggaaaaaaataacggagaaaggggggtggggaaagtagttgaatttcagataatatactaaggaaatcctcactaagaaaacatttgagtgaagacctgaaagacatgttgtgtgtgagtcatgcacttatc

SEQ ID NO: 543926 - DNA, 298 bp, Homo sapiens
  misc_feature (288)..(288): n is a, c, g, or t
attattattgtaaaacctaacatgggtgtttgaggtatttttcagaccctgccttctgatggatcagctggcaccacccagaccagtaaactggctcatctggtcttctggcccccaccccaggaaccaactcagtgcaagaggatagcttcaactccttatgatttcatccccgacccaaccaatcagcattcccgcttcccgagccccctgcccgccaaactacctttaaaaaaccctagcctccaaattttcagggaggctgatttgagtaataataaaaccccngtctcctgtt

SEQ ID NO: 543927 - DNA, 133 bp, Homo sapiens
tcttataattatagcagagatgatatcagagcagacgcacattttggttcttggtgtagctgcacttaggagtcatgactagaaatataagcaatatgatacgctcacagctctggaatgtaagggtgtatag

SEQ ID NO: 543928 - DNA, 894 bp, Homo sapiens
  misc_feature (210)..(210): n is a, c, g, or t
aacattttaatttttgaataggcaatgccttcatatgatacaaaacccaaaacctaaataagtttgcagtgaaatctctctcctatccctgtctactgctagatggatagaatcttgagttggaagtaggaggcaggcaaaggtaaggtaaggctgtaagtcaccccagctcatttacgaggatctcaggaccctgtatgcatagaaatngtggttcaggtaagaggctccgcccgcagtactgggtatctggttacaggcgtagtctctgagaactcccccgaatctagtctctccactctctggcccccgtacctttccgtctcaaactcttggtcaggacctcgagctccatgtgtaattttcctccaggaggccgagccggcgtcgttgcagggtcaagagctggtcaatgttgtgcaagtgactacgcagagcgtgggcatactgctcctcagcttcagtcaagtccttagccagagactgggcagggggaagagaatgactgtgccggccacgtagcatccgtgagaggctggggagatggggcagccaggtcctcagcaccaccctgtactctcaggtttgagggaagtggagatgggaggggtgctaggtctagctgactagcacgtcagttgatccccagttggtgaactgaaacctccgggctccaaaaatctcagggggcaggcagggaggaggacaccccccgggccaacaacgcacacagagcggatccacccgagagaagaagatggggttgggcaccaaatatccaaggggtggaaaccgccccctaggtgaaacagagaaaggcggaggtgtcaaaagaagagcccggaagcaactcccatgctataaaaaagggggggacaaaaggtcaaggtcaac

SEQ ID NO: 543929 - DNA, 475 bp, Homo sapiens
taagcagtggccttgtttttctgtgctgtagcgtggcacccctgtgtgtgtacaccacagagaaggggtcccaatctccacttttatgcccggaagcttcccagcctcaggagttggaaaggagctggaagtgtaactgagtaggaactgagcaccaactcatatatcccccgcaatcccctcctcactatccaggctgggcccaaatgccttcctgtgctgcacagggactctccatacctactactcttagaaaataaggtaagagtaaagggacgactggacagaactgggaatgtggccacagaaaagtccccttgcacttttagactgtaaggtaaaaagcaggggtcagagagtaaccgtcactgagggaaaggaccttaacagagctggatcgatgacatgagtactcaagcagggtcaggaagtataaacgtataggtgtttagaagtaaggaacttcagcgaaaag

SEQ ID NO: 543930 - DNA, 796 bp, Homo sapiens
gcaaaagcccacagggcaatgacccattgctttcttacgtgttttccctgagcaaatgagcgctccaggctgtcgtgaatccacgttccctgtcccatcctctgacggagggtcgtggctgtggccctcatgggtccccggcccgacccagccacagcgccctcctgtattcccgcaccggcaggtcatcgggagagtttgaatccagagccatattccctagtacctccgactgtctcccaccaggaatgcagaaatcaggtgtgttgtctattgtatttctctatgtacgtatttgtatttctcgcggcgtgcatagattttcctcgtgtatgctagttggcatgccgcgcgttttgccccatccgcgtgacaaggtgtgtgtgagcgtgtatcgtgtgtggctgcgtgtgtggcgatttatgtcctcgtggttgcctttgtaacctgctctgttctcagcccagcttgggttaccaactgggggcacctgggactgacaggaggcatctcggggcatgcgggcagatggccacgggatgggtcaggtgcggacccttgactgtgcaaccctctgactctcttggggggacgaccgtgtaacgatgaaacgtcgcgtcaagtttatttgctttcagtgcatctcctaggaaaagcaagtgtatcggagcatgggggtggtgatgagtgggcccgtgggcgaaaggattcaacgagtgcaaatcccagaccagggcagtgtgacaacagccgttgagcatctcacctgtgtcaaaacaagacaaagacggaacag

SEQ ID NO: 543931 - DNA, 176 bp, Homo sapiens
ggtatttctggcaagccatcacttccacctataccttaaaattagggtcaattggcccaagattaggtactaattctagggtagggatcatcatccccataccagcaataccccccccgccagataaatgccatgcagctacttcatattcaatccacagtccttccaatatcaaa

SEQ ID NO: 543932 - DNA, 344 bp, Homo sapiens
ccaatccttgccattgtccatgccatagcaggctccctcaatctgggctcattgtgccttctactggaaggattgtgtcattacaccactagcgttggtagtcattattgattgattctctgggttattgagtcaagccttttcaagtagaagtttctacctgaatgcatgaatggtgttccactgggtaatcaaagaggttgtccaagagcagtggatgcctgtcatgattataaagtggatatagctttctacaacagcctctggatacttaccttatttcctaccatgtggatgaagagactccgcgtcgacgcggccgcgaatttagtagtagtaggcgg

SEQ ID NO: 543933 - DNA, 134 bp, Homo sapiens
tctgatgtggttaggacttcccagcattatttttttaagatctggtccctcggggccagggcctcagggtatgggtcgggctggaccgggtctccgggtacatcttcccagtttggggtgactcccttcagttt

SEQ ID NO: 543934 - DNA, 682 bp, Homo sapiens
acaggcaccctggatcccccatgagagtagattggtgtgctcagtgcctgcttggctgactcagagtgtagtggcagtgggctctgcagtgccacctggctggggttggtgggggtcctctctcctgccccagctttccacatcagccaccacatgttgccacaccatggtggtggatgactgtggtgtcaccactgggcttgtggatgcaatgctgccttcttgcagcacagtgaagccgaagctgtgggtcagtgtgatgtgtctgctaccccttgaacgtgttcctccggtgatctacaaccgcatggaccctcgggcccataacccctagtgcctggcaaggtgcccctttggccgatgaggaacttcttgatgtgcgcaaatctcatccacgatggctgcctgctctggaaagacatgctgactggggcgcttcaacatgttgtgcttagtgcttgcctgattgacacgatgtactggtgtttctccaggaaataggacctgtaagtacatcttttcctacccttgtgatcaatgcctttcagtggtatcgcttgcagaaatctaatcgtacgatgacattgccaaccaggagaaacgggatgtctctgatcagcgcagtcccagctgagatgtcgaagtgccacagtatcccgggatgacctggagccctggatcg

SEQ ID NO: 543935 - DNA, 457 bp, Homo sapiens
ggagaaaatatttgcaaactacccatctgacaagggattaacaaccagaatattaggaaaaggtgtagtaatcaaaattaaaaatgggcaaaagatttgaacagacatttctcgaaaggcaacatacagatggcaaacaggcatatcaaaaagtgttcatcaatgatcatcagagaaatgcaaatcaaaactacagtgagatattacctcactgcagttataatcgcttatatctaaaaggcagtaacaaacgctggcaaggatgtggagaaaagggaacccttgaacactgttggtgagaatgtatattagtacaaccactatggagaacagtttggcagttcctcaaaaataaaaattgagctaccacatgatccagcaatcccactgctggtatctacccaaaagaagggcactcaggatcttgaagagatattgcaatcctgtgttgttgcag

SEQ ID NO: 543936 - DNA, 332 bp, Homo sapiens
  misc_feature (3)..(3): n is a, c, g, or t
canagtgaagaaccgcttccagacagtgcatttctttcgagatgtcctggggatgcaggttctccgccatgaggaatttgaagaaggctgcaaactgcatgcaatgggccttatgatgggaagtggagtaaaacaatggtgggatttgggcccgaggatgatcattttgttgcagaattgacatacaattatggcatcggagactacaagcttggcaatgacttcatgggaatcacgcttgcttctagccaagctgtcagcaatgccagggaagctggaagtggccactgagttaaagttgcagaaggggattttttgaaactggaagcccc

SEQ ID NO: 543937 - DNA, 106 bp, Homo sapiens
ccttgcagtcgacaagacaggcaggattcttgcttgccatggaactgactctgtgctagaattgtttagtatcctttccaaaaaggaaattcagaagaaaatggat

SEQ ID NO: 543938 - DNA, 735 bp, Homo sapiens
  misc_feature (76)..(76): n is a, c, g, or t
  misc_feature (127)..(127): n is a, c, g, or t
  misc_feature (266)..(266): n is a, c, g, or t
ggacactagcagcattcttgagagacagagaaaaatgggctcttagctagtgcactccacagagatatagatagtngtctacacgtacaaagaataaacagagcatcaaaactgcaataagcttatngaatgtgtacgttcaaagtaagcatagtaagtgagtctagacataggaagataatgcttaacaaggtagaaggtttcattaacatattgacttttacaatagcttacagggcagtaatgcctgtgtatagagacatgtnatttaaactaaattctgaattttaagatgatacgtgtgacacctgagtctgcagaatatagccatatagatgcatgtgtactttctaaaatcacgaaagatgtacgctatgcataagaaacactttctagaggtatcatagggtagccgtaatgtcgtttcaccatgacatgtagtggctactctaagccacagatatataagtaaaaatagagagaactttctcccaaatggtaagagagtataacttgtttcctagcaactggtgttgtaaagataaactacacgatacacagccacactattcacacatacacacgcaatcaacccagtctgcacactgggcgagcgtcctaacaaaatggttgcaaagccacccgtagtcctatagtgttcaccgaaaccctaaaggactcatgagaatacctacccccaaggggaatgtagaccccatgcccacaggcacctgg

SEQ ID NO: 543939 - DNA, 494 bp, Homo sapiens
gtgcctactccagaatgactacgtccacagagactatcaattcacatgaagcagcagctgcaactctaactatacatctccaagagggactgggcacaaagcacaagcctaactatgctcaagcaaaatcatcccgcaacaccacatgaccctaaagtatcactagtgggcatagccaaataatttctcgtgaatgtgcctcaacaaagcacaacccttaacttatggcgggaagagacaaccacaatgtgtaaagactccattaccttcggtggcaaatgtgctggaaagtaaagtgcttcatttctcttatggctcaatgtggtggccatgcgggcggtctgagggtctgcatgtcctgaaagtaatgaaagcactcctccctgatgtacagtggggaaaatatgtccatatctaaccagtgatccgagctatattgaagtattcaggacagccagtcttaacatttctaactctgatgtaaatgacgtaac

SEQ ID NO: 543940 - DNA, 438 bp, Homo sapiens
  misc_feature (66)..(66): n is a, c, g, or t
  misc_feature (132)..(132): n is a, c, g, or t
atcaaacacccctgtttcccttcgagccaataccttcatggagggttagctacaaccaaggtattncctggctaaggggaacatccctgccgaaagcttacaccttcttcattgacatcctgctggataccnatccagggatgaaatcgcaggatgcattgagaaggcctatgagaaaatcctttttgctgaggctacccggatcctcttcttcagcacacccaaaaagatgacagactatgccaagaagcgaggttgggtgctgggccctaacaactactacagctttgccagccagcagcagaagccagaagacagcaccatcccctctactgaactggccaaacaagtcatcgagtatgcccggcagctggagatgattgtctgaggcttgaccagggcggtggatatggctagtccaacaaacccagtataggc

SEQ ID NO: 543941 - DNA, 292 bp, Homo sapiens
ccccccccccccctgggcccccggggggcccggggggggttgggggccccctgcccaaaaaccttgtgggggggggctataaaaagcgggggcccaaaaaaaaacgggccaaaaagggggcgccccgggggggggggggggtttttttcccccttccccggggccccccccttttcggtccccccccccccaaattttgttttaaggttttttaaattagggggggggggggggggggcccggggggcccggggcccgggttttttttttttaaataaggtggggaacccca

SEQ ID NO: 543942 - DNA, 951 bp, Homo sapiens
gccgtgattcgcggcttctggtacatgcatgggctgactgaacaatgccgcgctcgatcttctactccattggttggcatgattgcatttggatgattgtgcaagcagcggattactcgattcctggtgtgacacagatagtgtacaataccacttgaagttgccgtgatcatagagtttcaggaccggtgtatggtagttggatcccagtgactctagtggattctcgtacctttcgctatcatgtagatgtcaggattattctgaagcttatgggttcagtatggtgcggaatggttgcaacaattcttgcttgtgcatctctcctagtcgattagagtactactgagcctattgttgggcagtgtctcgtaatgctgtgtctggttgaacttcgtattgagactagactgatccatgagtcacattcgggtgccacgttaatgtcgctagtgactactaagccaccacatattgacgggagtcctattccaagactaaggatcgtgtccagtgcagatagccttgtgggtagctcttgaactccggttccctttctcagaaaagtgtacctcacttacttttgcaacatgtcccctacactgttgacgtcgttggggaagcagacatggtatgtcactcaattgttctaattagcctccaaggatttcacagcacttctaaaaatggtgcatcacgcgctactaccactgcaacttcttacaaacatgattttaaccctactggacatgttgttgaaccgagagctctgatgaaccctgtggccactcgccttccaaggaacctgcacaccattccgtctgcatctgcatgcatctaaatgactggactgggctaagtggattgcacagctctcgtatgatccggacccttgtccggctcctcgggtcccatgcaaaaggatctcataacacctcgggtgcaaacagg

SEQ ID NO: 543943 - DNA, 302 bp, Homo sapiens
acagactataaaacatcagatatcatggatgaatatttaaaggtatcttactagatacactagatagacaggttcgctataaagtaatagaagattaatagtggtgcctagctgccctctgaatacaggaatcacaaacctactacacacgtccctgcaccgaagagcctcgaatacagctgcaaaaaggggaatacattatagccacaagaggtatacgatactggttatatggagacaaaattcttgatgataccttaatagaaggtgtgtcaagaatccggggttggttccctagaaaa

SEQ ID NO: 543944 - DNA, 261 bp, Homo sapiens
tgcatctctcattcccctatggacacctcagcttgggattaatgcaggacctccagcagaaggttgtctaccatgagatacatggcggtggagtacaatgtgtccttcccccacgcagcaaagaggacatactcggctcagaatgcatcccttcgagatctccaagcacccatggggcagagcattcagtagcagaaaatcgagcatcattcattaaccagcggtccacctcgacctgctctccctgaggctccaggctgc

SEQ ID NO: 543945 - DNA, 487 bp, Homo sapiens
gggatgccggctgtggacgctgtgaatcgtgtgactggcccggttctaccggcttgctccccatccccctactttcctccctccctccctttccctccctcgtcgatgtgcttgctgtggtcagcagaactcacatgactcaccttcgaacgtcttccgcaatgcgcctagtgctcgggggaccagcggaaattgcaccctggacgtttttctctgattgagtgcaagtcccacgtcttatgtgtcaggggagggcgagcacatgagaagcaagagcgcggatttgcggtgtagcatgtatacgagagaaaatgagcacagatatgaagctcttcattctcgcccatgatttcggatctgaatggggtttagaaagaacgcccattggtggatagaaacactaggaagtctgggggtttagtggtggcttcttgggtaattattgcggaaaacagatgggattgatgcggggcctgtgatactgata

SEQ ID NO: 543946 - DNA, 170 bp, Homo sapiens
acgatattctggcagatggaaaggctggggagatggaaactactctgggaacaataacaacaacagcaacaacgattttcaaaaaagaaacctgggaagaggagtgggacccagagtacacacccacaaatgcaagaagtattacttgcatgattgaccgaatatctgtg

SEQ ID NO: 543947 - DNA, 633 bp, Homo sapiens
  misc_feature (79)..(79): n is a, c, g, or t
  misc_feature (198)..(198): n is a, c, g, or t
  misc_feature (228)..(228): n is a, c, g, or t
gccgccctgacccacccttcccgatgcagtccctgatgcaggctcccctcctgatcgccctgggcttgcttctcgcggnccctgcgcaagcccacctgaaaaagccatcccagctcagtagcttttcctgggataactgtgatgaagggaaggaccctgcggtgatcagaagcctgactctggagcctgaccccatcntcgttcctggaaatgtgaccctcagtgtcntgggcatgcaccagtgtccccctgatttctcctctgaaggtggatttagttttgggagaaggaggtggctggcctctggatcagaggatcccatgcgcagactacattgcgtcagctagtacctttgagcacttctgtagatgtgctctgacgatgttacttcctactgtgaggatgccctgaccagatgccctcgtgcgtacctagtgcggcttcctttgtccactgattcctttcaaatgaaggaaccgtactcactgaccaaggagcgaattcgttgtgcctgacctggacgctgcccagttgtgctcacaccgggaactaccgcatagagagacgtcctgagcatgcagtgggaagcgtctgggctgcatcaagatctctgcctctctatagggccatata

SEQ ID NO: 543948 - DNA, 430 bp, Homo sapiens
gctgggccggcgcctgggcggggaacgggttcgcgaccgcagccgagagacccctgggcgaccggcacctccgagactcgcagggccacctgcctcgaccttccccggagctgcccccgcctccgagtcagatacttgccggggccgggcacgggccgggccgtgaatgctgccggagaggaccccatgtcctggccacatggccagccagactgactgccgcacgatgagacccacagaagacccccaccagtgaacgccagcaagccacaatggaagaagccggaccccagtgcagagacgcatggggggcaggcgcgcaaagacgccaagcagtgtggatcgagcaaggaagcagagcgcaaaaagacgaagacacttacgccagaaagggtgaacacgtatcagggaaagaagaagacaacaaaaa

SEQ ID NO: 543949 - DNA, 447 bp, Homo sapiens
tctaagagaaagaaagaacagggagctccagagatcgctgtaggaacaagactctatctgtttgggcattatatacagttaagtgcgttcagtgtctgatccagtgtctgatgtaagcccacgttctcttctttggcctgggcaagtttctcttccaggtcatcaatggtcttttccagtttagcaaccgtcctctctgcaaattcagcacgggtctcagcctctttcagtttgtcagacagaagtttaatttcttcttcatatttgtcctcctttacagaatacttttcagatgcagcctccagagatttcagattgttagtaacattcttgagttcttcttccaggtcaccacattttagttcagacacctccgaacgctcctctgccctctccagctcaccctccaggatgaccagcttacgagctacctcctcgtatttgcgg

SEQ ID NO: 543950 - DNA, 131 bp, Homo sapiens
agccgtaagcctcactccaatgtgctgagaaagtgcagcgtgccaaagcggccagcctcagcctctgtcttgtgttctctcgttctttccagagacaaggcagacagaacgcagaccggccatgtgctggg

SEQ ID NO: 543951 - DNA, 249 bp, Homo sapiens
gattgccttaacgaatgctgttggatcgtgtgtaaatccaaagtcaagccccatgacgtgtcgtccttgtatcttgcgataatcaaagtcttccatctcgaacagtccttaaaataccagaccttcagctactccccactcgccgtctacgaaactcttgcacgtgtagggttacgcactttcatttctagtagcgcttcaatataaccagcgtccaagtagtcattgtcctcatatgtcgttgtacgt

SEQ ID NO: 543952 - DNA, 310 bp, Homo sapiens
gagactatgcatataatgctttctccattgggcacagatttgaaatgtatgcttttatttattattatagaatgtagacataatgcagcagccacactcggggcaggggaaggttggtaggtaagctgtaacagattgctccagttgccttaaactatgcacatcgctaagtaacctaacttcttgttttgatttgaaaaaagtgcattgttttcttgtccctccctttcatgaaacgttaccctttgacgggccttttgatgtgaacagatattttctaggacatactataaggactaatttttaactt

SEQ ID NO: 543953 - DNA, 191 bp, Homo sapiens
gagggggtaatgggcaggtcccccacagagggtcccacaagacaacactgacatcaacaatgaaaagttgcaaatcaggcagaaatggggacgtcattccaaggtccttatatacagacactgcatgaccagcagggaatgggggcccagatgggactaggcgtgggcatgtggctgtcgggcagtcgggg

SEQ ID NO: 543954 - DNA, 141 bp, Homo sapiens
cgcagataaggccgcaagaatctggctgaccaggctgaggccgcagggtctaagaccaaggaagcacgcaaggcgccggtgaagagcgcctccaggccaagaaggagtgagattcatcaaggaactttatccaagggagga

SEQ ID NO: 543955 - DNA, 168 bp, Homo sapiens
tgggtgtaggattgggagaggatggggcatatctccgtaagagagaagtggggtggcttttaggatggcaagggacttcctgtaacaatgcatctcatattatggaatgactattaaaaaaacaagaatgtgcaatcaaagtactcggccacattgtgaagtttgggg

SEQ ID NO: 543956 - DNA, 626 bp, Homo sapiens
  misc_feature (265)..(265): n is a, c, g, or t
  misc_feature (540)..(540): n is a, c, g, or t
tgtattttacgagtttaggggttcatcggttagccaggatggctcgatctctgacctcggatctgcccgctcggcctccaaaggctgagattacaggggtgagccaccggccttctattagcttttataatggagaggtaactgtcctagaaagtccatgtaattccgttcagataatgaacaatacttattctatgaagacattatatttcctggactgacctttcacatctttccctatgtgaatgggtccctgagaactttntctgctgctggcacttattggaggtaagtctaacaatgagatgataccaaacttatactagactactgacgatattctattttcctaatggatccaatgcttattcagaatatatctatagtttaaatttcatgtttaaaagtattgcattagctgtgaatttctgctgcaagaccttgcatatgaccacgacagatcacagctaggcttttaaatttgattaatctgtattcacacacattataatactgtgtgatccagaccgattagacatnggaattttttagataaaaaatggcttgttttatccattaatttagccagactttttccttgaattcctattaattggtcactcttt

SEQ ID NO: 543957 - DNA, 409 bp, Homo sapiens
  misc_feature (107)..(107): n is a, c, g, or t
  misc_feature (126)..(128): n is a, c, g, or t
  misc_feature (130)..(130): n is a, c, g, or t
  misc_feature (177)..(177): n is a, c, g, or t
  misc_feature (183)..(183): n is a, c, g, or t
  misc_feature (324)..(324): n is a, c, g, or t
gattggagataaagaaaaagtggggaggaaactttcccttctgagataaggagacatggggaaaagcggtagagaaaagattgaatggctggaaagccacccaaagnagctgacatggaagcttcnnnanagtaagagaaggaactgaaagaaattgttcaaccaaatttacagcanactctnaatgaaggcaggccctccccccaactggttgagaggatacagcaagaaaaagatgagttgtagacactggattctgctagtctgtaatattgtaaatactggactcaggaacttttgtaggaaaaaattgaaagaacttanagttcgaatgtaattggaatcttcacctccaagtggagttgaaactgcctaagcctaagcggctgtttactgcttttcattagca

SEQ ID NO: 543958 - DNA, 2148 bp, Homo sapiens
cccggaacattccagctggatcgaggcccgtggggttttatactcgcgcccgacggacgacgacgacgacgacgacgacgacgacgacgacgacgacgacgacgacgacgacgcacgacgacgacgacgacgactgacgacgacgacgacgacgacgacgacgacgacgacgacgacgacgacgacgacgacgacgacggaccgagacgagacagacgacgagagtgaggacgacgaccgaggaggagcaggagggagtgagggaggcaggagacaggcaggcagccaggagcggccgggcgtgctcgggccagagagcgagacaggagcgaggagctgcgcgcgacgtcgtcccgcacgcccgcccggcgccccacgccctggacgaccactgcatgccgagccggcacagctgacgtgactgaagtgcgtcacgtgtgctgacgtaacgtaacgtaccccaccaccactccctttcaccaagccgcaggtatttgaatctgattgtatactgactcgaccgataccgtacctctattctcttcctccccatgccctagcaacgacacgctgcgccatcactgcgattcctatgccctgcagctgccctatctgccgcgccgttgccacgcgccgcgacgcccgtgtgccccatctacacgaacaaaccagcccatcaccattacatctacgttctcgatccgtctccccctccgctcaactccccatccaatcgcattgccctcctctcggcaattcgtcaccgcacaaacgcaacaggcaactcgtatatgttttgttactcagacttgtacatgaaccttcaaacttataatttagttatctattgagccttagcactgagcacagaacccgaactgagattcataacttaatatcctaactctcccacctcccttctccgtctaccctctagcggtcgggttccggttcggtacgatctcagctctggttcggtttgcgactggctcggtcgggacagtacgcgttccggttcggttcggttcggttccgatcggatcggaagcggatctggatagcgtatgcttgctttcgctatctatctcatgtgccagtctctaccctacccattccgttcccttcacgttccgttccgtttctttgtattcctttcgcactcgagtcggattcgcggtcggctcggcctccgcgcttgatgtcttatgctgtcgtctgtcgggagcaggcccgtcgcatgagtgggcatggcaaaggcagaggaaagagatgcgtaagacttggattagttagcgcgcgacttaagatactcgtggggtctgcggtagcgcgcatgttcgctcctccccgctgccgcgactgttatttgttttctcggttttgcctcttccgcgacgcgcagcgccgtgccatggctagtggctcgggcgattcaattggccgatgcccttatctatgcacacgctgctgcatccgactctcatacacatcccatcactccctccctctcgtcgtcctcccccgttgccctcaccctccctgactcttaccatcactactcatttcattatactactacccatctacttccctgccgtatactaccattgcccagaccatgcaacaccactaacttaacctctcctccaagctcattgatcacacatacactctatcttacactcctctatcttcgatacagtatagatacattacactccatacgctacattatcccctctattcgcttccattttctccccaacaaccatcatcactccatcacaccttcctattctcatacttatctccgctactagaccgagaagagaatataaattcactgacacccttcccatacccatcatgtatatctacatacctctctatcgatcacatacttacactcactcctcctcttccatctgcaccctactctcactacccaatcaatatttaatatattctacaaagagatcaaaacctcgcagcgcaatccacctcattcactcaccactctcttgatactatataactacacttacctactataccatagatctccatccctattaccgcctccgcttgcccctgccatccgtctaccgctcaaccactcatcaatcgcgatagacgccacgagttaat

SEQ ID NO: 543959 - DNA, 589 bp, Homo sapiens
tgctgctttctcctctcgacgccctccctcctcctcctccagccgaggctccgcccgcagcccccagccagccaactcagctcgtcataactcagaggaccgtgtccagggttgccaggaatgccactgaggctggcagagtcctaaaagggagtggcaggtgctgctccacaaggacggttgtccaccctcaatgagggctgcagggcaactgctgactgtctggcagccagaggacagggacaggcagccaccctcttgccatgaccacacctgggtctccctcaatgtggctcccgaggggccgttgaacacagtgttgagaactgctgagaaaatcacaccaaagacgaactacccacagatgccagtcaccactccagggtgacgagaaagagaacacacaggcggcagcgtgacaaaatgagtcccagcatgctacatctggtttcgggttttatttcagaatttataaaattccagtgtcatccatattcattgagcctttacacatgtttgcatataatctccaaattccaaagttaaggccaagggatggattgtagctatggaaagggtacgagctcga

SEQ ID NO: 543960 - DNA, 102 bp, Homo sapiens
ggggggcccctagggccccggttgggggggggaaggtgagggcttcggggggtgctataatgtgcccctggttcttgggtaataaatttcctgtggtttgta

SEQ ID NO: 543961 - DNA, 113 bp, Homo sapiens
gttgactctggtgaccttcaagagcacacaggcagcacgaacttcacactcagcaactctgctcttcctatttccccctttcagagaggagacttatttttctctgtaataaa

SEQ ID NO: 543962 - DNA, 980 bp, Homo sapiens
ctgttgtatgtccgcgtggagcgtgtcggggatgtcttctgccgttcgtgtcgtttcgcgtgtgcgctctttggggtcccgctctcttatccggtgggcccgcccctgggattggtgcgccccgtggtggcagtgttgcgcgctgggctgggcaccacttgtgcggcgcgctttaataattgcgcggcgctagtgtttttaggttgtcgtgcaagggggtttccaaaggcgggtggccgctgcaaccggggccggggctctcgctgcgttgacgtccccggagaagccccgggggctgcgtttttccccaagcgagtgtcccccccggcatgttctttgcacccactcggggggccctgctctgcataccctgggggttcccacgtattggggttagaagtggttcctgcacacacaggtgtgacccgctgtgttggcgtcctggccgaagacctcccccccttacccctactgggtggcccggtacccccacgctggtgccccccttatagagggagctgccctcgccgcatttttttcgataataccccacaccgggtcgcttactcacttgtgtatatatgatggtgctgtggtcattcttctcgggggtttttgttgttgtttattacaacgccaggggttaggggagctgctcctagtttgcaccactaataccactatgaccactgaaatattttgcactgcttcgacagacgtttcattgctccttgaccactccgcttttgaacacgatgaaaaagttgccgcccctctaaccttcaagcattattactcttttaagagaggtgataccaatgtctttgaattattttttctaacccaatgtattcaggttacaaaaatttgtcttttttggcaaagaaacgatttactcacttttttgttctattatatatactttttcaatttttaacccgatttcagggcaaaacctttttttctggcgcgacataaca

SEQ ID NO: 543963 - DNA, 1000 bp, Homo sapiens
  misc_feature (329)..(329): n is a, c, g, or t
  misc_feature (428)..(428): n is a, c, g, or t
  misc_feature (520)..(520): n is a, c, g, or t
acatttctttttctcccgggcgggggcgaccaccctgttctcgctcatcatgggtggtgctgtgggaacacaccggactgtggtcccctatctctggagcgcccccctcgcgcccccccctttcccacggagagtgccgtctgctctcgtctgtgcccccgcagagctcctcgtgtggagacccccgtggttgttttacgacgcccgcaggcgcgcctctataaagggggagagagatatgtcccccgcctctcgttcaggcgggcaccctcttgtaggagccctcgccggcaaacgatcttgggcgtgatagacgcgttgcttttgtntctaggcaccgaccgtcttgttgtctgacacacacgtctcgcggagaaagtgtgctccttcccggcaccaccccgcgcgccccgcaaatggacgtcccncagttattctcccctcgttctcgatagggcgaccgcgagtagacatccgtcggcaggccccgccgcgagtgctcttttctggacgctctcgngagagtacaataatattccgccgccccccgcgggggagtgtacgaacacatcactctcgctgggtggcctgcgcgagaggaaactcttcgcggggggaggccccccctcggaggagacaccgctgttttctagcggtcccagggtcgttcccacccctctgtgtggggccgacaaatctgcagtgagccctggcgtcttccccccctggccgccagaggaccctcttttgtcgagggcgaccctctcaccacgcactggggccccgctgggacctcttctcgcgagttacccaccaccggggagctgagagtacctcgggggacccgctgtgtgaagcccccccccgcgtggtattccctcccccggggcgcccttccccagggccccccaccgggcgccccccgggtttttttgaaaaaatttttgggaaaaagtgggggtttttacgcggaaattaaaaatttttgtttttttcccca

SEQ ID NO: 543964 - DNA, 1767 bp, Homo sapiens
  misc_feature (318)..(318): n is a, c, g, or t
  misc_feature (1088)..(1088): n is a, c, g, or t
atgtggtagttgtgtgttaatcgtatagctgtgtgtgtttgtgagtgtgctgcgtgattgctatgctcggtgtgttcgtggtgtcgtgtgttcagtgtgcatggtgatagtgattgcgtgatcttagttgtattaggtgtggtagttggattatgttgttctcgttagctctatgctgtgtaagattcgtgctgagagtccgtggattacgatggtgttagtagtgcttgcttggtgtgtgtattcgtgtgtgtagtttgttgtgccgtctgtggggtcagctgccgtcgacctacgctgtagtgattgactctctcngggacccactttgataatagatccatatcccgccctgttacggggtatgtcagatagccacacgaacgaatccgaatttttaatggggtgaacaccgctgaatttatgggatgtcttccgtaatgatggtgtacccacaccacaggtggttgtggtgaccacaaatgaaagcccatggcccttgggttttaaaaatcgtgcccggcctccacgggggagacgctaagtgagcggggtgtcccgataaaagtggttatccccgaggggcccctgtgggggtcgccccaaatatttccgcggcacaccggaagggggaaatgcccaaattgggccaacaatacctttctatccagggggagccacaaaattggggctaacacacaatgcgcgcctccgctcgcaataataatcccccgccggggggggccccaacaaggaaaggaagataaggcgctcgcttgtatgtcgcgcatccacagaagtatctccgcgcaaagagttatatgtgacactttttatggggggaccgcgcctccacaacaaagctgggtccccaacaatacaacgccacaacaagaaatgttgggggccccccgccccgccctcgcgccaaatgtcagcagcacaacacccacagctgtccccgctggttgtcccgcgcgggtaatgcgttataactcaccacagggaatatacccccctgggcccccctctgagaggtgtttggacaacactctgggggggaaatatatgtgctccccctctgaggngcttcacacagaaattgtttgtgtgaaacttcggtgataaaaccacacagggatttcactctcagagtatgtgttgtgtcctgacacacactatggcactatcctctaaaatatacacgagagtttctggtgttcgtggaccccacacagagaccccctctggtggaaagagattttggcactgtctggtcgttcacttcggacacacgcacacacacctgtgaacccgacacacatgtggtgacacgagaggtccccacactattgtgggccctctgtcacccttcggggcccgccacaagaaaaggggaaagacacaaagtctgaatctctcctcgagggaaagaaagaagagattgttataacccacaaaatactgatatttataaaaaaatttcacgagaagaaaatatatgaatgaaaaggagaaaaagaaaggcccaaaatcaccacgtctcctggaaggagccaagttccacgcacagggcaaagctttttgcgtgcactcgcttcaaaggccgggacccagtgtggccgaagcacagaatggctaatgtgctaagaagggccaaaagagttggaattctatcttaggaaaatcaaggccccccaaggccaaataaatcccttgttttgtcttcaccccagtgaataaaggtgtttaatgttttggtcccca

SEQ ID NO: 543965 - DNA, 115 bp, Homo sapiens
gggcgcgaaagacctaggtgcgcgacgacgggtcggccgtcatctgggtgacttttaaacatgacggctccactcgatcgtccccgtgcgagacagggatgcgtgagtaccgagc

SEQ ID NO: 543966 - DNA, 769 bp, Homo sapiens
  misc_feature (319)..(319): n is a, c, g, or t
  misc_feature (388)..(388): n is a, c, g, or t
  misc_feature (620)..(620): n is a, c, g, or t
catgggctgggactgggagcgggggaccgtggggatgggcgaaagggggatgggttggggatgtgtttagaaaggagattcgatgtgaagggtgaatctgggttgaacttctggggtgggtgatggggcatttactgggatgggggaggctggaagaaggacagaaagaggggtcgggggtggagggagaaatactaaacttagcttggagaccttttggcactaaggagagctatatctagaagtggcttatgtgaactcaactaagggccacctccaacaagtttggtggcgagaacatgggattcagaactgcganagcaaaacaggccaagctggggatttggaaccccatggtagtcccaactcccaaggggctctgtgcccnttaacccaatggtggccataaccaactctcccaataatccaaccagagcaacaattcatagggtcctaaccaatggttttggtaggacaacccctcccatttatggtgcatggggtttgggattctggattaaaccccatccataaggttgggaacaatatggatcccataaggttggcaaaatatgtatccttaagtgccaaacatggatcttcatcattaacttaaactnaaccaaacatccatcagcttaaacctaagcctggcctttaaacatgggcccggaacactttacctttaaccttaacggggggcattaacccagaccacctctcttgggctccaggtcctacacacattgggctccacctccccttttgg

SEQ ID NO: 543967 - DNA, 269 bp, Homo sapiens
ccgcccggtgttgcgctcctgaagtgctgggattacaggggtgagccatcatgcctggacctgatcacttgatttttaatttttaaaaataaataaaaccttattttctgtaaaagccctgtcctgttggcacctgtgggtctaaacaaccacatactatccatggataggtctagacataacactttaaacagaatgtcaaagcatgagggaggcaagccgcctcttctcggccatcaactgccgatgatgaaagagcgcaacaccgg

SEQ ID NO: 543968 - DNA, 1405 bp, Homo sapiens
gccaactgggacgacatggcgagagatctgggtcaccacactcttctacaacgagctgcgctgtggccaccggaggagcacccagttgcttgctgatcccggaggctcacctcctgaacccctaatggccaagcagagtagaagattgactctagagttactgtgttgatgacgctttcaacacacccggggcactgtactgatggccaatcacaggaccgtgcatggtctcctctatctgcctcatgggcgctagccagcattggctacttgatctattggagctcttggagacaggggtcgaccctactaacgggtgcccatcttacgagggctacgctcgcgtcctcccaaggtccactccttgtcgttcttggaactcttggctaggctcgggggcacctgtacccagatatgacctgtccatggaagcatccatccactgaaggcagatggactcaaagacttttaccaactctaacggatcgggcaagcgggaccactcaggtagccgcgggacgattcaaaggcaggcaagtctggtagcattactgttccagacctcttggggacctttccggaagctaagggcaggatggggcgcgagctcgtccatgagatcccctcccatcttctccatcttgggaatgaaaggaagacttagcgatgctgggcccgcaatgggccctagtggtcaattcacacacatagcgtcaaatgatggcgggattacccgagatgttacgcggcggagggcacgccgtggtctcccaaggcgctgtcgcctgtcccgtggagtcatgggacgatcctttgctggagaatttcccaaccgtcagtaacccaacccctgtacaaaccttcgcagatccaatgcaacaggtggtggacgcgttggggaacccaatccccggggaacaggcaactcctggttactggaccaaagcaaacggggtgtggcctgtgacacgcgggccggggacaacccaaccaaatggataaatcaccgggggacaatggcctgtgaccaaggtgaatgacaagaacagggacgcaatcagccggcccctgggcccgcccaagggacaccccactggacaagaattcccaccgcaacgcattccggcagcccccccagtaggcgccaaaggtaactccgcgagggtgggcaacgggggggggcaccaactcccagggggccctaacggtgccaacacatttcaagagcaacgaatggtgggaatttgacaagcgcaagggaacatacacgacgaaacggggggcccacccatcggagcccaaccgggaacaggcgtccataacaggggccctcgacgaaatgcgccaacacaccggcggacaggacgtacagcgcgcactagaacgaacagcccccgcgcagaat

SEQ ID NO: 543969 - DNA, 372 bp, Homo sapiens
  misc_feature (37)..(38): n is a, c, g, or t
cttggccctgcccctgtccccggggtgggtggggacnngccagacccccctccggggtcttgagcccgaactcccagagctcacccgcgggtgaccgggggccagcccaggagggcgggtggtttgtgcaagttcccttgccacgcggggccccggccccatcaagtccttttggggaggtcccggtcggaaccggaaaaaaccggtccagttaattgtgttaaagggggtctgtctcaagccttcggggcttccacgaagcccctccagcctctccaagtcgctgtgaattgaccccttctttcctttctctgttgtaaatacccctcacggaggaaatagttttgctaagaaataaaagtgactatttta

SEQ ID NO: 543970 - DNA, 324 bp, Homo sapiens
cgttggcgctgacgctggagggggcctgcctcggtcgccacagcttctccatgtaggtcaggctggtctcaaactacccaaaatacaggtcatactagaccgcctcggcctacccaaagtgctagggataacaggagtgagccaccgagcccggacgagcttactaatccaaaacttatgggaaactctgtgtaaaatatggtcaaacatgcccattttttcccaagggtcccacaagtcagacccttgaatgtgaggctcccaggaaggatctgatgaagcatcttattggaatagaggcaaagaatgtggtggtgaatacca

SEQ ID NO: 543971 - DNA, 312 bp, Homo sapiens
accgcggccagttgtcccagacactgcccggaatcgcatatcagcgtcatagcctggtcacagccctatccgaccatccccatcacagcataaatttgcatgaatcatggagtgtacaagcccaacaaaatctacggtctgactacccaaaacctcgtcagagacaacagcttatgtagcagagctgaagggttaggatccagctcgagtcaacgtccctgtcattggtggacatgctgggaagaccatcatccccctgatctctcagtgcacccccaaggtggactatccccaggaacagctgacagcact

SEQ ID NO: 543972 - DNA, 288 bp, Homo sapiens
gaggcgggtggatcgcataagctttggagtttgagaccagcctgagcaacatggtggatccctgtctctacaaaacataacaaaaaattagctgggactataggcacgtgccaccacctcaacgcccagctaattttttgtgtttttaatagagatgcagtttcaccatgttggccaggctggtgtcgaactcctgacctcaagtgatctgccttgcctgcctcggcctcccaaagtgctgggattacaggcatgagccactgcgcccagccaagactctgtctaaaa

SEQ ID NO: 543973 - DNA, 330 bp, Homo sapiens
tgctgggattacaggcatgagccaccacgccaggcaaatcatgggaaattagagtttgataaactgatgttatctggtaatactgtttggcccaagtgttttttgaaatctgaagtttgctgttgagtgggacattggaatggaacccatgtatccaggctttgatgctgttgtcctaagcagggctgggcctgattagtatgtgacgtcttctgtggtgctgtttggcccactattctttagagtctggggagtttggctttaaaatcaactgcatgaactgttacacaatttgttgtacctctggtccaccggcacagctgggcctat

SEQ ID NO: 543974 - DNA, 416 bp, Homo sapiens
  misc_feature (62)..(62): n is a, c, g, or t
tgaaagtgtacaaagaaggaagaagcagaatctgccatatgagtaatagaagtgagcaggcncaggactccttaagtcaagaaaccaagaggcgtcattacggaaaagagtaactcaccctgtgtgctccttggtagtttttcctaagtcatgcccccatgttataaatggggaatatttcgttgaagagttcatagtgaagtttctttttggatgacttcagctggtgggttttggataccttcaagggatcagcaaataatacccccagtcccctttggtaatgtcctcattactctagacataaggattatgctggccacaatagttaaatgtaggtggtgggtatttgcgttatattgtacatgattcctgttttgtaagcatgttcgcctttataataaagtcaataaata

SEQ ID NO: 543975 - DNA, 436 bp, Homo sapiens
  misc_feature (313)..(313): n is a, c, g, or t
  misc_feature (329)..(329): n is a, c, g, or t
ataaggcgttgctggcccatttttacgccgtagcgaactgggatatccccgacggttttctctgcccaccagtaccgggccgggcggattatattcatcaccttgccgatttactggcagaagcaagcggaacaattccagcgaatgccagcattctggatatcggcgttggtgcgaactgtatttatccgctgattggcgtacatgaatatggctggcgttttaccggtagtgaaaccagcagccaggcgttaagcagtgcgcaggcgattatcagttctaatccggggcttaaccgcgccattcgtctgcntcggcaaaagagagtngggcgatttttacggcatcatccataaaacgagcaatacgacgcgaccttgtgtacccgccattccacgattccgccgctgcgcacgggcaggtagtgagcgtaaac

SEQ ID NO: 543976 - DNA, 150 bp, Homo sapiens
aacattaccaataagtataggcgatagaaattgaaacctggcgcaatagatatagtaccgcaaggaaagatgaaaaattataaccaagcatattatagcagggcctaccccctatacctctgcatatgattactagaatactttgcaggg

SEQ ID NO: 543977 - DNA, 391 bp, Homo sapiens
cccgcttccgtgagactggcagtgcagctgaggtctggactgaatagaaaacatactgactgtctcacctgaggcactgttgcactggccaaggggacctgtggggagcagtgtttgttctgtctctcaaaatggcttgtgcatagtttctttgccataccctctctcccatttccggctttgttggtgtccttgtcagggcctggcttgaggttgggtgcctggttgggggtggcagagtggcaggcagaggtctagacacagcacccactcagcacacgcttcctcatccttcagcaggaatgctagacttttcatgcccacacctaaggcccccccatggaggaagctcctcccgagagctctggtccaagctcccagtcacggagag

SEQ ID NO: 543978 - DNA, 198 bp, Homo sapiens
  misc_feature (70)..(70): n is a, c, g, or t
  misc_feature (76)..(78): n is a, c, g, or t
  misc_feature (84)..(84): n is a, c, g, or t
  misc_feature (88)..(88): n is a, c, g, or t
  misc_feature (91)..(91): n is a, c, g, or t
  misc_feature (134)..(134): n is a, c, g, or t
gcgtgccatgtctgacgtcagtctgcgcctatcgttggtctgatccaggtgctgcttgtctggcttccanatcatnnncatttncctnggnctgcgtctctacatagcgctccagggtggccaggttctcaggnttgtacctgtcgatacccttgagcaacttgaccacgttggctctcatctccgacgagggcgaat

SEQ ID NO: 543979 - DNA, 119 bp, Homo sapiens
agtgcaagatttctcatgaggctgagacaggtgcattgcttgagcccaagaattgagaccagccgggccaagacggtgacacctcatctttagaaaaaaatacaaaaagtggtctccac

SEQ ID NO: 543980 - DNA, 197 bp, Homo sapiens
  misc_feature (69)..(69): n is a, c, g, or t
  misc_feature (75)..(77): n is a, c, g, or t
  misc_feature (83)..(83): n is a, c, g, or t
  misc_feature (87)..(87): n is a, c, g, or t
  misc_feature (90)..(90): n is a, c, g, or t
  misc_feature (133)..(133): n is a, c, g, or t
taaccacagctatgatcagagcgatggctatgaccgggacatctccaggacacccagattgccttccanatcatnnncatttncctnggnctgcgtctctacatagcgctccagggtggccaggttctcaggnttgtacctgtcgatacccttgagcaacttgaccacgttggctctcatctccgacgagggcgaat

SEQ ID NO: 543981 - DNA, 534 bp, Homo sapiens
taacatctcatttctttgtggtcagaatatttaatacatgtcttctgactatttggtaatatacaataccttagtactaaccagtcaccttactgtgcaatataatatcagatctcatttcccctatcttattgtaactttgtacccactgatcaacctctcaccattctcccttccttgtccccctatccccagtctctggtaaccactgttttctctacctctatgatattaactttttattttagattcaacatgagtgatattatgtggtatttgtctttctgtgtctggcttatttcacttaacattacgtcctccaggttcacccacgttgtcataaatgatagaatttcattctttttcaaggctgagtattattccattgcttatatatgcaacattttctttactcattcattctttgttggacatttaggttgattccatatgttggctattacaaatagtgctgaaataaacatggcagtgtacatagttacaataagataggagaaatgagatgttggcagg

SEQ ID NO: 543982 - DNA, 163 bp, Homo sapiens
gatgaagatactgccatccactaaattatattagaggaagacaacataattttctggaactagtcctgtattgccttcataagttgcctttgaccatcctggttccacatgatgggtacacatttagaaaactattgctccttgtgggaatggaacagctgtg

SEQ ID NO: 543983 - DNA, 277 bp, Homo sapiens
ctgccaattttagtttttatctttgtgctgtatttaattgtatcatcacaggccacattaaatcatttctggaagatcagttttaaataaatagatgaataaaaaaatagcagttaaaaaaagggagagaaaagatttaagaacatttctaaaagtaaccccaaaatttcttcagggggataaaaagtgggatgatttgggaggtcgaggtgagaggattagctgagaccaggagtttgagaccagcttggacaagacggcaagatcctgtctctac

SEQ ID NO: 543984 - DNA, 238 bp, Homo sapiens
atgatcagcatgaacgattaatgagagacacgaggagaaaactgacatgatcaggatggaccgactactacattcacggacgatggcgcatgctgggggcaggactttgctaaggtaattagtgctttctaggaacatatgacctaagtgcactgatccaacatacagagtggagtacgaatatcagcagagagacaaaagcagtcagtgtatgatacaatctatactataatgtcta

SEQ ID NO: 543985 - DNA, 448 bp, Homo sapiens
  misc_feature (166)..(166): n is a, c, g, or t
catatctccatagtaatcctgcatcttatgctattaaaaggtccagaatacagacatctactttgacaatgactgggtagatgagaagtggttttaatatccttgatatattcaaatctggttcattattggtaggtgcagccacctggtataactgaaatgtgtnataggaccagtcagtggaatcagaggctgaacagaccttagggctgggtcaaaagtggtgatctgaatgtacctgctctctgtatgaacctttgactaagttctccaggggcagggtgcaccagaggccccagtaaatatggttcatccaccgtaataaagaagaaaatgaaagtagggccaaaaattcctgatgttaaccaattaaagcgccaagtgaataaaggtccggacctccagggtgactgtggaataaaaaactcctgcagtgacataaaaaaaa

SEQ ID NO: 543986 - DNA, 134 bp, Homo sapiens
ttcggccggggcatccatcaaacttgtcctagagcgagtttttttccaagaatagtaatattttacaaggcttgcaatgtcttatctggaagcttaaaaaaaatcatgttaatatcagcaagtttaattcataa

SEQ ID NO: 543987 - DNA, 464 bp, Homo sapiens
cgaaggccagtttctaatcatcagacggatgtaaattagaaccaggaaagagataccatctcacaccagtcagaacagcttttgttaaaatgtcaaaaaatgagaaacgtgggtgaggctgcagaggaaagcagacacttgtacactgttggtgaaggtgtaaattaatttagcgtaggcacagtcagttgggagatttctcagagaactaagagtggaactaccattagacccagcaatctgatggctggatatacggccaaaggaaaataaatcattctgccaaaagaacatatgtacctgtatgttcatggtggcaccattcacaatagcaaaaacattgaatcaactcatgtgcccatcagtggcggactagaaaagaaaagaaaatatggtacatagccatcatggaatactatgcacccattaaaaataatgaaataatgtctttgcaacaacatgaa

SEQ ID NO: 543988 - DNA, 2764 bp, Homo sapiens
gtcgccgcgcggccgccggtgagccgcatggagccccgggcggcggacggctgcttcctgggcgacgtgggtttctgggtggagcggacccctgtgcacgaggcagcccagcggggtgagagcctgcagctgcaacagctgatcgagagcggcgcctgcgtgaaccaggtcaccgtggactccatcacgcccctgcacgcagccagtctgcagggccaggcgcggtgtgtgcagctgctgctggcggctggggcccaggtggatgctcgcaacatcgacggcagcaccccgctctgcgatgcctgcgcctcgggcagcatcgagtgtgtgaagctctcgctgtcctacggggccaaggtcaaccctcccctgtacacagcgtcccccctgcacgaggcctgcatgagcgggagttccgaatgtgtgaggcttcttattgacgtcggggccaatctggaagcgcacgattgccattttgggacccctctgcacgttgcctgtgcccgggagcatctggactgtgtcaaagtgctgctcaatgcaggggccaacgtgaatgcggcaaagcttcatgagactgcccttcaccacgcggccaaggtcaagaatgttgacctcatcgagatgcttatcgagtttggcggcaacatctacgcccgggacaaccgcgggaagaagccgtctgactacacgtggagcagcagcgctcccgccaagtgcttcgagtactacgaaaagacacctctgactctgtcacagctctgcagggtgaacttgaggaaggccactggcgtccgagggctggagaagattgccaagttaaacatcccgccccggctcattgattacctctcctacaactgaattgcaggtggggtccggaccgtgactgcccccgttgtgcccagcattgcccgggtgagggctctgcctgttcctctgaagcagcgtgattgctgtagatagaacaacgctccttcgagtcccttcctgcgatcctgtttaggcttctctcctggatcctggataatgtttccagggtgttgggaaggcctgcgtctcaggtcacagttgtgggtgtggccctgcgctgttctacagaacctaccctctcaatgggcatgggcccaaccatccagttttcctcttttacggaccatcctcaaaggcactctcaggacagacggcgtggggagcacagaggaggctggcagagctggggactgagggcattgttgctgattctcactcaccggggcagcctgccgcagatgcacaggccccaggtgcaggccaccacctccgggtcggcaccaggactgccctcggtgctcatagggaatggctgggcccacggaaggtcggcctgggatgtggcctgggactgctgctctgctggctgctgtgtggatgcttttcctggagcactttccaaggcatcccccagccccaagcctgcacgcatctgtcactcagggactttctatgggtctttgtgggggaaggccctggctttgtattccccacaagtagcactgagtttcttaggaaatttgtcttcagtattaggtctccaactcttgtaaaaagtttatatgtaggataaaaaccttttagaggacacgtaggcggtaccactaaggttttggtaatgagccattcaaaccgacagcagtgtgaaggtgtgtcaaggtgtatattctcgtggctcggcattctcagtgcaaaggcctgtttggagactctgtgggaattgtttttcatctgtttctatggttgtcaaatgaattcttcacccaccctacagtttgctaactccttgaagctatcaaattagtaagagaggctgcccgcacccagggggcaccatcgcccacttattatttagttttgcggatactcatggaccatctatcacatccagcattgtcccagtgctttgagttggacgggaatgggactctgcagccaaggcaggataagaaaatcttgcaatcccgtcctgcagtgatagaaacaggtcgttctgcattataagccataggtggagcattcggtagcgtattcagactgcatgggccggcctaggagtctttgccttcataaattttaagaaccccgcccacaacagggagttaaactggaggactttgcatgattagttcagggatgagtggtttctggggcatctgaggtcaggagttcgaaaccagcctggccaacttgatgaaaccccatctctacccgttctggagaacaggtcacgcctgtcctggagacagtgtgccgggaaaagggaacgtggtactcactggatgcacccaggccggcccgagcctcccaccgcagacagtgtggaacagagtgagcctgagctgcccaaggcgatgccctttgtgctgtatgactggaggcctctccgcgtgggtacttgggggtggggccacaaatctggcgaaaaactacatgctggccgccgtgaggttttactccagcgttcccgccattgtcatggcgggtcttcgtcctaaactgagaagaaaagcattcctgtttgatcaccgccttagttaccagttctggatcagtcagtgtttctgcatggaataacaaccattaaaaaaagcactgggttctgccctttcatctttgtaagagattcttgcctctagcaatgacaacctgtgatgtctcacagtagagcacttagtgcagaatcaggtccccacggctgttgctcaataaaagtggcggaataaagtgc

SEQ ID NO: 543989 - DNA, 403 bp, Homo sapiens
ttgattcttcagctgtggcctctggtactcccttagaggctttcctagctggtcaggatgccccgtgctgccagggaccctcaagcccctcaagcctcactgatctggtgacactttgaagcacctcatcttcccccagacaacatcttaggactcttctagccagacacatgctatcctgcaagtgagcctagcagtggcagatgacgtcagctctgggccagcccctgaaggaggcagatcaaattgtccagaccccagaggtagccgtcctcacggttgccctctgtccaaggcagcctgtgactgagcatctggtggtcaggcagggccactgtcttgccgaagtcaatcatccagaccttggccaggcagtgtggtcatcacaaagagaagggaactg

SEQ ID NO: 543990 - DNA, 2845 bp, Homo sapiens
gtcgccgcgcggccgccggtgagccgcatggagccccgggcggcggacggctgcttcctgggcgacgtgggtttctgggtggagcggacccctgtgcacgaggcagcccagcggggtgagagcctgcagctgcaacagctgatcgagagcggcgcctgcgtgaaccaggtcaccgtggactccatcacgcccctgcacgcagccagtctgcagggccaggcgcggtgtgtgcagctgctgctggcggctggggcccaggtggatgctcgcaacatcgacggcagcaccccgctctgcgatgcctgcgcctcgggcagcatcgagtgtgtgaagctctcgctgtcctacggggccaaggtcaaccctcccctgtacacagcgtcccccctgcacgaggcctgcatgagcgggagttccgaatgtgtgaggcttcttattgacgtcggggccaatctggaagcgcacgattgccattttgggacccctctgcacgttgcctgtgcccgggagcatctggactgtgtcaaagtgctgctcaatgcagcttgatgaatgtctgctcttatcgtgagaaagttgaggagtgcagagcttactctcttctctgaattgcctactgttttgggggccaacgtgaatgcggcaaagcttcatgagactgcccttcaccacgcggccaaggtcaagaatgttgacctcatcgagatgcttatcgagtttggcggcaacatctacgcccgggacaaccgcgggaagaagccgtctgactacacgtggagcagcagcgctcccgccaagtgcttcgagtactacgaaaagacacctctgactctgtcacagctctgcagggtgaacttgaggaaggccactggcgtccgagggctggagaagattgccaagttaaacatcccgccccggctcattgattacctctcctacaactgaattgcaggtggggtccggaccgtgactgcccccgttgtgcccagcattgcccgggtgagggctctgcctgttcctctgaagcagcgtgattgctgtagatagaacaacgctccttcgagtcccttcctgcgatcctgtttaggcttctctcctggatcctggataatgtttccagggtgttgggaaggcctgcgtctcaggtcacagttgtgggtgtggccctgcgctgttctacagaacctaccctctcaatgggcatgggcccaaccatccagttttcctcttttacggaccatcctcaaaggcactctcaggacagacggcgtggggagcacagaggaggctggcagagctggggactgagggcattgttgctgattctcactcaccggggcagcctgccgcagatgcacaggccccaggtgcaggccaccacctccgggtcggcaccaggactgccctcggtgctcatagggaatggctgggcccacggaaggtcggcctgggatgtggcctgggactgctgctctgctggctgctgtgtggatgcttttcctggagcactttccaaggcatcccccagccccaagcctgcacgcatctgtcactcagggactttctatgggtctttgtgggggaaggccctggctttgtattccccacaagtagcactgagtttcttaggaaatttgtcttcagtattaggtctccaactcttgtaaaaagtttatatgtaggataaaaaccttttagaggacacgtaggcggtaccactaaggttttggtaatgagccattcaaaccgacagcagtgtgaaggtgtgtcaaggtgtatattctcgtggctcggcattctcagtgcaaaggcctgtttggagactctgtgggaattgtttttcatctgtttctatggttgtcaaatgaattcttcacccaccctacagtttgctaactccttgaagctatcaaattagtaagagaggctgcccgcacccagggggcaccatcgcccacttattatttagttttgcggatactcatggaccatctatcacatccagcattgtcccagtgctttgagttggacgggaatgggactctgcagccaaggcaggataagaaaatcttgcaatcccgtcctgcagtgatagaaacaggtcgttctgcattataagccataggtggagcattcggtagcgtattcagactgcatgggccggcctaggagtctttgccttcataaattttaagaaccccgcccacaacagggagttaaactggaggactttgcatgattagttcagggatgagtggtttctggggcatctgaggtcaggagttcgaaaccagcctggccaacttgatgaaaccccatctctacccgttctggagaacaggtcacgcctgtcctggagacagtgtgccgggaaaagggaacgtggtactcactggatgcacccaggccggcccgagcctcccaccgcagacagtgtggaacagagtgagcctgagctgcccaaggcgatgccctttgtgctgtatgactggaggcctctccgcgtgggtacttgggggtggggccacaaatctggcgaaaaactacatgctggccgccgtgaggttttactccagcgttcccgccattgtcatggcgggtcttcgtcctaaactgagaagaaaagcattcctgtttgatcaccgccttagttaccagttctggatcagtcagtgtttctgcatggaataacaaccattaaaaaaagcactgggttctgccctttcatctttgtaagagattcttgcctctagcaatgacaacctgtgatgtctcacagtagagcacttagtgcagaatcaggtccccacggctgttgctcaataaaagtggcggaataaagtgc

SEQ ID NO: 543991 - DNA, 499 bp, Homo sapiens
  misc_feature (288)..(288): n is a, c, g, or t
  misc_feature (305)..(305): n is a, c, g, or t
  misc_feature (329)..(329): n is a, c, g, or t
  misc_feature (332)..(332): n is a, c, g, or t
  misc_feature (338)..(338): n is a, c, g, or t
  misc_feature (344)..(344): n is a, c, g, or t
  misc_feature (351)..(352): n is a, c, g, or t
tccagagcacaggaaatgtgcaagcattctctacccagtctggcatgaacctcgagtggtcccagaagtgctttaggacaacaactgggactacaccagatctgccaggccttcactcatctcaaggccaagggcgagatcccagaagtggcattcatgaagtgatcgtagtcatgcctcagaagcagtcccccctgtaaatagtccttggatattaccgtctggttgtcgtctgtcatctcctcctgtctggcccgaggcgccccgtgactgtgaccgagggagganggctgcctgatcctctnctgctgcctctggagactcagagnttnagctantgggcnaggaagnnaaagcttactttgtagacctgacactaaactacccgaaggacttaggtgctttgtgtacttaaccccaggacctccttactttttaatataaagagtgatgttgtatttcgtgttctgcactttttaatataaagagtgatgttgta

SEQ ID NO: 543992 - DNA, 303 bp, Homo sapiens
agcgggttctctcagcactcagcacagattgctagtgcttttatgtgctgagcctttcccttcaacctggactgaaagaggactggcaagtctcgctgaacgctgtttctttttcttcagcaacatactaggaaacgtgttggccccgtttatttggaggggggccattaaacgaaaaatttggaattgagggacaaatggctccaatatgtggattcagttcatatgtatttacaatccatgtatctgaagaattggtatgagaaagaaaatacagtatataagaattagtgttactttata

SEQ ID NO: 543993 - DNA, 135 bp, Homo sapiens
ttcacgtatctgtgagttgaatgcatcatcacagagaatttcttaggttctgtctagattttatgcgaagatatacccgtttcgaacgaaggccacagagtggtccaaatatccacttgcagatcctacaaaaag

SEQ ID NO: 543994 - DNA, 159 bp, Homo sapiens
ggaagggggggctttgggcccccccttccccctttttttttccccccctttaaagggtttgggggtttttgttttcctggggggggggggggggggccgggggtttcctttttcttttttttgggcccgtttttttaaaggggcccccttttaaattta

SEQ ID NO: 543995 - DNA, 150 bp, Homo sapiens
gaaatgtcaggatgcccaggtgaggatgagcaggagatggtgtcagtgaagcgtccacctagaggagccttaggaagaggatcaaggagaaggcttcttgtcagaaatggataatgaacctcctgtgagcgagggtgatgatggcttcgc

SEQ ID NO: 543996 - DNA, 368 bp, Homo sapiens
tattaagtatgaagtggcatcactaatagcctttcattattatccctgacattctttggcgtataatcatagccttatgtttgtctgtcttaaacaaatgatctaacgcatgaatcatttccttgctctactgaccctctggggagtgctccattctcctgctaggatttggactgcttaccacacagcctgctgtacacctgtcaccttgagtcagagtaattctcattgctttcctgaacctctggttctcgtgaacccaaataaataaacatttctggccaggcgcggtggctcatatctgtaatcccagcactttgggaggccagggcaggtgaatcacttgccttgagagtgtagaaattgaa

SEQ ID NO: 543997 - DNA, 394 bp, Homo sapiens
tgacccactcatctttcatatttgctgtacaatctaatacttgcagccatgcagaaccgttcaatgttattatggtcctttgagctggtgacacactgtagtgcatcagagctgcctctcagctgctccggtcacctacactgaatatgactgactgaatgaaatgacgagttacttcccaggatgaaaatgacactgtggatcaaatgcattgcccaaattgtatctgatcctcctccactaaggtttgaaaagaccctattaaagataccttccatgtgggcacgaggttggacaccaatcaactagcctcttttgcctaatatccttggcaaatataaatttgttaacaacaggtctgaatgacatgacactgggtgggtcagaacataag

SEQ ID NO: 543998 - DNA, 194 bp, Homo sapiens
  misc_feature (57)..(57): n is a, c, g, or t
  misc_feature (117)..(117): n is a, c, g, or t
  misc_feature (127)..(127): n is a, c, g, or t
  misc_feature (162)..(162): n is a, c, g, or t
  misc_feature (172)..(172): n is a, c, g, or t
gaagatgcgcgctctttttccgggctggggtctgcgcggcctggaggctggcggccnttgcagatcgctgtggagaatggcttcgggggtgtgcacagccagaagaaggccaagtgnctggggggtncagtggaggattacttcatgcgcaatgctgacttngagctagatnaggtggaagacttccttggaga

SEQ ID NO: 543999 - DNA, 143 bp, Homo sapiens
gttctagaggccacggacacgaaaagcgtatcgcttgtcaggccacaggagggggcaagtggaggaggagaggtggcggtgctccccactccactgccagtcgtcactggctctcccttcccttcatcctcgttccctatctg

SEQ ID NO: 544000 - DNA, 181 bp, Homo sapiens
cagggcaccaggcaggatcctagggcgcctcatagtatgcgttagcatgtggtttgctgtatgaccttgcacaagtcacttccttctgagcctcaattttatcatcggtacaatgagattcacaagctgtcctgaaagtcaagtgtgaaaataaaatagagattaaacaagataattatga

SEQ ID NO: 544001 - DNA, 1522 bp, Homo sapiens
  misc_feature (610)..(610): n is a, c, g, or t
tcccctcttgttgcctcagttcgccctggttccttggagggctcctctttttcttctatacctccatgggtctcctcaattttatttggggggagaaatatacctttgagcaagaatatacaatggggaaaaagaggtctcataccccttttcgtgttcagagagttctctatttttactcccttctccgtgtgtctgtgaacacaaaaacagctgtgtgtgtgtggacacacctcaacacaccacacgcgagaggacctctgtgtgtgggcaaaaaaaagaggaaaacacacgctgtggctctcccctttctgccgcctctcgtggctgtgagaaacgctgtgagagagcggggtcgctataagcgcgccccctgtgtgtggtctaggtattagcgcgtcgccatataaaaaaatttctctattaaggccttttattttctccctctctctttctctctctgtggagtataatatgttgtgggcgctctcacaaaaagaagtatcaacacacctgtcgtggtgtcctctctctatatgtggtgtgcaaaatattatttttggcgggaaccaccccagtgggttttacaccctatttttttaccccaaanctatgtgtgtattctcgtgtgtctataacattttctctctctgcttgtggtgttttattacaaaacacacaaagagaaaaaaaacaaacaactcttttataaacacagagtgggggcggtattatcagagaagaggggtctctagcccaagagcgcgtgggggggttttgtgagagacagtgtctttggggggggtgggggttacacagtgtggggggcctttttgttgtgcgacgccacacccagtgtggggctcttatctcatcaccttttttggtggcggcccagtcgttgtcgtctacaaaccaccgtcggggcgcggcaacactcatctttcctgggggacgcccaagaggaaaataattcttccccccttgttttttgcgccacgacgctttctaaacacacgggattggttggcaaccccccctcttttttttctacaacacaatctatacaaaaattttttctctctttacgacgataataatcgtcggcaatattaggacaccttttttttggaaggcgccccccttgttggtcccaccacactcttccccacagtcgtggcgggccgagagaacacactctcctcatgggggaagaaaacacccctgttggtattacgggaaaaccctccttataagcattgtgggggcgcgcaccaactttttgtggaggcactattctcctcctcattaaagtgtggcgggcacacacatttgatgggtggactaccccaccttggtgatatcaataatcaattcctcctgttaccaacacaacatcttctcttactcacccatttattatatagggaggcatgatccccaccacccttgtgtgtgacaccaacggcggcggcagaaccacgaacttcattggtaatcgtgtcgcgctcccacaccaggg

SEQ ID NO: 544002 - DNA, 228 bp, Homo sapiens
tgatgttaaagactttactttgaaatttgatggaaaaatttttccgggccccatggaaaaaacttgatccccaagtgaaaacattttaacccaaaagctttaacgtttgtcagttaacctgaaactgaaattttgggaacatgaaattctttagggccaaaaggaatgggtaattagtattcctttcctttttccttacccttttttttaaaaaaattcacaccaacc

SEQ ID NO: 544003 - DNA, 1173 bp, Homo sapiens
  misc_feature (386)..(386): n is a, c, g, or t
ggtccctgtgtaggatggaggatgtctgcgagcagcatttgaaattctgggagggcgttggttgtctagcaagcaagactaggaggaggcagaagcactagcatcgtcgggaccagactctgtcatcatggccatgttgcatgtccttctacagccgaaaacgccgagccacagggaaaagtcagcctagctatgagaacttgcaggtgactttgcgtggtatgcactcctacgcgcagtcgatccgtggtgccgagtacctatgtataaaggcaggctggaattcttaggaaagtgtgctgaggaataacgcatgtttatatcgaaccgagatatatcgctcaagatgtctagttggacccgaacgagtagggaccttaggaagngcctcgtagaagcgccgaatcgtgccacgaaagccacgcatattcatgcccatagtcgcgccaacaagcaaaagttgcctagtgggtctcggtccttgcaagaggataaacccatattgggaacttttgtgcatacactaacggaaggatccccttttctctaaaagcgtcaaaaggttctactatagccgaagacagggaccccattggtaatctccacccgaagttgtggcattcgcaatttaatgggggtaatgcgcattgggacatacgcaatttgggaattggctatgggaatcgccaacttggttttggagggtaagccaaggtctccaaggtgcaaccatttcctctaacttctggaaaatcctgcggggaaaaaacgggcagtacaattcccgttggtacactggggaacctgggattaggggaactttggaatctcagaaaccttgtacaactgggcaggtttattactttacacaatggcgcaagggatttccctgaggaaatcttggaagaggtttccctttccagagccccaaggttataccggttgggacacttgtaggacacacatttcggatgaggaactttgggaccaatacctgtggcggagttgacgaaccttgggggacactgggatcatttagtcacacaggcgcagaccggcggaggggaaatcaccacccgttaggggtcccacgcgatgaggcgaatataacgccccttggcacacaaagcggtttttctatgtaccaagaaccatataaaccggacgtaaatg

SEQ ID NO: 544004 - DNA, 264 bp, Homo sapiens
gttaaactggggggctgtgtggacacagcgggatcaggaggactacgagtcggctgcggtcactcgtccgacccgcaaacagacgtctttctggatctgcttctctctggtgagcccgggctccttcgagaatgttcgtgccaagaggtacccggaggtgcggcaccactgcccccacacgcccatcctcctggtgggcaccaagctggacctccgcgacgagcacgacgaggaattccggcagacgacgacgaattcaccacg

SEQ ID NO: 544005 - DNA, 184 bp, Homo sapiens
ccaaaaaaaaaaacccccccaaaggggggggtggggttttttttaagggcccccccccccccccccccaaggccccctttttttgaccccctgggggggggcccgggggggggggcccctttccccttttttttttggggctttgggggttttaaaaaaaaaaaagggccccttgggggcccca

SEQ ID NO: 544006 - DNA, 994 bp, Homo sapiens
  misc_feature (193)..(193): n is a, c, g, or t
  misc_feature (210)..(210): n is a, c, g, or t
  misc_feature (218)..(218): n is a, c, g, or t
  misc_feature (251)..(251): n is a, c, g, or t
  misc_feature (253)..(253): n is a, c, g, or t
  misc_feature (256)..(258): n is a, c, g, or t
  misc_feature (261)..(262): n is a, c, g, or t
  misc_feature (268)..(268): n is a, c, g, or t
  misc_feature (282)..(282): n is a, c, g, or t
  misc_feature (311)..(312): n is a, c, g, or t
  misc_feature (330)..(330): n is a, c, g, or t
  misc_feature (381)..(381): n is a, c, g, or t
  misc_feature (399)..(399): n is a, c, g, or t
  misc_feature (403)..(403): n is a, c, g, or t
  misc_feature (411)..(411): n is a, c, g, or t
  misc_feature (486)..(486): n is a, c, g, or t
  misc_feature (562)..(562): n is a, c, g, or t
tgctgatctatatcattggtacgacagaacttagcacaaatgcctgtgctcacaacacggatgggaggatcatcacggctcagggcacacatgcatttccttagaaacaggcagacaaagagagcataaataccacacaacagccaggctcagggggctgcgggccacagagggctgcgcttcaaaggcagtnagaggcattaaatacgngacctacncaatacactccacttcaccatacataatttatntnttnnnagnnaggggnccacagtatctatncgtgcaagcggctgtggtggagaaaatanncgggggggcagccatgcncggagggtgctccctgtataccctcccgacgcctcgtccccacccttcccncagagtcacttgggatgncaanacgcatgngccggccggggcgcactcgggaggtcctgcctggtctcctcggcatggacctctgagctccccgtgagccgggangtgcctggaaccaagaacacttgaaccctgcatgtcaccacatccctgggagttgccctggaagggaccgggccangcgtgaggggaggaatgtcgcgcttcgtcacgtggaggagcggagcgcagcaccgcgccgggcaggtgcaacgcatgccccagcccggggcccgggagagcaggaacgattgcggggcatccactcttgcagcaagcttagacggcgcgaccagccctgtgttctctgcagctgtccccggccgcttcgctaggaactgaattgacctgcaagttgtcgcctttcccaggcggaccacaggaggggttccttgactctcgtgatttcgcggccactgcgccatatgggttatgctccctggagctcgtgtgcctccgggggagcccctgtgtgtcccctcgaccttgtagttctcggttgcctggtgcgagtaactctgtgcttggcgcccttttaacggaagaggctcctcctctgtggatgacgtggtac

SEQ ID NO: 544007 - DNA, 158 bp, Homo sapiens
tgctgatctatatcattggtacgacagaacttagcacaaatgcctgtgctcacaacacggatgggaggatcatcacggctcagggcacacatgcatttgtgtctggtctgtcctccctgttgattggtctggcatttccggtattaaaatgataaaat

SEQ ID NO: 544008 - DNA, 423 bp, Homo sapiens
tgatagcattcagcacataaatacatcaaaaccacatgatgagctgaaactgcccagtgtgcccatcccgtggagtcctatgccaacagcagctcaaacatccactaataggaattcggaaacagtggcacgaagatattaatcaggatcttcgaactcatcttgtacaccaaactacgtacaagccatattacctacgccggatcctgctgctttaaaagacagacggatggaaaacctagtatgcatatgctcggaaagttgacggggacatgtaatgaatctgcaaacaatcgagcggaatactaccaccttctagctgagaaactctctaagatccagaaagaactagaagaaaaacgaaggaccagactacagaagcagaacatgctaccaaatgctgcgggcatggttccagtttcc

SEQ ID NO: 544009 - DNA, 114 bp, Homo sapiens
ctgtctgcgctgtaccggcctgcgctcagtcgaattggtactcttcacgctgtgtgactctctctccactgtgcagatagttcctgtgccgatctctctctagcgcggaccaga

SEQ ID NO: 544010 - DNA, 380 bp, Homo sapiens
  misc_feature (30)..(30): n is a, c, g, or t
cgcctccctacctttggcggtcttctggtnaccaatgtgctgcaggtcatggctccagaatcaaattgggctcaaattgtgtgagctccaacgcagtggaacctggccctactcccacctacacctcgtggatctcggagctgcaggggtgctctgcccacctcaccctaagctggcctcgcttggggctggaattgggggacagcatgttctgggcgtctctgcttctttctgctggtgcctgtacctgtgctggctgcccactcatagatatcaaagccacaggacggccccgcagaacccctgcgcctggctgccgggggatggctttggtgcacatgtgactggtcatcgtggtcccatggggcacctctgctctt

SEQ ID NO: 544011 - DNA, 202 bp, Homo sapiens
ctaccgtacgctccgattcgctcttgatgttggttatggggctgttggggctggtcgacaagagaggtgtcggtgtctacaatgtgtctggctggcctcagcgcaggcgagtggcctctccggttcatgatgatgctgtccacggtgatctgccagtaaccctcgacggtaacaggcacccagttcagacttccagtgtagt

SEQ ID NO: 544012 - DNA, 1265 bp, Homo sapiens
  misc_feature (1252)..(1252): n is a, c, g, or t
gtgccggggggtcccacagtcttgctctccacgcgggttgattacctctttttgtggcttgtattggttctcacccccctcagcgtgtttcaccacaggggggcctgtttgtacacgctcgccccgctttgtatcgctaccgggggtggtcttgtggagttgggcgcccacttaagactgcttctcttctgggtggctgttgggggggccccgacgtttttctttgtcgactaataagttgggggtggctgtatcagacgccccgccggtttatattgtcccccccgcacggtggttgcacagcgggccaccacgcgcttgttgggtcccaccgggaggggtggtccgccacacgtgtgttcgttcgtctgggcgcgggttgttggcaacattgggttgtaatgggtgttagctcccctcgtaatattgaagggggtttgtagctcttcgtggcggtagtacatattatagtggcgccccaccctgttataactcggtaatattggctgtatctcccccacacagagatagatagagagatattaaattttctgatcacgcccccccgggcttctcatagaagatggtgatggtgaatagtttttggtgtggggataaaaaaagtttgggatatttttccctcaaaaatagcgctctgtgacactctccgctcccacacagagagaaagagtggggtaattgggtgtgtttttgtttagacaaaacacagaaaaagtgggtaatatttgtgagaaaaatataaagtccacaaattggaacaaatgtcactgttgtttaaaaaatttccccctgtttattacacactctttttcttgaatataaataaattgcgccacatatttatacccctcttttcgggcgcccacgcgtatttcccacggaaccccctcggagacctgggtctaaagtaaaatatggaaattggtttcaccccctcgagggcacacattaagaccacctcttggaaaagatggccactaacctctttcaccctggacttaagcacttctgggctttaatttcaccacgcgctgtctttttctccctccacctgtatccccggttccctcccccagaggaacccccccgttttcactgggtggccctccgtctctcttttctccccccgactaaacattgttttctgtacccaggtaatttttcccactactaatagaataaaggcccttttttaaaaaaagagaagaaaaactcgagcataaactcgggncgagaagagtata

SEQ ID NO: 544013 - DNA, 622 bp, Homo sapiens
ggcggctgcgtcgggactgcaggagaatgatggacggtctccacaggagttaaagttcctcgataattttcgcttgttggaataacttgaagaaggacagaaaggagtaggactgaagtgtacagttgagctggcgtgccttggaagattgatgaagtatattgacacttacaaggtggagaggcatgattattggggccaccataggtacaaattatgaataacaagaatatatagcctgaaagtagaaggtggattcttatataaccatgaagctccgtccgtcgagttagatttgtaactaaaaattaatatgagagtggaattaagataagttccagtgggatggtggatgcgactggagcatagcagtgttagcaaaatggaaatagattctatatatgcattaaagttgtgacttcgaagagcgtaagacgtctaatgatgtccataagaaagatatgatagcttgcaaagcacatcgagaaggagaaacatacaatcaagtaatttcagtggatctcaaatcttgtcttaaatcagtaaggcttctactcatgtgaatgtcttgagttaaatatcgacagatggaagtatacgacagttactgtacaagagaatt

SEQ ID NO: 544014 - DNA, 943 bp, Homo sapiens
  misc_feature (937)..(938): n is a, c, g, or t
gggagcggcggaggcgcccagcggaggtgaaagtatggcggaaaggaaaatacagcggaaaaatgcagagctggagtcgtgtgtactgctccttggccaagagaggccatttcaatcgaatatctcatggcctacagggactttctgcagtgcctctgagaacttacgcagatcagccgatgtgatgctgatgtaacagtaataggttctggtcctggaggataatgtggctgctatataaaagctgcccagttaggcttcaaggacagtctggcattgagaacaaattgacacacactttgggggggaaccattgcttggattgtggggtgtgtattcccttctaaaggcttttatgtgaaacaactctcattattaccatatggcccattgacaaacgattttgcaatctagaggaatggaaatgtccgaagttcgcttgaatttagaccaagatgatggcggcagcaagagtacctgcagtaagaagcttaaacaggtggaattggcccacttatttcaaacagaaatacaggtgtgttcatgtcacatgggttatggaagcggatacactggccacaaacatccaagtcactgctacgaaagctgattggcgggacctcagggtattgattacaagacacatttccttataggccagggttccagcagtactcctttcccggactaagatggatgaggtcatagtgtacctacggtgcttaatcttaaagaagtccgaacaggttgctgtattgggggcagaaggggagaatggtccagtgcaaactgggcaattaagggactaagacagggggagaagtgatggatataatacgctcaacaagtaatatgacagtgggccacaagagaagttacgcgtggaaaatatgaggagagcatagatggacttccattttgttttgtctggtattgnnaagga

SEQ ID NO: 544015 - DNA, 270 bp, Homo sapiens
tctacatccagtgaacacataatatacgaaagagaaacatctgtattgctcatataagaaagttctagctactccgagatagataagcacaaactaaccacaacattacccttaatccaaagcctaatccagagaaggaccctaactctcttcaattctgtgaagcctgagagaggtgaggaagctacagaagaaaagctggaagctagcaaaggtaggttcttgaggtacaagggaaagaagccctctccagacataaaagttcaaggt

SEQ ID NO: 544016 - DNA, 811 bp, Homo sapiens
ggatggtctttgttcaacaagagctggcagagtagttacgacaaggagttcaaaaattccatgaatcttggccaggcatggtggctcatgcctgtaatcccaccactttgggagggtgatgcaggaggatcacttgaggccaggagttggagaccagcctggccaacatggtgaaaccctgtctctactaaaaatacaaaaaaaaattagctggacctggtggcgcatgcctgtaatcctagctactcaggaggctgaggcatgagacatcgcttgaactcagcaagtggaggttgctatgagctgagattgtgccagttcattccacccttgggcaaacaggggtgagactctgtctacaaaaaaacaaaaaatacaaagaccacaacaaaagcagaacacacaagagacacactcacagaagcggacaacataagaagaagagcaacactgaagagccgaggacgacaacacacactgagagggcgaaagacgaaaacaccaacaccagggggcgacgaaaaaagatgacacacaccagaaggaacaaagctgatacaaggagaaacaaggcgcgatcacacgggtatacagaacgaacaaaacacgaacgagggccacacacaccgcacacaagccactcatggagccacaacaagagagacaacagcccgaagaaaagagacgcgacacgacacgaacaacaaacgacactacgaccacccgtcgcacgtaggaacagacaaaagggggcacgaacacaaccacacagacaacacagaggaccgaggaacacaaacgggagagcaaa

SEQ ID NO: 544017 - DNA, 626 bp, Homo sapiens
ggtttttctctctatacccctctcctcatactactctcatataaatgtttttgtttgaccaccctcctctcaacctaataggatatgcctataaaacaccccccaccaccatgttattgtgaagaaaaacatatattataactacaaactccactcctctctcctattacacgcgctttgtttctctcacactcgccgcacactcttctaacaacaccacaccctcttttcactttcacgccccaatcactctgttcacacaccacatcttcttggagtaatcaccctctttctgcagtaacacgctcactcacatactctcttctataaaacaagtggctgcaaatacatacaagaaatgaatagataatatacacttctttaacggcagagcctctctgcatcctttaccctctggtgacaccaacacacttttttcccctgacccagttgtccctcctaaatagtctgtatttacacagcgggcaacgctatgaattattactccccctctttatctattctgttatatcaacgattcatcattgaccctctcgaacctttaaaaaaaggaggagatatgaaacaatacaacaaccattataacccagtccacaattaacaaa

SEQ ID NO: 544018 - DNA, 443 bp, Homo sapiens
tttaattctagaaggatcccgaggacgaggaggaagagaaagaattgaccccttgagttaggccccccaaaggttggaagaggcagattggggcctgcagattcaatgtggatgaggaaccttttgtgctgcccctgtgctggggagatggagcaggattgcccaggctccaaacctgcaacgagtttcacaagcggatccaggatattgtgggatttctgcgtgatttgggggctcagcgggaggaagggcggtctcgttctgattacctgaaccggctcaagaaggatctggccatttactactcttatggagacttcctgcttggcaagctcatggacctcttccctctgtctgagctggtggagttcttagaagctattgagttgcctctggcccgtcaccctctgaaccattaccttgaaaacccgacgaattagatt

SEQ ID NO: 544019 - DNA, 753 bp, Homo sapiens
ggcatcacttcctctcaagcttggcgtcgtgtggtggggtcacacgcgggttcaacagtgcgtatcgcaagaagtgttgattgtctagtatcggggccctatctatcctggtacacggctatgatgttcgtccgcaacgattgctgaggttgttcatgattttgcaaatctacatgtcatatcatattttaaagaagaagctgcaagtcctcgcaaagttcaggtggaccaagagcgagttccggaaagacacgctggtagagagctgtacagtggataattcatttgaatttgaaagacgtagaagtgaacctatcaagataccagcgagagctagtggaagtaaatacgtattgagtgcgatgaagagagttgaagagagatcaagacagaagcgccgaagttaaatttataagtgaactagtttgtaatgacaaaataaggagctagcagagagttgaggatatgaaagaagtcaagtcaagaaggtccatcttattcgagcccctcttgcaggcaaggggaaacgagtgggacagagaacatggtgacagcagttacaagaggatgtggacgtggacagatgctccttaaaaatctctgtaaccatttcttgtatgtacattttgaaaatgccctttggatacttggaactgctaaattattttattttttacataaaggtcacttaaatgaaaaggcgattaagagacatcttttccgtgcattgcatctacataatatcagatatta

SEQ ID NO: 544020 - DNA, 608 bp, Homo sapiens
  misc_feature (2)..(2): n is a, c, g, or t
  misc_feature (371)..(371): n is a, c, g, or t
  misc_feature (405)..(405): n is a, c, g, or t
  misc_feature (450)..(450): n is a, c, g, or t
  misc_feature (503)..(503): n is a, c, g, or t
gnaactcacagtgtaccaggtgggggcactgttaaactcaagctatatgaagattctgccatcccccttccagctgagtcacccaagaaaggtcccaagatggtggcctctcgtgtcttgtcacctcctccagctgaccctcctaccagcagtttcagtgttcttggggacgtggggccccccattaggaaacccatgaatagagggacactaatttctcttctcgtcggcggtcctcacatgttcgtctcagactcttgatggcctggcccaggccctcctatcccccctccctcaccattctctactctcctgcgggcctcctccccgccccggccccccctctttcttaccccctcccttctgcctcngcccggtttccctatgtaggtcccgccccctcantgggtttccttcgttctttctcccccccactttgttttctctttnccgatcgtgttgtcctcctttcttttccgcctctctttccctttttcaccacnattctcgacttcccccgtcctctttcgcccctcactcactctccccacccttctactccctcaccttttcttttctccctttcccctcctccctctgtatgttct

SEQ ID NO: 544021 - DNA, 135 bp, Homo sapiens
ccctaaaaatttctgtggttctggtaccctctgagtagggctataattccctactttgactgtgtgcatcatttgtaagctagcagatctatgtgggtgaaatgcacagggagcttggtagattgcgggtgtatg

SEQ ID NO: 544022 - DNA, 352 bp, Homo sapiens
tggtcacccgagatggggatgtacaatgtgcacaatcactagctcactggcagcctacaaagttctggggctcaccgcaatccttccaactctcagcctccacaggtagctggggataacggggctgtgagccactggcgcccaagccttaatggtcttgggccagttgggagcttcttgcaatgtggactcctggagatgactgggtcaagctcctggatagttaacgtagcgatcttggcatatctgggtaggaccaggaggtggcagagcttatcatttaaccagtcccaaccccataagtgtcgcctagcccagagggtcggcctgggggaaccgagctcgaatacgc

SEQ ID NO: 544023 - DNA, 361 bp, Homo sapiens
gccttctcagcagcagcctgctcttcttctatcaatctacttcaggatctctgtagaagtacagatcaggcatagacctcccatgggtagtacacagggaaataggtgccactgcttgcgctgtaacttccctgagccagtatacaccacatcaaacccactgagtgagctccctcgtatgtaagcatgggatggcaatgtccacataagcgcagaggagaatctgtgttacacaagcgcaatggttaggtaggttaacataaagatgcctccgtgaaagggtggtggtcagccctggggtcagtaaaccacaagaagccgtgactccccgaaaaggctagccatgaatctggtatagtga

SEQ ID NO: 544024 - DNA, 238 bp, Homo sapiens
tggcatttgatttttttttaatttttcattcagtttgagatttttctagttctttgtataagtgattttcataatatatataagtgattttcaatttaagcctggacattttcacattatgttctgagatgcttgctctttaaataaaccttctttttcatctgatcttatctgacttttttccagcaggggtgccaactcattactgccaggtgaatgtagaagtctgggttcccta

SEQ ID NO: 544025 - DNA, 749 bp, Homo sapiens
ggcatgtgtgaagcggcgaaggaggtggtggctgcgttggtgctccgggaagccgttcgggctggtggctgtcggccgcggggtggattgcactcgcgcgcggggatgggccactgcgtgatccattggttcagctgttgccatttcctgtgaccatctcattgacaaggacatcggcgtccaagtctgatgccactcgtgcgtccttttacaggatgtgggagggggcagctgggctgagcttggccggagtgaacgggtgcggaactgctcaagccctgagttctaccaagattctagcagcttgagtacggtttgagacagtccagaagctacgctttgtgaatctatgacatagacaacaagacgccagagctgagggctgatgacttcctagggggtgctgagtgttccctaggacagatggtgtccagccaggtactgactctccccgttgatgcttgaagcctggaaaacctgctggtgcgggggaccatcagggtctcaggcttcaggaagttaacaggaccaatcgtgtagtcacccatggaggtcgcaggccagaaagcctagataagaaggctgtcctgggaacattcagatccatttctgcagtacttccgcaggggtgatgggcacgtggcccctggtgtacagcacttggaaggtcatcaagaaacactgaaccttaacatggacgcgtctctacagtcccgggtcacgcattactggggtgggacccgccagaa

SEQ ID NO: 544026 - DNA, 789 bp, Homo sapiens
  misc_feature (383)..(383): n is a, c, g, or t
cgaggtagaagttcataccaggtcccagggtattttctcaagcctgtataaaagccctgtttcccggaccaataaggaacccaccagagccctcctcgagtgggccttacagcaatctagctgctccagactttaagaaaaaccccgttcttgtgcaacacccattttttatttgcaaaacaccacctgtgtcccccacccccacaaaaactggttcaaaacaagcaaagcaagttgtgccccttattcctagaggtaagagtgacaattttctgtggcatcatttgtatactgtgaatctttcctcactcccaactgggcaaagggacttggtgaaggacgggtgtttgtttaggttttgctaaattaaatggtgtcaattntgctactctatttcctaaatgccccagtgcctattaggagccatagcagctaaatggctagtgctttcctatcatgaaagggacaaagtcatttaattctaaaagtctcgtgatggataagaatgtatatctataaggataacaaaaggttgcatatagagcagctcccaaatcctttgtcatttggtggaacttgtttattccaagctattttaattttaagcagaacttcagtcttggaaaacaggaaagtgagaactccttcctgaggccacaggccacggctaggtccagaccctactcatttgggggagctgtttgctcaacacggagctgaagcccacctctgcccagccccaggtggagtctatccttctctaccaggttcctcagaactctgccctca

SEQ ID NO: 544027 - DNA, 747 bp, Homo sapiens
  misc_feature (335)..(335): n is a, c, g, or t
  misc_feature (337)..(337): n is a, c, g, or t
acacattctcactttgtcaccaggctggagtgcagtggagcaatcttggttcgctgcaatctctgcttcctgggttcaagtgattctcctgtctcagcctcctaagtagctgggactccaggcgcataccaccatgactggctaatttttgtatttttagtagagacggggtttcaccatgttggccaggctggtcttgaacttctggccccaagtcatctgcctgcctcagcctcccaaagtgctgggattacaagtgtgagccactgtgtacagcctttgtgttaacttactttgaattagccccttattccaaagctgcctcctgaaaggangnttcctaaaaggtgttgctttggggtaaataagaggtgctggtgaagtgagactagcttgcgcatctctctgccatgaaggaaactagctccgcagacgttttactaaccacagcagaccccctccttgaggaacccagaagggcagagagcatcagatgaaatcaactgctgagagagggaagtgagtgctgtgttgggcaccgctgccagaaactcttgagaatgagcatcgtgtgccacttatccactgcttgccgacttcagtagcaagagcctgcagattgctcatggataaacctcatctttgtgggcccacattggtttatgagctgagtcataagactggctggctccttagaggctgcttggggattctctaggcagcagaaaccaggggagaagattgtag

SEQ ID NO: 544028 - DNA, 438 bp, Homo sapiens
  misc_feature (161)..(161): n is a, c, g, or t
cattcgggctgagggttcacttgcttccgccgccgttggaggagttggccttgaaaaagctggtgacgtttacgtgcttggcaccgggcttcagccccaaggacgtgttggttcgttggttgcaggggtcacaggagctgccccgcgaaaagtaccttttntgggcatcccggcaggagcccagccagggcacccccccttttgttgtgaccagcatactgggggtggcagccaaggattggaaaaagggggacaccttttcctgcatggtgggccaagaggccctgccgttggcctttacacagaagaccattgaccgcttggggggtaaacccacccatgtcaatgtgtttgttgtcatgggggaggtggggggcccctgtttttgagccgcccgcctgtccccccccctgaataaattccatgttcccccaagca

SEQ ID NO: 544029 - DNA, 123 bp, Homo sapiens
cacacaggcgcacttctcaaggctcaatgaactacataatgaatgcagaagccttacggatgctgatgcgatcaactggacagaaagggtatcagtgtatggatatgatgaacatgactgacc

SEQ ID NO: 544030 - DNA, 346 bp, Homo sapiens
gaatccgtctcacgggtggagcgcgccctccgcaagctgtcgtgcccttcctgcagtccagggctctccgatcgcctgtgtgcagcaaaggggcctacctgctcatggagttagccaagagccagggcaagactctcaagatttatgaaggtgcctaccatgttctccacaaggagcttcctgaagtctccaactccgtcttccatgaaataaacatgtgggtctctcaaaggacagccacggcaggaccgcgtccccaccatgcatgcattgctcggtgtccggctcacggtgtgggggaaacaagcagggtaaggacaaaaatggcttttcaaatatggcaaac

SEQ ID NO: 544031 - DNA, 291 bp, Homo sapiens
accaagtacactaccaccgatctggtcattgatcttcagagtaagcgcggccttgacaaccctcctgcaggctgacatctggcagcaggtcgcagacgtcctgcagctggtagctactctgatggtagctgggcagcatgcctgtggagactttttccaggtcgcacctgatatccagaagctaggagtacagtcccttcaaaccatggacctggaaagtgatccgctgggacagagtgcccaccgacgtgtcattaatatctcgtaacaagatgtcaactccaacagggt

SEQ ID NO: 544032 - DNA, 348 bp, Homo sapiens
  misc_feature (204)..(204): n is a, c, g, or t
  misc_feature (297)..(297): n is a, c, g, or t
acaaacagttcccaccatgaagagagagtaggtgaccggaaaggagtgcgtcttaagcgcgttcgctgaatttgcaccactcaatccagcaccgccgcacggcgccgctccttagacctggactccggcaccctcccgccgggaccgcacttagcagtggatagtctgtcctcctgaagaacgttgcgctccgacctccaacgncatctaggtcaaaagttctaactccattctcctgacctggccgccaatctagaaaatcatcttgttgccaatcaaacgtgtgtcgcgccgacntgtgacctcaagccggtacggacccagcgggcgggaagcctgcggggcgtt

SEQ ID NO: 544033 - DNA, 402 bp, Homo sapiens
  misc_feature (1)..(1): n is a, c, g, or t
  misc_feature (86)..(86): n is a, c, g, or t
ntctcaccagtctacaccagtcaccctgtcttagcaaagggaatgccatatcaccacctgatagtaccataaagagctctggatanctcctgtgtgagatgtagaaatcgacctagttttcagcgactttgctaggaggaactgtgatccccccagcccaggcaggtgggttcctggaaaacatgccgtagttgagtttagactttccaggttttcttagcctcgatccgtggagaaacttgcctgttttctttgagttcttgtgttagccagtgtcagtatttattgtttcccactgtgttaacacaggaagagttttgcaagtgtgttaattaatgttaaatgataactagaaatgtttcctttaataaagaatggctgtactcagcatgctcaacatca

SEQ ID NO: 544034 - DNA, 138 bp, Homo sapiens
acgagcaggttacatgtgcacagcagtaggcactcaattttttttttctttttggagatgggtgtctaactctgttgcccaggctggagtgcagctgcacgattctgggctcagtaacaacctaccacctccgcgggt

SEQ ID NO: 544035 - DNA, 798 bp, Homo sapiens
agcggggctaccgcggtccgaacatggcctcggtggctggatctggtgctgccgcggctccgagctcactgctcctcgtgctggcggcagcaacattcgcgagcccgggcggcctcctctcctacgctgctggtaggagcctccagatagagagagcatccggtctagtggatgtctgatcctggctgtctgcaagcgtttgaatgcataacatgcatctaggagagtcttatggtgtctccgaatcacatcttgtctcacccattctctcatgcacttgttgcaaaaaacgtggccaggggaagacgcttgctagcactaacacgtgtaaagcacgaagcctaggagtagcctcttggctccatcgcctgcaaacccattctataatcaaagatcctctgtaatgcaattgagtcgtcgcagggataccctctcgtgtatgggacctttgccttcgtctacatagctgccttggtgtctcggcctcgtggccccttgcccgttgcgtacgcgagcatgacggcgagctcgacgtggcatactagatacaagtgtggtctctctgcgacacatcaggcaatttcgcatccagtgtcccttggaaggaagcacagtgaggatcccgtcggagcatcctggagccattgaacggccctcactctgatgtcagtgccgacaccatacttccaccgattcaccctgttccccaacctctcgagatgaactgtggcatcgactggcaaccacgtctggtattacttgggatctctcaggggggcgctaccggacttccagccg

SEQ ID NO: 544036 - DNA, 393 bp, Homo sapiens
  misc_feature (121)..(121): n is a, c, g, or t
  misc_feature (386)..(386): n is a, c, g, or t
cgaatttggtaatttggttttagccttagtttccttcctggttcgccacctaagcaagattaattttaagacacttaggtcaataactgtgccctataagaatttcctttgggccaggcantgagtgtcacgcctgtaatcccagcactttgggaggccaaggcgggcagatcacctgaggtcacaagttcgagaccagcctggccaacgtggcaaaaccctgtctctactaaaaatacaaaaattagccggggtggtggtacatgcctgtagtcccagctactcaggaagctaaggcacgagaatcatttgaacactggaggcagaagttgcagtgagctgagattgtgccactgcactccagcctgggtgacagagtgagactntgtcttg

SEQ ID NO: 544037 - DNA, 400 bp, Homo sapiens
ccaaagtggcagctccctctgctcttccacaccacccgctcctaggccctggcggctcccgcctcaccagcctccctctgcccctagcaaactgagcggaaatgtgaatggggtggggcagccaccagcccctgggcctggactgctgcgaatcagtgcctccgccccgagctgtagggctgcgggccccacgcccacccccagtgcccttcactgggacgattgcagagcctggtgtacaggccgttcgccagtgggtcggacccttgtgggtgccacattcttaaatgtcctgggcacacaaacaagggaggcaccctcatccaaatcactaacacattcgtgagccaaacacacgcttcccgttagatttgtcgaagctggttgtgagaagctgtgg

SEQ ID NO: 544038 - DNA, 384 bp, Homo sapiens
actcagtacgtagttccattcaatctattgagatggcttttaatctattttgaatcagcgcaattcttatggctactgctgccatgctggtgtcactttgctttctcttgtccctacccctggtcatgttcttgttttattgttgtgtgctttcccagtcccattcctcagcttcttcacaggcacccctggagatatgaaggattactccccatatcccttcctctcaggctcttgactacttggaactaggctcttatgtgtgcctttgtttcccatcagactgtcaagaagaggaaagggaggaaacctagcagaggaaagtgtaattttggtttatgactcttaaccccctagaaagacagaagcttaaaatctgcgaag

SEQ ID NO: 544039 - DNA, 241 bp, Homo sapiens
ttgacctagaggatcccgttggcgtaggccaacgcccacccccagtgcccttcactgggacgattgcagagcctggtgtacaggccgttcgccagtgggtcggacccttgtgggtgccacattcttaaatgtcctgggcacacaaacaagggaggcaccctcatccaaatcactaacacattcgtgagccaaacacacgcttcccgttagatttgtcgaagctggttgtgagaagctgtgg

SEQ ID NO: 544040 - DNA, 1128 bp, Homo sapiens
cataacatcgctgcatgctgtagcttgtgcaacacagggttgtccgtgatccacaaggcattagcagcatgggtggcatggcagaaatcgttgtccaacacagaccatgtccgtcagtatgttcacaggctcgtggcagctgtacactccagcacactcctccatctcttcacgctccctcctcgtctcctctccaccctccacgcccacctaccgaactcaacctgaccaggctccacactacccatcactccccgcccttccacacaccctcccctactcccccaccacacacccagcacccacaccccctactgcccctcccctccctacccacccactcctccccgctcccccctacccccgcctccccactcccccactactcccccccccctacccaccactccccccccacccccccgcccacacctcccccaccttacccctcccctgcctcgacacccaacccacaacccctcacaacaaccccatccgcgccccacctccccacacttaacaacatcctccccaaccactacccactacccccgccaaaaccacaaccaacaacaccccacaacacaagcacaagaacccaccaccacaccacaccacccacccaccgcacccgcacaccaccacaggcccttgaccaaacaccataccccaccccccccacgcacctcccccacaaaccccctcccccaccttccttcaccaccaatctccacacaacacacctccacaacaccacccacccccctcccaccaactcctcacaaccaattccctcacaaactctgccacctcccccccttattcaccaccctatccaccaccccccacacctataacccaccctacatcactctctctaccgccccctctcaccaccccaacccttcacaacacaaacatatctacccccctaccccccctgcgtccccccgaccgccaccacggaacgccggcaacctaccgccgggggccgcatctcaccacagaacgctctcactcacctcctcctccgggcaccgacccactccgccccgccccagacaagcgcgccctcacgcgcaccaccccccccacctccactagaccgcgagcccctaacacccccga

SEQ ID NO: 544041 - DNA, 478 bp, Homo sapiens
  misc_feature (448)..(448): n is a, c, g, or t
cccccattagttgaaaattcatatatataacttttgactcctccaaaacttaactactaatagcttactgttgacaaaagccgtagtgataacatagtcgattccacacatattgtgtgtgttatatgtattatattctgtgttcttacaataaactagagcaaagaagatgttattaagaaaatcataaggaagaaaacatatatttagtattcattatgtggaagtggatcgtgatcaaaatcttcattctcatcatcttcacattgaataggctgaggaggaggaagagggggtaggtcttgctgtcttaggagtggcagaggcagtagagatgaaggagttcgtagaaggggaggcacgggaggcaggagaggcaggcacacctggtgtaacttttattgaaaaaaatctgggctgagcaccatggctcatgactgtaatcccnagcattttgggagccaaggcaggaggattc

SEQ ID NO: 544042 - DNA, 703 bp, Homo sapiens
  misc_feature (24)..(24): n is a, c, g, or t
  misc_feature (40)..(40): n is a, c, g, or t
  misc_feature (51)..(51): n is a, c, g, or t
  misc_feature (68)..(68): n is a, c, g, or t
  misc_feature (72)..(72): n is a, c, g, or t
  misc_feature (77)..(77): n is a, c, g, or t
  misc_feature (90)..(90): n is a, c, g, or t
  misc_feature (92)..(92): n is a, c, g, or t
  misc_feature (108)..(108): n is a, c, g, or t
  misc_feature (129)..(129): n is a, c, g, or t
  misc_feature (136)..(136): n is a, c, g, or t
  misc_feature (148)..(148): n is a, c, g, or t
  misc_feature (179)..(179): n is a, c, g, or t
  misc_feature (185)..(185): n is a, c, g, or t
  misc_feature (188)..(188): n is a, c, g, or t
  misc_feature (212)..(212): n is a, c, g, or t
  misc_feature (247)..(247): n is a, c, g, or t
  misc_feature (265)..(265): n is a, c, g, or t
  misc_feature (287)..(287): n is a, c, g, or t
  misc_feature (296)..(296): n is a, c, g, or t
  misc_feature (318)..(318): n is a, c, g, or t
  misc_feature (324)..(324): n is a, c, g, or t
  misc_feature (336)..(336): n is a, c, g, or t
  misc_feature (397)..(397): n is a, c, g, or t
  misc_feature (402)..(402): n is a, c, g, or t
  misc_feature (407)..(407): n is a, c, g, or t
  misc_feature (410)..(410): n is a, c, g, or t
  misc_feature (429)..(429): n is a, c, g, or t
  misc_feature (460)..(460): n is a, c, g, or t
  misc_feature (470)..(470): n is a, c, g, or t
  misc_feature (618)..(618): n is a, c, g, or t
  misc_feature (635)..(635): n is a, c, g, or t
  misc_feature (638)..(638): n is a, c, g, or t
  misc_feature (670)..(670): n is a, c, g, or t
tccatgtgcattaatttgtttatngaccctttccccaggngggcagccccnccaggaaagggctttgngggntcttncaccgcggtcccngngtacaggacagagccnggcacacaccaggggccagtnaatattngcggaaggaagncacaaaaagggatcagccaccattactttancaccangancaacaggaaagaccactgtccccncccaaccccccccaaaaggctttgaagcagaggtnaacattaattcactgtcncaggggacagcccccacccggnggccagggngggggggggcggggaagggggngagagnggggccccacgncccaggccccttgaaaccccccaccccacccagccaggaaacaccacgaggcagccaaggntaagnagacnctngcggctttgttataaatanattatgtacatccaaaacatgacattaaaanattaccccgngtaacagaaaagaaattaaggctttctattatttacattaaacaagcgagcacctttaaaaaaaaacaaaacaaaaaagccctactcttccttctctgacatactctggccagaggggataccgtgtcctcttccaaatgaccaagangctctgcaggggctgtnccngtgaagacatcttggtattggaaacatcagcnctggcagggtgggggcagcagaaaagtaggggt

SEQ ID NO: 544043 - DNA, 116 bp, Homo sapiens
caccaggtggatcttcttgtgtctcagtcacacacttccgtgtcccaccggttagcccttgcgctcggtcaccatccggattgtcatccacgtgcaggcgcctatacgccgtcagc

SEQ ID NO: 544044 - DNA, 644 bp, Homo sapiens
agcacgttcggaaacaaatcttaatctatcaaagttcatgttagcaccagaaaggatgggaacataggtgtttttagtgtggtcaatttctggatgtacggtagagatgtatttcttcataccggctactgaaagggcaccagatggttctacaatacttctagtatcttcaaaaatatcctttactgcagcacagatttcgtcagtagttaacaagaacaacttcatcaaccacttgttgggcgactctaaatgtttcttcaccaatcatacgcacagacgtaccatcggcaaaagtacccaccacaggtaaaggagttctctggttgcgttgcaaggaattatgtaaagtggccgcatcgtaagtttcaacaccaatgattttgatatgaggagcaacccttttcaaataagcaccaataccagcaattaaaccaccaccgccgacgggaacaaagacagcaccgatcttattagcggtacgtacttgtcttaggatttccatagctacagtaccttgaccggcaatgacataaggatgatcgaaaggaggaatgttcgtcaagccacgctcttcagccaatttggcacattcagccttagcctcgtcaaaatcgttaccatataggacgacttgagaccct

SEQ ID NO: 544045 - DNA, 403 bp, Homo sapiens
  misc_feature (152)..(152): n is a, c, g, or t
  misc_feature (221)..(221): n is a, c, g, or t
attgctttgggtcacccactgggaggatctggattggttgatgaattaaggcgtcgaggtggaaaatatgccgttggatcagcttgcattggaggtggccaaggtattgctgtcatcattcagagcacagcctgaagagaccagtgagctcnttgtgacccacttttatttaatgggccaggccccagtaaaccaagtgcccttcaaagcagttgccacanctggccatgtcctgccattgaaacagtaattgagtttgttcaacccatggtgatacaaaaatgcattgatcatgaataggagcccatgctaaaagtccggtctctcagatttgtcccagtgaaatatgtatttctgaactaaaactcacctatagaagccattaaaagaaattgtattctta

SEQ ID NO: 544046 - DNA, 155 bp, Homo sapiens
gagctttgtaccggaacattcgtgtcaaggacccctcccgtgaaggtcggaggacagagaaaggtcagcagggtcagagtatgtgaggtcagagggcatgagggtcacaggtcagagtatgtgaggtcagagggcatgagggacacgaatgttca

SEQ ID NO: 544047 - DNA, 270 bp, Homo sapiens
ggctgtgcacggtggctcatgccgtaatctgtttcggaagtagccgttgggagtacgctgggcccacaagttgagaccagcctgggcaacatagtgagaccccgcctttacaaaaatttaaaaatagccaggtacagtggcatgcacctgtggtcccagctattgaggacactgaagagggagggtcacctgagcccaggaggttgaggctgcagtgagccatgattgtaccactacactccagcttgggtgacagtgagaccctgtgtc

SEQ ID NO: 544048 - DNA, 313 bp, Homo sapiens
aagctccaacaagataaactctagagaaagacgggcaggctgcatctttccgttcaggcaacttagtcattccagcctgcggctttggagaatacaaaccgacggagggacagaagagatcccccaggacaggataagttgtttaacaaattcatggccagactgcttctgtaagcaggcctcctgatcccttgttcccacttcaacttggacaggacctcccaaactgggggcctcccagctaacccccaacaagcaattccttttggccaaatggacaatgtgaaaacatgtttcctcgggacaagaggct

SEQ ID NO: 544049 - DNA, 393 bp, Homo sapiens
ggagtatacaaagcacatatgatcatacttgctgaataaagaaataaaaatgaagaggcactccagcctgggcaacagagtgagatggtctcaaaataacaaaaacaaaaacaaaaaacgactggaaaggagatgagggtacttgttgaagccatattatattgacacgctctgtgcatcggacttttatatacacttgtctcagtctacttcatctcactataatccgttacaacgtacctcttttatgtggggaaatccccgatataactagaagacgaaaggcaagttcaagaagttccattgattatgcccctaaggttccctcaatttagcaaagcgtcaggcccaatggatccaaccgcccgtgtatgtattggcacgtgacaggac

SEQ ID NO: 544050 - DNA, 908 bp, Homo sapiens
gccttttcctggggcatcgtggactgagcgtgctggctgctggtcaccatcatctttcatctacgacaagtgccggaatgacccgtaggacgtactggatgatgacagacgccggttctgctaacccctgacagagtccagcgggcagcaccagaatgataaaggcaagaactgtgctcgccagtaggaactcttccctgaggccgcggtgggccgaggacgctccgcgtgctccacgtcatgtcaggctcgttccgccgtgagatccccatccccgagtgcttgctaggattcctagttctcacctcttaaagaaaaccccacctccgttagtattcccgatctatacaatcttcccattctttggattatagaaatagttgggttttctcctattcagggattctgttcccattaggtatagttccattctgaagtgtttctacgagagcccgggagctgctgccctgccggacccgttcttgtgagccttttcagcctctgcgtggtctgatgtcatggccgggtgggcggcactacgtcttctccactggccggattcagtgccaggtccttgcgctttgtggaaagtcacaggtcacagcgaggggccccgtgtcctgcctgtctgaagccaatgctagtctggttgcgccatttttgtgcttttatgtttaattttctatgagggccacgggtctgtgttcggactcagacctcaggggacgactctgacctctttggcacagacggactcacttgcccaacaacgaggcgacccgtacagctcagttaatcccagcccctccttgtccgtgcctcgggggcactctggaaggggttggtgggaacggcgggcacgcggactccaaacgggaacctccaattacccctaggaagcgggccta

SEQ ID NO: 544051 - DNA, 188 bp, Homo sapiens
  misc_feature (35)..(36): n is a, c, g, or t
  misc_feature (182)..(182): n is a, c, g, or t
  misc_feature (185)..(185): n is a, c, g, or t
atgagccggcccggcttctggacttctggcatacnnggacttctggcatacctggaccttctggcatacctggaccttctggcatacctggaccttctggcatacctggaccttctggcatacctggaccttctggcatacctggaccttctggcatacctggaccttctggcatacctganctnctc

SEQ ID NO: 544052 - DNA, 432 bp, Homo sapiens
gtcagaataccctgttacaggttcgccgtagtgtaatatctttaaaagcagcagtcattcctccagcagtaagtggatgcctcatattatatgcgtctcgcagaagaagaacacctcgttgcttcactgatgaaggaggaaggaggcttgctggtatggacctcagatgagaatggtcagaggcttctaagaatggttcttgcaggtgatcaggtatttgtgggtaagatggtgtcaaccatgtattctcttaaattccttggcatttctcctctaatgtcaacaagtactcgagtttcactgggatgaaatcgggtagatgagaactggactcgggttaggtaagataagttgagcatgatttgccttaaaagggggtgcatgctgcataagaaagccgagaaaaggagatgatatagagactttattgga

SEQ ID NO: 544053 - DNA, 229 bp, Homo sapiens
ggtatttggtactatgataaaaatagaggcaatcttagataagcaagcttttagaagcatgaaaatgaattagggatagtaagaaaaataatttacttaacgtgaagattcaaatttctataggtcaaagaaccttgtaaaccaaattagaagggcaaaacacgacttgaaaaaatttttgggttacattaatttacacggaaagcgatagtatcacctcacctgtgtc

SEQ ID NO: 544054 - DNA, 610 bp, Homo sapiens
  misc_feature (17)..(17): n is a, c, g, or t
aacactaggctatagcntacaagtaggtactataagctagcttaacctccaagcatcctgcgtcaaaatagatagaaaactatagggtttaactagtggtccgaaaatactatgaggtataaaagcacaaatagggatagcatataataagcacatctagtacaaaccctggtagtctttatgggatgcatataatagcacgtctgtacaaaccctggaagtctatatagggatgcatataataagcacgtctgtacaaaccctggtagcctctcagaccaggttagtgtactagtaagaaacgtgataggaagagtctctatacataagggtggaaattgtaacaaactcattattatcttcatttcccaattttgagtcttctaaaaactccaagaccatgctggacatttcaagaaaataacgttggaagagccaatgtcttagtgcatatatacatcttcagattcagtgtttatgcaaataggcccacgggcagttggctaaagctccagaagtaaagtctataaagcaaatacccagaggaacctgagaaaacctctcgataaagtaggtaaaatccttttggtgaaccacataaaacaaagta

SEQ ID NO: 544055 - DNA, 169 bp, Homo sapiens
  misc_feature (34)..(34): n is a, c, g, or t
gagtgggcgagtgccgcagcgtgaactgcttctngagactcaggtctgagtgctggtctgagatctggtcttccctcgcctcctgttctacttcccatgccttctgtaaggtcctgccgtggcctgaagtgtagcccttcctggagtacacagcgagcatgctgtgccg

SEQ ID NO: 544056 - DNA, 1917 bp, Homo sapiens
  misc_feature (344)..(344): n is a, c, g, or t
  misc_feature (614)..(614): n is a, c, g, or t
  misc_feature (1917)..(1917): n is a, c, g, or t
ggtacctgattgatgccgtctacggtgggctcacgggcagcgagctctgcggtttacgcattcactagccctgggatgcccgtgattgatgggggtgtcagggactgggaccttcgcatggacgccgtgggagtgccgctctcggtgcgcaccgagtgttcgctctctggggcgtgcgtgccatatgactggctgcatgcgactctgatacatggactccagggccatgactcaacggaccatgcggtcctgactctcccttggtatggggggccaatctctagtcacgatcgcacgtgtagccacatgtgggcttgggggacggacgtatgtgcggggccatntccccggcgtccacgtggacgtgccatcacatctgccttgtcgtgctggcgcttctcgttgctatcacttgcacacttcgggcgcacgcttgcacgttcccaatagagactggaacctagaggagtcagaggtgatgctatcccaagctctgtccaaattactccaggacatgcaaccgaattcgcctagggaaccgagacgcggtggaataggccgtgggggaggcatcgccaccgtgacgagggggggaccccgggagtacgtggatncggggcgcattttccttgggggacgctaccgaagacgaagagtccgtgggctttccccccgcgggtgaagcctgttgggagacgtccgcccagatccggggggtcacgcgaaggggcgacatttggaaagcgaacggactacgcagatggagcgccgattgaggaaacccgaacgccgaaaattcccccagtgggggccccaacacagcactgaaaacgccctttgttcccagttccattttgttcccgttcccgtttgcggcgttccccaaccccttaaaccgaccgccgcgggcggcaccgcccttaccggcagcgggcggggggccttcacccccccgagaatcaccagcgtggtgggccccccaaccgtatatcccctggcttatgggggcgcgttctcttggacagatcctacgaccggaccacggtggggcgccacaggcacgcgcacggggggacacccaccttatgtcggccacgaggggacagtggtggggggtgccacccgacgttgtcaccattttgcccccaccgcttgggtggcgcacacttcgtcctgcgttggggcgtctgcttggcgaccacagctgtgcttttatcccaaggtgctcccaagtgtacacccacggggcggcgggtgggggcgtatttccccccgcagagacgcttctagaaaccactcacgtcttgtgtcgtcattccgtggcagtgtgctcacacacagccccgcacgtggtgttcgctggggagccgcaccccgttaccgtctctctaagacagccacctgcggggagagaccccgccggaggaggaggctgtctaacccccaaccaggccgatacagccgacggacacaaagactgcgggcacccggcgggcggcaaccccctgcacagagcaaacaggtgtacatgtgcaaccccgccctctgctagaacgggcggcacgcagcacagcgtgggagtcgacgagagccacccactcaccacgagcgcccacgcacgcgccaccacagaccactaagcagcacgacgcaccccacccacccgggccgacacaggcgcccgcacgccgcgcacgagctcacacacctacaaacgagaccagacacgcccccgctgacagcaaacgctgaccactcactctctacagcactcagcgcgccgcacgccacggcgccgaccaccagcacgaccacgtacagcagaggcgcccgcgctgacatcatcctcacacgccgaactgcattacacaagcgacgtcgcgaccagagacgatcccgccccgccacagacgatgn

SEQ ID NO: 544057 - DNA, 1590 bp, Homo sapiens
  misc_feature (1396)..(1396): n is a, c, g, or t
gggacggttggcaataacaagcgccttacgaaaggcggcaaaaagggagccaagaagaaagtggttgatccattttctaagacagattggtcatgcatgtgcaaagcacctgctatgttccaatcatcaagcaacatattggcacacagcacgctcgtcaccaaggacccaaggcaacccacaacattgccatctgcatggtctccaagggtccgtgtgtttgcacagtgcagtcattgctagccattatgccagcacatgcatgccacacttgccatcttaagcaaacaatcccacagcctgcattaactgcccagcatgttaccagtaggataacacaacatggccatgcactcaactttccccattgggacactgagactctataacgccgatagacaacaaaatagttgttatcacatagagtcaaaaacacaaatgggaccaagcacgccatgcactttagcacatgactaccacagataagaattgttccaaagaactaacacgcgagtgcgactctaccattggacataatcaggatccatgatatcatgctcgctttagaggcatacagtaacctacgaccaaaaccacgaccaaacaagaagatcacgaaatacgcgggacaagcaacgccgtactatatacatggccttcaagtgaaaacccaaaaacaaggcggatccaccggaccaccaacacacataccccgggaggcacacggaacacggcacttggaacttgcgggaaacacaagtcccaagttgacagaccccagggagaggcaaggagatagcgccaagggaaagcacaaaaatgtagaacaccttcattggacacgcacaggaaaacgggttggaggctacaaaacattgaaacgcaacttgatgaccacttcttcgccaaacagcacacccacggcacccagatgaatgggggcaacacaacacaagggaaacacaatttagtgcacaaacagcacaggacggcactatcgtgaccacgacaatgataccataaacatgataaacgtacgcccatttccattccgaccaaatggaagacttggcttcgctaacaccgagattcacgcaaataccatcactgaattacaacacacaagctggcatcattgtaagacgtacacaacgagccacacacacacgagtgcgtcatctggagaacacaatcgagcgcaggtgacaaaacgacggcccatcacccaaccacgtcgaggagacgcgccagctgcaccacaccatggggccatcgcaccaagcggtgcacaacgggaaacagcgctgctccatcgtgaggaacgaaaacaagggaccaaacaacatggcgagcagccacatcccgcacatgcaaccacacacagggaagtaagacncataacaacagcaaagcccgatggataaccgcacgacaacgcaatctgaaatagagcgacacaccataggacaaaacgccccgaaccaccaaagtgccagacccacagcacaaacacgcctagcagtgagcaacaatacacagagagacaacacagtagacgcgccctacacaacgcaagacaaagcaagatgg

SEQ ID NO: 544058 - DNA, 247 bp, Homo sapiens
aagaaagacttggtccctcttcccggatgttctacccgaaccctcacggaggccctggcccctaggtttcagagagccgagattcatgtttggacatacaccacctacaacccaggacaacgaggacattagaggtgcacccacccccgaccaatacatatcaggacgtcatactagggcactcggaagaactatggccatctatggctttctttacaccgccatgatcaacactctcgagacctca

SEQ ID NO: 544059 - DNA, 356 bp, Homo sapiens
aggatccccggttggacacacttaggccacagatatccaggcttgaggatggggctttgccatggaaactgccctcttctacccagtatttccctggttcctgtcctatcagtgtacaaataccccattttctttatccatttatctgtttgttgttggatacctatgttaatcccatatcttggatattgcgaatagcactgcaacaaacgcatggtgtagatgtctctctaatatactgatttcgtttcctttggatgaatgccaagtagtgtggttgctggattgtatggtagttctatttgtggtttttctacggagttgcatatcggtgttcaattcgtccaacccatatt

SEQ ID NO: 544060 - DNA, 381 bp, Homo sapiens
  misc_feature (33)..(33): n is a, c, g, or t
  misc_feature (76)..(76): n is a, c, g, or t
  misc_feature (155)..(155): n is a, c, g, or t
ggtcgaccgggaaatttatttcaccccgtgcgnctgtttcaggattttcccgacggccgaaagcgtgccgctaagngctggaacggttaggatagccgcctgttttagtcagtcttttttcgggagtagcccatgagcgccgtcaatcgcgcagngtggaagccgttcttcgccaatacaccgacccctacctgaaccaggacccggtcagcgccgggtgcgtacgcgccatcgacgtgcaaggtgacaaggtttcggtccagcttgagctgggctatgccgccgggctgttcaagagcggctgggcgcagatgctgcaaatggccatcgaaggcctggacggcgtcactcggccaaggtcgacatccagtgcgtgatcgc

SEQ ID NO: 544061 - DNA, 369 bp, Homo sapiens
ttgaacagctgcagtctgctcctgtgctgtaggagtaataactggttcgtgagactgtacaaaaagggcaggcatagtgtcataagagcgacacaggcatgtccaaaaagaaccacgacaaggaaaacttgtgaaacagcttgcaaaaatagaggaatctactccagtgcacgattctgctgtaaaagacgacagcgcaccagatttgatggctccccattctgaccagcatgagcacagtgacactgtgcacgtgcctgtgagctacacagactgagctccttcacccgacagttgttcagttgcgacatcagatagcttcaaaacacatgacagctttagaactgcaaatagtacaaagatgaggcg

SEQ ID NO: 544062 - DNA, 103 bp, Homo sapiens
ggatttgctggtgcagtacaactaggcttaatagggacatgcagaaaacagaaactgaaccccttccttacaccttatacaaaaattaactcaagatggaaaa

SEQ ID NO: 544063 - DNA, 349 bp, Homo sapiens
  misc_feature (24)..(24): n is a, c, g, or t
  misc_feature (26)..(26): n is a, c, g, or t
  misc_feature (35)..(36): n is a, c, g, or t
  misc_feature (55)..(55): n is a, c, g, or t
  misc_feature (87)..(87): n is a, c, g, or t
  misc_feature (283)..(283): n is a, c, g, or t
  misc_feature (316)..(316): n is a, c, g, or t
gacggtagagcggtcctgcactgntnttcaacaannttctttctttttttttttnacttttggccttttctagggccgctcccgtgncatatggaggttcccaggctaggggtcaaatgggagctgtagccacgggcctacaccagagccacagcaacgccagatccgagccatgtctgcgacctacaccacagctcgaggcaaagccagatccttaacccactgagtgaggccagggatcgaacccgtatcctcaaagacagatactagtcgggttcattanctgctgaggcatgacaggacctcctcggttttnattcttaaatggctactcagaccgctcttacgg

SEQ ID NO: 544064 - DNA, 493 bp, Homo sapiens
  misc_feature (354)..(354): n is a, c, g, or t
gggaaacacgaccgggccgcaaacttttctaatttttttcagggcggaaaaatgcgcatttttgggcaaaacatcggaagccacacatttagaaagccccgtcctgacggaccaactataatgacggagctgataaaacaagggctagggccgggctggtcccaaactgggccgggaggacactccccctgctgaacataagagacgactccaggggagccgccatcacccggcttaaaaaggagaagaaaaccgcctagacatcaatgatgccgacatctcaagtagtcgactctagaaaaaagtcccctgggaagcaaagcgcgagtaaggcactcagcggacaacatattntgatacccataaattcacaacacactaaaaagcggccgataatagcagcgccatgagggccccagaacgggccgccatatttcggtggtggcccagccgggaccaaccaaaaaaacaaggccaatggacgaatttttag

SEQ ID NO: 544065 - DNA, 148 bp, Homo sapiens
  misc_feature (92)..(92): n is a, c, g, or t
tctgatctacgacggactccccgcaccgacggggtcccacgcaacggaacgaacacttggtgactacccccctcgaccgacggactgacgcnggcctgctggtggactcacctccacggacggggaccctgcactcctcgtcgacggg

SEQ ID NO: 544066 - DNA, 126 bp, Homo sapiens
cgttcgcatgttccaagaatggaatcaggagttcgtggcaacagaattagactcttagtaaggaaaaagaagaattaattcactcaagactaacaactaaaggcctgggtctgagaacgggatccg

SEQ ID NO: 544067 - DNA, 141 bp, Homo sapiens
aaaaagagactgagagggagatcaagtgaaagggtgcaagcgaacttagtgactccttgaggtgtttgtcagttttggctttttcctccttggttgtattcttaatgaattgctctaatgaactaaatattaccctgagtt

SEQ ID NO: 544068 - DNA, 811 bp, Homo sapiens
  misc_feature (38)..(38): n is a, c, g, or t
  misc_feature (68)..(68): n is a, c, g, or t
  misc_feature (74)..(74): n is a, c, g, or t
  misc_feature (77)..(78): n is a, c, g, or t
  misc_feature (83)..(83): n is a, c, g, or t
  misc_feature (86)..(86): n is a, c, g, or t
  misc_feature (88)..(88): n is a, c, g, or t
  misc_feature (116)..(116): n is a, c, g, or t
  misc_feature (188)..(188): n is a, c, g, or t
  misc_feature (677)..(677): n is a, c, g, or t
  misc_feature (777)..(777): n is a, c, g, or t
tctctaattaccaccgctacagctattgtaaaaggggntgagttcttgacttgattctccacttgggngctggnggnntatanaananctactgatttgtgtacattaatcttgtntctggaaacgttgttgaattattttatcagttctcagagctttctggaggagtccttagagttttcaaggtnctgcaggggcagtccacttccttcatagagtctgtggggggggttgggattgctggtttgttcttgcagtcaatctggagctaaaattcaccatgcgagcctccacacactgctctgtgctggagctgcaatctagtcctgcttcccatccgccatgatgatctctaccctcccaagagagaatttaattcagggaactgattatacaagagatggagaagccaaacaggagaattggagaacccaacagttttcaacatgaggaagtcactctcaactctaggctggaaagacaaagagaggagacagtgttattggagcccaggtgttgggttccataggatctcatgtcatggcggggctatttgatggggctagagtcatgaataatatgtagccattgaagggagacccacctgatgcagaaaatggagaaaaactggccgctccatgctcctgggttctaatctcctgtgtttctggctgtgnggggaaccaagatgggcacaaatgggagcttatctaggaatttcgatctcaggggtgcacctgtggttttatgagggcgcacagaggataatgagggatncttctagggaaataattccttccaagcacccttt

SEQ ID NO: 544069 - DNA, 946 bp, Homo sapiens
cttgatatccccggacatgtcgcagcgctgtcagtggcattgtgcccgattgccggcatcacctctccggaacaatgtatgctggggtaccgctcctggctggggaccagttgcatgggtcgctcacgcttccgccggccatatctggttccccgcgcccgtttgttgccccgctcggggccactgatttgtctgcctctttgccccagggcctctgtctttccccgggggcccgcagcggtgtgtgccgactctcgccctggtgccgtggtgtccaccaccccgtgtggtctgggttggccctgccccgtgtctgccataaagggctggttgtggccccccataatgggggctcgcttccccgtggtgtgccccccgtgtcttcgcgggcggcaccccttggtccccacgatttgcgccgccagacccattgttctaacgtggcgatatctccgatggcggcgttgaattgtacttgtctgtgtcgcccccagcacgaacgtgtctgtctggccgctagtctccgcgcgggatgcgccctcagcgcgtgtatctcggggcgacgttccccccgagagccctacgccccctcgtaacttatctctttctctctcgtgaggagtacacaaccatattttcctgaacaccccgtcgaatcttcataatattttcacacgatattaaccaaaccctcttctctgttcggacccgaaacattctctcgatcttgtataagaaccctcccacccacaccctcggggacggacctaacatggagtcacccccccccctcatccacctcactctcttcctgaacaacccctataatcaattaaaattctcggacaccaaaacaagcagagggaccacccccccccaccgggtttctcccccccccctggccccccaagattttttctcaaaacaaaaaccacaaacaaaaaaa

SEQ ID NO: 544070 - DNA, 232 bp, Homo sapiens
  misc_feature (189)..(189): n is a, c, g, or t
ctagaggatccccatcatggggtctggagtgctaacataggtgcttaatgtttaagacgaggtctgccgttattcgtgaaccctcagtgagcaccatcggaccgtgatagcccctgaattcattgactctgccttcttgtgcttgttcttgtccttctctgaacttggttcgcactcatcttcatcccntttcagtgaaggcatgacctgtgcttgtgttacgccccaccat

SEQ ID NO: 544071 - DNA, 1493 bp, Homo sapiens
ggctcatgcctgtaatcccaccactttgggcaggctgcaggcagcagatttgcttgcaggtcaggcagtttggcagcaccagcattggctcaaccatggatgcacaaccccatctcgtcactcaacaaagcaccaaacacaacatcagcggggcatcagtggtgcacagcctgtaagtcctcagctcactccaggcagagcttgaggcccaggcggcacatcgccttgcacactcgagggcaggcagcagggttcaccagctgcagcccacacaaatcaggcacgaattgccctaggagttggaccagacagcggaagcaccccaggtcatccaaacaaaaagaacaaacgacacacacacaacaaacagaacacaacacaacatagcttacggcgcccgacaaccagaggccccacgcaagagacagagcgacgatactccaagccacacacaacacccgccatgagacggccgcccccgagagaaacaacacagaaaaagcgagaacaaaaaagaacaaaagagtgacaacacaacaaagcaagcgagttaacacaaacaagaagacacaaacacccagggtgaaccaagaaccaccaactgcgagcagagagaggcatcaacacagaccaaccaacagagaaaacaaaagacaacacgcccactggaaggaggacaacacacccgaggagagacaagctcctaactagaaccacacaccaagcccgaagacaaatgcagaaagagaacgaacaagagacgacgcacaaccaaagctaagaagggaccacacaaacaccaagaaccaacgagcgcagagtcaacagacaacaagggagacaagagagtcaagaaaaacacaagacaaaataacaaaacagcgacacgcgacgacgggtggtacagaacaacagacacactaacgaaagagaagaagaaaacacccacacaaaaaaagaaagaaaagacaacagacaagcaaaaacaagaaatgaagaagaaagaaaagaaccaccaacagaacagaaaaatagaaaagaaaaaaagagagaaggaaaggaggaaagaacgaaaaacaagaaggaagagagaagaaagaaagaaaaacagataagaaagatcaagagagaaaaagaagaaaaaaagagagaaaaagaacgacagccaagaagagaaaaaagaggaccagaggaaggaagagacgcaaagaaacgataacaagacgagacaactacaaccgagcaacagaaagagcaacgagcaaacaagaaccaaagaaaggaagagccagagaagagaacaggaacacaaaccgaacagacgacacagagaagacagcacgaggcaagaagaaggaccaacagcaccgacgagaagcacggagagcaacgcacgcagagagaacgacagagcaagaagcaaaaacggaacaacaaaagcgagccaagcagagccagaaacagacgaagagacaccacgaacagaagcagtg

SEQ ID NO: 544072 - DNA, 262 bp, Homo sapiens
  misc_feature (9)..(9): n is a, c, g, or t
ccccccccnggggggaaattttgggggggggggggcccctcctttgggacccccccccccctgggaaaattaggggggcctttttaggggttccccccctttcgggggggggggggtttaaaacaccccagaggccccccccccggggggggggttggggccccgggaaaattcccccatttttggggggggcgggccctttttttttttttgggaacccccccccaatttgggaaaaaaaagcccccccctttttttttta

SEQ ID NO: 544073 - DNA, 188 bp, Homo sapiens
ccccatccggcgggtccctcaatttcatcactacatttatcaatatgaaacgccctgctataccctattatcaaatgacccactcttcgtctgatccgtcctaatcacagcagttcctacttctcctatctctcccagtcctagctttttcccttttttaaaaaattaacagaccgcaacctcaacac

SEQ ID NO: 544074 - DNA, 445 bp, Homo sapiens
tcccagtatcctgagcggcgcagggaggctcctggctttccaaatcttaaagtgagtagtgtcccgttccgatgaattctcacacttttcccaagcctctgcttgtgcgcgtcgccatgcccttcctcgtacgtcttcctttggcagcggtgttgttgtttggagaccatgcggagggccgcctctgtgtgagaaagacccccggcgccatggcctgggaggtgcggccagcctgggccccgcgtcctggtgcccgcggctgtgtactcgttgtccgccaggtctgctgctattcgactcttgccggggctctggcgagctgccctcctgcgaggcctggctcctggccttgctgttcgaggccggggtgctccaggccggtgtggtgcaggcaggcgtggtccaggctggcgtgttcgaggtggacgtggtgccggccgagata

SEQ ID NO: 544075 - DNA, 165 bp, Homo sapiens
acggtgtgacccacagagatgggtaatgaatgttggaacagtagcatgtaatgaataagtgggtatgaaggtagaaggctgcagtgaccccagagcctactgaaagaatggtttgcggacagaatgcccttgcacttgagactgctgttcaaaaagggtaccgag

SEQ ID NO: 544076 - DNA, 143 bp, Homo sapiens
  misc_feature (2)..(2): n is a, c, g, or t
gnccaccctagaggatcccccttacgccgcggttcagcgcgccccggtcacacccggtcgcgtcgcaatcgtgttcagcaccgggtctcccacctgtgcggggcgcatgccacactccccgggcttcgcggtcggccaggagg

SEQ ID NO: 544077 - DNA, 189 bp, Homo sapiens
gaggtatcccccaatgatggtcctcagctacttgggaagctgaggcacaagaatccttaagctcaggaggcagaggttgcagtgagccaagatggcatcactgcattccagtctaggcaacaaagcaattctgtctcaaaaataaaaaaacaggggacgggagtggtggctcacgcctgtaatccagca

SEQ ID NO: 544078 - DNA, 899 bp, Homo sapiens
agcggaaggggcagtacccaatgcgagccattttaacatggcgtgaggtatgtttcctcatcggccccgagcccgcgtggctgtgcggatggtagggatgcctaccctactgatgaagccatagtggcacgaaactagacagaatactgacgaggagccgtcgaagtgccaggaactgcttcgagtgccaggtgcaggtgggcggcccccgacgaggaggaggaggaggaggaggacgctgggccgtggttggtccgatggacgaggccgtgagttgccgtgcgtggatgctccatttcctctggctctctcttctgccgagctttgcctgggacggccgcttccgaggacgttcccggatggacccggaatctgcgccgatggctcttattctgtggggctgatccgagtcctaggcagcgttgccaggttcgcagaatcgatataccatgtgatcaggatcttatgagcatatgcataattgcaggacaggagagatgatactccttgtatgtccccagacttgaaatgtgagtgaacggagcttacagccctttgcgaagatcagcgcctgatgacttatggggttcgatttgagaggggaacattgactttaccttcactccaacgaacgtaccagcttttccaattgaatgactgcaggctataggctggttctgtatggtaacctttggccatctttaatggaacgcagaaggaaggtcgtttagaagcggaaatatgtgggtgactccaacagtgctcgataatggcctttccaacgtgccacattgcttgatgcataggtctcttcggacatgatgcatgtgccttccctttttcaacacgtgtcggtacaacaggtgatgggcgaaaattggagttacgtggaattgtgg

SEQ ID NO: 544079 - DNA, 202 bp, Homo sapiens
aaaattttagggattttcccttcaaaagcttaggccccttagaccaaagtttgccccttctacaaatattgacccaataacccccttttaaatctttaccccccctttggtgggttatgtcaaatgtaactcaggataaaaagttgttcaaataagtgattgggaccattggaatttatagattaaaaatttgttccaagga

SEQ ID NO: 544080 - DNA, 191 bp, Homo sapiens
caagaatttgggtgggaaaaaaaaaagtgggttatcaagggtgttttgaaattttctgcagcattaaagcgggggcttaataagaataagtaataataaagaaatttctaccattccatgtcagaaaaactttattgccagtttttgacattcccttacaatttgttttgagataaaattccctttccata

SEQ ID NO: 544081 - DNA, 219 bp, Homo sapiens
acgcgcgccctccttgttggtccagaccgccacttccaagggcttgcgggtctggatcccgaggtcattgagcgtgcgcaccacttccaatccggccagcacaccgtagaccccatcaaagcgcccgccttcgggctgggtgtccaggtggctgcccatcatcaccggggcagcgtccgggtcgctcccggggcgccgggcaaacaggttgccgatggg

SEQ ID NO: 544082 - DNA, 787 bp, Homo sapiens
  misc_feature (29)..(29): n is a, c, g, or t
  misc_feature (88)..(88): n is a, c, g, or t
  misc_feature (95)..(95): n is a, c, g, or t
  misc_feature (110)..(110): n is a, c, g, or t
  misc_feature (115)..(118): n is a, c, g, or t
  misc_feature (142)..(142): n is a, c, g, or t
  misc_feature (154)..(155): n is a, c, g, or t
  misc_feature (157)..(157): n is a, c, g, or t
  misc_feature (168)..(168): n is a, c, g, or t
  misc_feature (186)..(186): n is a, c, g, or t
  misc_feature (198)..(198): n is a, c, g, or t
  misc_feature (228)..(229): n is a, c, g, or t
  misc_feature (254)..(254): n is a, c, g, or t
  misc_feature (259)..(259): n is a, c, g, or t
  misc_feature (272)..(272): n is a, c, g, or t
  misc_feature (276)..(276): n is a, c, g, or t
  misc_feature (345)..(346): n is a, c, g, or t
  misc_feature (349)..(349): n is a, c, g, or t
  misc_feature (664)..(664): n is a, c, g, or t
  misc_feature (685)..(685): n is a, c, g, or t
  misc_feature (723)..(723): n is a, c, g, or t
  misc_feature (747)..(747): n is a, c, g, or t
gctggctctcccctccctcgccaatttcngagtccagtggtggggtgcggtgtgtgcctcggtgcccgggcagacagacccccgagcngcacctnccatgggtgaggggntcttnnnnggggtgtgacccttggggtcagangaggcctcgagnngncaggcctaacngggttggcagctgccctnaagcctggggcngccccctttcccaaagggcactgcccagcnncagccagggcccggcctggccaccntcccnggtcatcggggangggnaaagtgtgctcccaggtaagccgggtcaaaccacccccaagagcctcacttttccctggtggctctgcnntgnaactgactcttagaaaccggaaacggatgagctttctagccagaaaaccggaggagatcttgacaggcacacagcatccaaaccaacagcacttctgcagccggggcccggctggcagaggggtgctgcctgctgcctgcaaatcctgccagagtcaagggtttgctttcctactggtcttcctttggctagaaaagtgacaaaactgagctgggtggggtataagttacaggggcgagagcttcagtggcctgtttatcgggaggagttggagctggagcgctcctgtggcggcggcggccggggacgtgatcncggcgcacggggactgcgctngggagcgggacttctctcaccgtggggagactgcgcanacaggcggtggtgcacattctctnggaggctgatctctggggggtggctaggcagggggcagcc

SEQ ID NO: 544083 - DNA, 585 bp, Homo sapiens
gcgtcaggatcatcatgctcacatgaattccctccctacactcccagattatacatatgaaaatattagatgagactgtgcaaaccgatgccgagtcagatatgggatagctagggctaggggtccaacagggtccgattcatatcggtattgaacacttacgcagtatactccaagaatggcagctactacacagggtgacgagatattcaaaccccagatggaagaagcagagatccgctcctcagatacaagtacctgtgataccttagctctcgattcgaggtgaggaaagcgtgaaggagggactgaagaaggcatcaaaagttgtctgtaaaatgatctcctgctttgtccttggaaatgttgaagcagttttagctcataaattgttcagataacaaatgttcaagaaattttaaatttttcacaaatttttaaacagtcagatatatgaatgaaacaaccttgtggttaaaagtttaggatcctaccatttaagggaatcgtgttcccacccatgattttcccaatgagaaacgaagtatgggccgggtgcgatggctcacacctgtaatcctagca

SEQ ID NO: 544084 - DNA, 652 bp, Homo sapiens
tgatctcgaggtcccgtcagatgcatctgagttgagtgatttagggaaagaccgcacatccaaagcatagttacctgcccacgagttctggaccggtggcttgtggcagtatagacgttcctctgatcttaaggtcacagttgactcaatactgtgttggtccgtagcatggagcagattgaaatgcaaaaacccacacctctggaagataccttcacggccgctgctggagcttctgttgctgtgaatacttctctcagtgtgagaggttagccgtgatgaaagcagcgttacttctgaccgtgcctgagtaagagaatgctgatgccataactttatgtgtcgatacttgtcaaatcagttactgttcaggggacccttctgtttctcacggggtgacacatgtctttagttcctcatgttaacacgaagccagagcccacatgaactgttggatgtcttccttagaaagggtaggcatggaacattccacgaggctcatactcagtatctcattaactcatagagagattccagttgtatttgtcagctggggtgacaagaccagacaggctttccccaggccttgtgtatcccagggaggctctgcagccctggtgaagggcctaactagaagtctagagttctgatc

SEQ ID NO: 544085 - DNA, 116 bp, Homo sapiens
caggctcccgagtggctggtactataggtgtgcacgccatattgcccagctaatttttattttattttttgtaggtagagagtctcactatgttgcccaggctggtgtacaactcc

SEQ ID NO: 544086 - DNA, 394 bp, Homo sapiens
  misc_feature (171)..(171): n is a, c, g, or t
  misc_feature (347)..(347): n is a, c, g, or t
ggctgttttccaaagtggctacaacattttgcatttccaccagcatgtgtttgagggttccattttctcctcattcttgacaacatttattactccctttttaaattttagtcatcatagtgtgggtgaagaagtgtctcactgaggttttgatttgcatttccttaatgnctgatgatgtggagcctctttccatgtgtttattgactttttatatattttggagtaatatctgttcatatcctttgtccattttccatttgtttatgttcatatcctttgtccattttccatttgtttatctttcctgttgagatgtaagagtttttttatatcttttctggatnctaaaccattatatattgatttgcaagtattttattccaaaaaaaaa

SEQ ID NO: 544087 - DNA, 339 bp, Homo sapiens
aggccttggtttaggtctttccaggcctttccttcctggagccacagtgcttaaagacaggcccctggggtcagcatttgagctcagctatgatcagaaaaaagccccgttgaggttgcagtgagccaagatcacgcccctgcactccagcctgggcgacaaaaagagactccatttcaaaacaaaaacaaacaaacaaacagaaagccccgtcgagaaatgggtccagcgctgactaacggccccctcatttccccccttgacccctgggccagttgggtgggtaggttgcctcattttgcatccttttgtatccccaaatttgaaataaaagctgga

SEQ ID NO: 544088 - DNA, 1343 bp, Homo sapiens
  misc_feature (1251)..(1251): n is a, c, g, or t
gccggaagggataaaaccgcagtcgccggcctgcggggctcacggcctcgcctcggtatcgcagcgggtcctctctatctagctccagcctctcgcctgcgccccactccccgcgtcccgcgtcctagccgaccatggccgggcccctgcgcgccccgctgctcctgctggccatcctggccgtggccctggccgtgagccccgcggccggctccagtcccggcaagccgccgcgcctggtgggaggccccatggacgccagcgtggaggaggagggtgtgcggcgtgcactggattttgccgtcggcgagtacaacaaagccagcaacgacatgtaccacagccgcgcgctgcaggtggtgcgcgcccgcaagcagatcgtagctggggtgaactacttcttggacgtggagttgggccgaaccacgtgtaccaagacccagcccaacttggacaactgccccttccatgaccagccacatttgaaaaggaaagcattttgctctttccagatttacgctgtgccttggcagggcacaatgaccttgtcgaaatccacctgtcaggacgcctaggggtttgtaccgggctggcctgtgcctatcaccttttatgcacacctccccccccctgtattcccacccctggattggtggcccctgccttggggaaggtttccccatgtgcctgcaccaggagacagacaaaaaaggcagcaggcggcctttgttgctcagcaagggggtttgccctccctccttcctttttgcttttcatagccccggtgtggggtgcatacccccccccctcctgcaataaaatagtagcatcggcaaaaaaaaaaaaaagaacaaaaaaagaagaaagaaaaaaaacaaaaaacaaacagacaaaacacaattgctgggcgccccccccccccccgaaaaaacgttacaaaccacctcgggggggcgcggcggcgccccgcgagagaaacgcacacacgggccaccacgcgtcccccgaagagacccgcgggtccacaaccacagcggtgcggtggggtccctccccacccaaataaaaagacgcggccgcgggcaaacacagcagcgtgttgttccggacagcaaccaaccagcaggaggttactccggaagaacacatacaggccgggagtctacaaccaacagcggcgtcacccacaagagagcggccggccagaaatacatcaataatcacgccgcccgcccgcgtgtcgtgctagcntgacgaacagagatgcgagtcaaatagaccgacggacgctcagcaaagaacgaccagactacggatcaacaagaacgaatgaagcaacgaca

SEQ ID NO: 544089 - DNA, 252 bp, Homo sapiens
cctgaaaacaagataattgatgaaaatctagataccaggtagagaggccatcaactccttctttacccaggatgctatatccatgatttaggctctcaaggcaggagcataatagatacctatttcaaggaagaggtgtgtatatgggatgagggatatagaattaatttctagatattgacatttgaagcttgttgaaacattcaggctctacccatttattctaagacctgtgaacaagtaaactctact

SEQ ID NO: 544090 - DNA, 183 bp, Homo sapiens
tcccaaaaaaaaaaaaaaaagaaaaaaaaagaaaagaaaaagaaaaatagctttcctgggtccaatagtcttggaggacaattttccttccgctttgccctccctccttcctttttgcttttcatagccccggtgtggggtgcatacccccccccctcctgcaataaaatagtagcatcggca

SEQ ID NO: 544091 - DNA, 135 bp, Homo sapiens
cggtaccgcagtcttctcccatcagtgtgatgctgcagggctacacagtcttccctctttgtcattatctcttccaagaaacagtcatgttcctcctcttgagaaaatcaatgtccctgatgggacgaagatgcg

SEQ ID NO: 544092 - DNA, 835 bp, Homo sapiens
gccggaagggataaaaccgcagtcgccggcctgcggggctcacggcctcgcctcggtatcgcagcgggtcctctctatctagctccagcctctcgcctgcgccccactccccgcgtcccgcgtcctagccgaccatggccgggcccctgcgcgccccgctgctcctgctggccatcctggccgtggccctggccgtgagccccgcggccggctccagtcccggcaagccgccgcgcctggtgggaggccccatggacgccagcgtggaggaggagggtgtgcggcgtgcactggattttgccgtcggcgagtacaacaaagccagcaacgacatgtaccacagccgcgcgctgcaggtggtgcgcgcccgcaagcagatcgtagctggggtgaactacttcttggacgtggagttgggccgaaccacgtgtaccaagacccagcccaacttggacaactgccccttccatgaccagccacatttgaaaaggaaagcattttgctctttccagatttacgctgtgccttggcagggcacaatgaccttgtcgaaatccacctgtcaggacgcctaggggtttgtaccgggctggcctgtgcctatcaccttttatgcacacctccccccccctgtattcccacccctggattggtggcccctgccttggggaaggtttccccatgtgcctgcaccaggagacagacaaaaaaggcagcaggcggcctttgttgctcagcaagggggtttgccctccctccttcctttttgcttttcatagccccggtgtggggtgcatacccccccccctcctgcaataaaatagtagcatcggca

SEQ ID NO: 544093 - DNA, 824 bp, Homo sapiens
ggctggtacgctccgggtacgggatctcggtatcgcagcgggtcctctctatctagctcctctctatctagctccagcctctcgcctgcgccccactccccgcgtcccgcgtcctagccgaccatggccgggcccctgcgcgccccgctgctcctgctggccatcctggccgtggccctggccgtgagccccgcggccggctccagtcccggcaagccgccgcgcctggtgggaggccccatggacgccagcgtggaggaggagggtgtgcggcgtgcactggattttgccgtcggcgagtacaacaaagccagcaacgacatgtaccacagccgcgcgctgcaggtggtgcgcgcccgcaagcagatcgtagctggggtgaactacttcttggacgtggagttgggccgaaccacgtgtaccaagacccagcccaacttggacaactgccccttccatgaccagccacatttgaaaaggaaagcattttgctctttccagatttacgctgtgccttggcagggcacaatgaccttgtcgaaatccacctgtcaggacgcctaggggtttgtaccgggctggcctgtgcctatcaccttttatgcacacctccccccccctgtattcccacccctggattggtggcccctgccttggggaaggtttccccatgtgcctgcaccaggagacagacaaaaaaggcagcaggcggcctttgttgctcagcaagggggtttgccctccctccttcctttttgcttttcatagccccggtgtggggtgcatacccccccccctcctgcaataaaatagtagcatcggca

SEQ ID NO: 544094 - DNA, 1069 bp, Homo sapiens
tcttcttaatgcgtcgccaggcacgacgccacactccgctcagacacaatggggaacggtgaaggtcggacgctcaacgcgatttggtcgtactcgggctgccatggtcaccagggaatgctcactaactctggtaaacgtggactattgtcgccatcaatgacccctatcattgacctcaacatacatggtttacactgtaccaatatgattccacccactggcaacattccatggcaccagtcaaggctgagaacagggaagcttgtcatcaatggaaatcccatcaccatcttccaggagcagagatcccctccaaaatcaagtggggcgatgctggcgctgagtacgctcgtgagagtccactggcgctcttcaacaccatgcgagaacgcctggaggctcatatatgcagggagggagccaaaagggtcatcatctctgccccctctgctgatgcccacatgttcgtcatgggtgtgaaccattgaccaacgtatgacaacagcctcaagatcatacagcaatgcctcctgcaccaccaactgcttagcaaccactggaccaatgtcattcatgacaacttagcgaatccgtggaacggaatcatgaccacatgttcatgcctatcactgtcaccaagaacgactgtggatggaccctccgggcacacttgtgcgcgtgcatggccagctggcgatacaccatcaacattattccatgcaatttacatgaacgaatgcaaaagcatgatgaagaaaggtcataccctagatctagaactcgtcaaactcattgacatggacattacatagatacccaactagcaatcggataaatgtatgcataacactgcacgctctaaaactactggtacaaacataaaagacatcatccatcggttgtaaaatcgcgtccgcacgaccatcaagacactcggatacacctatagaacgtgataacagtactataagatcgccaacactccctttacacgtcctaactgaccaacacactgtcatctaatcgttaagaccaatcaacaactccgatgctacagcaacatagt

SEQ ID NO: 544095 - DNA, 1150 bp, Homo sapiens
gccggaagggataaaaccgcagtcgccggcctgcggggctcacggcctcgcctcggtatcgcagcgggtcctctctatctagctccagcctctcgcctgcgccccactccccgcgtcccgcgtcctagccgaccatggccgggcccctgcgcgccccgctgctcctgctggccatcctggccgtggccctggccgtgagccccgcggccggctccagtcccggcaagccgccgcgcctggtgggaggccccatggacgccagcgtggaggaggagggtgtgcggcgtgcactggattttgccgtcggcgagtacaacaaagccagcaacgacatgtaccacagccgcgcgctgcaggtggtgcgcgcccgcaagcagatcgtagctggggtgaactacttcttggacgtggagttgggccgaaccacgtgtaccaagacccagcccaacttggacaactgccccttccatgaccagccacatttgaaaaggaaagcattttgctctttccagatttacgctgtgccttggcagggcacaatgaccttgtcgaaatccacctgtcaggacgcctaggggtttgtaccgggctggcctgtgcctatcaccttttatgcacacctccccccccctgtattcccacccctggattggtggcccctgccttggggaaggtttccccatgtgcctgcaccaggagacagacatgcacacgccgctttgtgctcagaagagctctccttcctcctcttcatattttataacccgggtgcggtcatatcccccacttctgcataaaatagacatccggataaacaaattttaactcgtcctgaaaccctcctacctactatacctttagcaaccctttccacttctacttcaaatctctcctactctgtcaaactccagctatctaattagatcactgtactctcacaccttcactctatcattatttacgattctattaacatcttaatcgaaccccttcgctatcctccttaactagcatcaaatgcttcctaactgacctttatcatcctatactactatctttcccgccagtaatttctaagcccttcgtctccactcactaagactttgactcctttctgacatactcccccgcttagttcgtctttgctttc

SEQ ID NO: 544096 - DNA, 215 bp, Homo sapiens
tagttttagaagtttcaattagcagcacaacacacacgatatcgttcagctcctagcaccacatctgccctggtggaagaacctaccagctactacagcagcccgggctcaatggcagcaacacactttcctgagagctccacaacctcaggccgtagtgaggaatcaacagcatccccaggcagcaaggtgctatggaaacttctaaaagtagg

SEQ ID NO: 544097 - DNA, 847 bp, Homo sapiens
gcaccacaactgaggatcctgtgggtggagaccctgcttgccctcctgatggcgggcctgatgcagcagcctcgggctgccacgagcgaacctgagagatggccaagacgcatcccggacccagggcaactggcactgtgacggagctcccctagcggccgtacacatgtgtccgtgaccgacctcgccaaggcaatcgcggtgtccatatgagcgcctctcgcattattcaattcccctgtgggccagatgtcattcacctgttgatctgtgcgggcatcctcccggagcaccgaagaacaaacgctgccaaaggaagcgtagcgggcactggcaatcaagactccctgacaccgaatgccacatgtgagctcgtagcaaggggcacattgatctgactagctgttggacctctcggaatgcaaacacctggaatgtaacctcgaaaccaatacctaatgtcactgaaagcgtcagctgccacggtactcagcaaggattcatcttgctctagcactctccgagcttgagtccagcgacacagattcaggaaaccagggaggtactcatcttgtaatggtcgagacacgcgcgtcgagcaacaggtaatcgcctcaccttctgtgacagcatgtcgggacaaacctggaagtatcgaggaaagttgcccctggggggcgaacactgttctttttgtgctcaacaagcagggcgaaagactctgaggactctgatgccacatccttcctccgcgcagagtccaagaacccagagcttgcggattcaaaccgaactgtacacggggggaccaaacggcccggaacaagtgccaatccaaccgggaccg

SEQ ID NO: 544098 - DNA, 141 bp, Homo sapiens
atcacaagctggaatcacgcagtcctgttaaaactgcgaccttctagaagcccctaaggtctgattaaacaagttccttggaaataactgttccatgtcaccaagaaaacagaaaacagaaaaatacagcaccttgtggag

SEQ ID NO: 544099 - DNA, 350 bp, Homo sapiens
  misc_feature (350)..(350): n is a, c, g, or t
tttatctcctgatcggctgggactataggcacctgccaccactcctacccaggaacctgtatgtttaaaaagttcctcagtacgctcttgcctctggcaacctagaagaggaatttgaccctgcccacaatccctctttccctttccaaactgttctcagaaaagcagctctacaagaatgatagcaaatccaataatgtatctgggttgatttcccagaaattcatcccagcacagcatggaagttacttatatacctattatactttcagaacccttcagacagtcaacatggatgaaggctaataatttgattaccatatataactaggaatagtgacatctgtttn

SEQ ID NO: 544100 - DNA, 138 bp, Homo sapiens
taagtactctaagatccctcgatcgacgtctcgaacactgtatacggtgtgagattagtgtcatactaaatgtccaatgtccgcgattctctaagttagcaaaagtcatcatttagaggtttataaggacgagtcagc

SEQ ID NO: 544101 - DNA, 369 bp, Homo sapiens
ctcacttcgaggagagtcaggatgtttgcgcaaactatactcaggcgaaggatgacttcctcagcatgtaaagacatgaatatgcaagaaggcatcctgattactgttgcgcgctgctgctcagacttgcctagacatatccaccctagagaaacgctgtgccgctgcaaatcctgatgaatgctataccgaagcgtacgatgaatatgagcagctcggacagagcaaattccagaatgcgctattagtgcgctgcaccaagaacgtaccacaagcgtcaactccaaccgtacaggtctgaagagacctaggtacaaggggcagcacaatgatgtaacatgctgaggcagtgactgccctgtgctgatg

SEQ ID NO: 544102 - DNA, 795 bp, Homo sapiens
gcaggtgttctgggaggagggccatggtgccacagccgcctgtccaggtcctgacggcatggtctgcagtgttcctccctgcacgtgggcagtgacttgctcaagttcatggagccggtgaccatgcaggaatctgggaccttcgcctttctggaccccaaaggtacggctccagggcaggccggctcggctgctggaccccagggccccgggtggggtggggggtcaccttcaggactgtgaggggaggggcagcagggagaccccagggaccagagcccagccaggggctcgccatgccctgtgctgctggggaagccccctctgccctctgcctccctggggacagagtggcacagagcagcgtccatggggttcccgaacttccgacacctgaaggcctcccctgctgcccttggctgggaagggacccggtggccacagggaggctgcccttgtgagccccgacccacgcccctctgtgggggcaggaagtgcagtgtgcccctgcgtgtcccccagctgtcccacgatgccaacgagacgctgcccctgcacctctacgtcaagtcttacggcaagaatatcgacagcaagctccatgtgaccctctacaactgctcctttggccgcagcgactgcagcctgtgccgggccgctaaccccgactacaggtgtagcgtaggagcgggggccagagcaggtgcgtgtatgaggccctgtgcaacaacagctccgagtgcccgacgacccgtcatcacaggatccaacctgaacgggaccccggggaggggg

SEQ ID NO: 544103 - DNA, 972 bp, Homo sapiens
cggacgcgtgggtcggagcctctctgcctggctgccagtctggaaagtgaggagcgtctctgcccggcgccatcgtctgagatgtggggtgcgcctctgccccgcgcccattgtctgagatgtggggagcacctctgccctgccgcccgtctgggaggtgaggagcgtctctgcctggcaaccgcccgtctgagaagtgaggagcgtctccgcccggcagccacaccgtctgggagggaggtggggggggatcagcccccgcctggcagccaccccgtctgggaggtgaggggcgcctctgcccggccgcccctactgggaagtgaggagcccctctgccggccgcaccccgtctgggaggtgtactcaacagctcattgagaaggggccatgatgacaatggcggttttgtggaatagaaaggggggaaaggtggggaaaagattgagaactcggatggttgccatgtctgtgtagaaagaggtagacactgggagactttttcattatgttctgtactagaaaacattcttctgccttgggatcctgttgatctgtgaccttaccctcaatccttgtgctctctgaaaaatgtgctgtgttcactcagggttgaatggattagggtggtgcaacgatgtgctttgttaggcagctgctgaaagcaagaggctacgcctaagatattaaccattcgcttatctcagttaccaggaccccaacacctgcgaaggccgcacggactctggtaggataccaacaacttgatcctcatcgtgacttcctcctatgtctgtgaacctgccaatcccttggcaaccacccgattgttctaatacatgcattagagcacacaagggggcgcagaatgccaggcacaccaccccttgccaagtccaacgaactaactctccttaacgcgtcagctgctagactcggcagcaacgagctgacatcgcgactcggcggcca

SEQ ID NO: 544104 - DNA, 814 bp, Homo sapiens
cttgcaggaattaaggatgtgatgtagattcgtggggacagatgatgggtgattggaacttggaagatagtttgagtttactctacatatcttttaaaagtccttacattctccttaattgtgtgtttagtaattagttttcttgacgttttggctataagattttgtgtaatttcttgaatttggtgttttctagaatgttctaaaagccactgttgatttagttggtaaatatgtttacaaaattagcgatgtaaaattatgtatagcagaggagcctgctatagtttatagatcatagctttctaaacctctagacgttgaaatttgggtgacttctttattacagaaactaagatatgttaatgggtcttgaagtctttgtattaagaccttgtaatttagagacatttgtaatgtgtgtttctcacctcatgctgaagggtgactccctgtaacatgccaccgaagattttttttaaacacttggttctttcttgtgtgttaactttgctaagccagaattaagactcggatatgataaagtgatgatctaactttagcgtttgccacagtatgatgcaccaagaagccataagactgacatagagtaaatgggctctagatagcatatatgtgtaattgctgacaaatgtgtgctgtgtgcgcgtgtgtgtgtgtgtacattgtgtacccccaatgtatacgaccagatcttaaaaatgtatgaaatggctagaagtccacagtgtttgacaaatgttacgtaacctgccaaagttctgatggccatacgcttggtgttgaattattt

SEQ ID NO: 544105 - DNA, 174 bp, Homo sapiens
tcatatttatactctcaacgcttaccttcctgtacgcttatactatcctcaacgcttatactctcaacgctttatacttcctcaacgctatatacttctcattctcatattcccggtatagaagtataaagcgtagagaagtatgaagctattgaggaagtataaagcgttgag

SEQ ID NO: 544106 - DNA, 484 bp, Homo sapiens
  misc_feature (223)..(223): n is a, c, g, or t
  misc_feature (232)..(232): n is a, c, g, or t
  misc_feature (243)..(243): n is a, c, g, or t
  misc_feature (251)..(251): n is a, c, g, or t
  misc_feature (256)..(256): n is a, c, g, or t
  misc_feature (272)..(273): n is a, c, g, or t
  misc_feature (279)..(280): n is a, c, g, or t
  misc_feature (294)..(294): n is a, c, g, or t
  misc_feature (367)..(367): n is a, c, g, or t
  misc_feature (393)..(393): n is a, c, g, or t
  misc_feature (410)..(410): n is a, c, g, or t
  misc_feature (446)..(446): n is a, c, g, or t
  misc_feature (473)..(474): n is a, c, g, or t
  misc_feature (476)..(476): n is a, c, g, or t
gaaggtcaaccctctcgttgtattcaggaggtcagaacagagcgaccagtcccttcaaagtgtgggggaaaagtagctccaggtcaccatatgaggaaggtgcaggaaggaaagcaaatgagaataaagtaggtgggatgaatgcccccaaaggccaaattgggaactctaacggtggtgcaggaagcggagggaacatagaccgctggaagagtcagatagnaaagatggnaaaaaggatcnagactccngatcngcgcctgagccaaagnnacctgnngaaaatccagcttntaagttcagttttgcaagcaagtatgctgctctctctgttgatggtgaagatgaaaatgagggagaagattangccgaatagacctttacatcctgggnttttttcctagtttctntcccccctggaacattcgagagcaaatcaaaacctntatccagacaaggcaaaataaaactcnncntttcctga

SEQ ID NO: 544107 - DNA, 1072 bp, Homo sapiens
gatactgtgactagggatgaatataacattcagatgctatgatcgtgttgattgactattgatgatgatacacgtgcgtctggcatgatgcagaatgatggagtcctttaggaaggcttcgagcttatgaggatcaagacacgcggatttcgtaacacaacgcgtaaccaggtagttcagggtcccggtttgagtcttgaagaatggattgcttcttgagcatcctgaagaagttgattaatatgacggaattgtgtcattcaaggaaggtgggagtaaggaacagtgagcaagacaatggtgataggattgtgttagttatggacatgaatttcttggtgtattacagggtgggatccaggtggctcaagtgagatgatccagaagtggactactgtgtggacgaaagaccaggattcgtgaatgattatgagcaaagataaggatggctaggcttgatcgccaaagagctggttaccttgggtagtacctagtcatcagggcattggacaagaggaggcgctatctagtctaatttgcatgcaactggtgctttggaacgtcgtgtggaccagaaaaagcgtctctgaaagaagagcattctgggaacaacccggactttgtttctcaccagtgaagccatcagatcatgggcagactaggtccaatgatgactatttctatcatgattgaaggcttttaattctctcggagcctgttcggtgaatacgaggtacgggctcccttaaataatgtttgcttaccaagggtaatacgggagggtggataacaggtattgggctgtctgggttttggaaacggcttttaagatctataacagccgggtcagaaaattgatccttaaggtagaatttcctgagtgcgggcctgttcggtacacggaagaaccaaattagttcgggttattgaatttggagaacgggtactgaaagcaccgacatttttaactatgtgggcccggtattgcacaaaaagagtgatgcgcaagataaactacaactgtgtgtagtacatgtccagcgggaaattggaagatggtcccctaagtcgg

SEQ ID NO: 544108 - DNA, 154 bp, Homo sapiens
cgagtggcttaacattttatcccaccgagatcgaaggcggccgtgcgctccatgctgcagttcgaggacgtcgccgtcgtcggactgcccgctgagagcggaaacgagtcggtggtggccgctatcctgcccaggcagggccgacccgtcaccg

SEQ ID NO: 544109 - DNA, 200 bp, Homo sapiens
cctccgccgtcgccttctctgcctcttttcatcctttctcggtttggtggtttgcaatggtaagaggtcgaatcctttttccaaccaagccgggcccttttttttttggctggggtggtttaatttttcctcggccgccgccgccaattgtggacacaagtgggggcgggtccgggcctttacccctctgtcgtcttctc

SEQ ID NO: 544110 - DNA, 946 bp, Homo sapiens
  misc_feature (146)..(147): n is a, c, g, or t
gcctggtgttgtgttagtcgggctaacaagcgcagtggcgcgggggctggtgagtgcagggtgggctgggggagccagaggtggcttggatgaggtgaaaccgctgcgccctacaagcagttctggtggcctgatagcttcgatcnncgcttcttccccatctccaaggaccagcctcgggtcctcttgcccctggccaatgtggcattaattgactacactctggaattcctgactgccacaggtgtacaggaaacatttgtcttttgttgctggaaagctgctcaaatcaaagaacatttactgaagtcaaagtggtgcctgccctacatctctcaatgtggttcgaataattacatcagagctctatcgatcactgggagatgtcctccgtgatgttgattgcccaaggctttggtgcgctctgactttcttcttggtgtatggggatgtcatctcaacacatcaatatcaagcagagcccttgagtgaaccacaggttgagacggaagctagaacaaaaatgtttctgtgatgacgatgatcttcacatgagtcatccccagcaccaaactcgttgcacgaagacaatgtggtagtggctgtggatagtaccacaacaggtaatccaaaagaagagccagggtctcgggttttgaattacctctgagctgtgtaggaggagtgataggtggagcagcactacgaaggatgtccaactcggatctggagccctcgcggccacagtctaggacaccgcataccgacgaaattatgtgcgagccccaagatgcgtgacgcggaccatgctgctgccagcgcaggagcgacacacgagaacgagtgcaacgccgaatgacaagcagcgcacgaagcacgcatacggcggcgagtgccgaacgacaaggcaagagaggatagacggagcgagcgaccgctgctctcc

SEQ ID NO: 544111 - DNA, 341 bp, Homo sapiens
ctggagctggttttctcgccagcaggtttaaaagtcatagttggggcaggcgtggtggctcatacctgtaatcccagcactttgggaggccaaggtgggtatttcacctgaagtcaggagttcgagaccagcctggccaatatggtgaaaccccaactctactaaaaatacaaaattagccgggcatagtggtgcacacctgtaataccagctacttgggaggctgaggcaggagactcgcttgaacccaggagatggaggttgtagtgagccgagatcatgccattgcactccagcctgggtgacaagagagaaaactccaggagaaaaccatgctccag

SEQ ID NO: 544112 - DNA, 180 bp, Homo sapiens
tcacagcttctttcttcagccgaggccgacgccgtctctccttgcgtgcagccatggagtgagtaaccgagttacctcgttcatccaacgtgccgtttcccgcgcctttcgcagactcgatggcgcctcatatagtggagcccatgtgggtggtgtgggatgtctgcgatgctggtggaa

SEQ ID NO: 544113 - DNA, 969 bp, Homo sapiens
  misc_feature (11)..(11): n is a, c, g, or t
  misc_feature (79)..(79): n is a, c, g, or t
  misc_feature (154)..(154): n is a, c, g, or t
  misc_feature (180)..(180): n is a, c, g, or t
  misc_feature (200)..(200): n is a, c, g, or t
  misc_feature (205)..(205): n is a, c, g, or t
  misc_feature (239)..(239): n is a, c, g, or t
  misc_feature (256)..(256): n is a, c, g, or t
  misc_feature (297)..(297): n is a, c, g, or t
  misc_feature (310)..(310): n is a, c, g, or t
  misc_feature (354)..(354): n is a, c, g, or t
  misc_feature (380)..(380): n is a, c, g, or t
  misc_feature (428)..(428): n is a, c, g, or t
  misc_feature (437)..(437): n is a, c, g, or t
  misc_feature (491)..(491): n is a, c, g, or t
  misc_feature (585)..(585): n is a, c, g, or t
  misc_feature (640)..(640): n is a, c, g, or t
  misc_feature (645)..(645): n is a, c, g, or t
  misc_feature (688)..(689): n is a, c, g, or t
  misc_feature (770)..(770): n is a, c, g, or t
  misc_feature (835)..(835): n is a, c, g, or t
  misc_feature (860)..(860): n is a, c, g, or t
  misc_feature (881)..(881): n is a, c, g, or t
  misc_feature (897)..(897): n is a, c, g, or t
  misc_feature (900)..(900): n is a, c, g, or t
  misc_feature (926)..(926): n is a, c, g, or t
actgatagtcnataggctcagagtgcaaataaacagtgtaggaatgcagcgactgacatttctaaagtacaaaacaganaaaattcttagaagatacatgcaaaaagctctactaagcagatggccacagaactagaacattgataatttgacnggcgatgtcaataggactccagatgnttccaaacccaacttgaacnctcancggaggctttgtattttgcttttccagtttcacnaatgacacaaacatgantcaaatcccggaagtattcattaaaggcaagggcatatccnacaacaaacttgnctggaatttcaaatccaacaaagtctggcttatatccaacactncggggggtccttttcaccagccagcntgcgaccttgaccatcgctggattagactgcctgaccaaggaaagcanagtctgcantgttttgccagtgtcaattatatcttccacaatccagacattctttccagtganaggtgagagatcatctccaccaattacttttatgtcccctgttgactggtcattacaatagctcttcagtctgataaaatctacagtcataggnatggatctatcactatttctattcagtgctttgatgttaatccagcaggtcagcnaagantttatagccccccttgagcacacagagggctacaatgtgaaannctcccatctccttcatcacatctcgagcgagacgttcagtcctgtccataattagtccatgaggtataaacaccctttccnaatcctcagcataatgattaggtatgcgaaataaatcaaggtcataacctggttcatcatcactnaatcacgacgcgagggctgcgggtngccataacggagccggccggngcgcgggctgactgcncangaggaggaagccggtggcgaacagangaagaggcggagcgcacaagaggcggcgcgcgcgggaaaccga

SEQ ID NO: 544114 - DNA, 187 bp, Homo sapiens
  misc_feature (187)..(187): n is a, c, g, or t
gctccaccttactaccagacaaccttaggccaaaccatttacccaaataaggtataggcgatagaaattgaaaccaggcgcaataaatatagtaccccagggaaagagtgaaaaattataaccaggctaatatgagcagggctaaacccctataacctgctgcaaaatgaattaacggaaataactn

SEQ ID NO: 544115 - DNA, 343 bp, Homo sapiens
  misc_feature (238)..(238): n is a, c, g, or t
  misc_feature (288)..(288): n is a, c, g, or t
  misc_feature (335)..(335): n is a, c, g, or t
  misc_feature (342)..(342): n is a, c, g, or t
cttgtgaagaagccagcccatgacattttcctgctcctctctcatgagcccttagcagagaatcaaaaccatgcctggccgaaggggtacttccaggtcaggggaaatttcagtcccccatctccatcatgaacatggcagccccaaagtgagcaaggccaaacagggttttccacccccagcctcttatggtgccccaccccttttgtactgtctcccaccccccatctttgatggnattcccatcaactctcagaactgtgtggggtttccctggggccttgtganatccatgatgttgaaaaggcctacctgtcagtttgttagggcagganggatcang

SEQ ID NO: 544116 - DNA, 686 bp, Homo sapiens
acgggcggcggactagtgcacagagctgcgggagcagtgcacagtggatgtgtggagcctggcggcgtggacggcgtggatcctggttggagccggagtcccgccgatgtgtgggtgctggagtgtggagtggtgcccgtgcgagtgcctgcgatgaatgcctgagcggcgatggaccaggctggcgctggcgtgcctggcccctgggagtgagtgcttccagtgctggccgtgcagctggctgctgctgggcagtgacagatcatcatgaaaagcccttactgatgtgaaaaactgtgtctcaacaaaaacatcagctgcagatcttgtgacagaaacagatcaccttgtggcaagattataattatttctgagttgcgagagaggtttccttcacacaggttcatttgcatgaagaggccgcggcttctggggccaagtgtgtgctcacccacagcccgacgtggatcatcgaccccatcgacggcacctgcaattttgtgcacagattcccgactgtggcggttagcattggatttgctgtcgacaagagcttgaattcggaggtgatttaccacttgcacagaaggagcggctgtacacggggccgggcggggtccggggcgccttctgcaagtggacagcggctccgggtctccggggagcacagatctctcaaaggcctt

SEQ ID NO: 544117 - DNA, 482 bp, Homo sapiens
  misc_feature (19)..(19): n is a, c, g, or t
  misc_feature (60)..(60): n is a, c, g, or t
  misc_feature (74)..(74): n is a, c, g, or t
  misc_feature (86)..(86): n is a, c, g, or t
  misc_feature (432)..(432): n is a, c, g, or t
  misc_feature (472)..(472): n is a, c, g, or t
cccatgggtgggtggttancagcagaaaaaacaaaaaattcataaaaaaccctcttcctnagcttttatagttncttccccccaantcccagctggaaaagttgggataagccccaggaggattcttccccatcttacagagagaataactgaggcaacaaaaagcagagagctggctgggtgcaagtgctcatgcctgtaatcccagtgatttgggaggctgaggcaggaggattgcttgatcccgggagttcaggatcaacctgggcaacatggtgagctcccgtctctaccaaaaataaaaatttaggtgggtgtgctggctgtggtcccagctgctcaggagactgaggtgggatgatcatttgagcccaggagattgagctccagtgagccgtgatcacgccactgtactccagcctgagcaacagnaaggctccctcaaaaaagaaaaaagaatgcttttgtgggncctaaattta

SEQ ID NO: 544118 - DNA, 233 bp, Homo sapiens
  misc_feature (171)..(171): n is a, c, g, or t
  misc_feature (204)..(204): n is a, c, g, or t
  misc_feature (219)..(219): n is a, c, g, or t
cctccccccaccctcttcacccttgtttgtttcccccagcactcagaaaccagttctactatttacttcatctgctcaggtcagagacctccagaggtcatgaactcttgctccctcctatatccccccttccctgcccccgccccagggagtacgtaaagttcctcaccnctgttgtctcctgtcctctcttgtttcaagcanaactggattgcaganatgtacgtcgaagc

SEQ ID NO: 544119 - DNA, 147 bp, Homo sapiens
cttgaaaaacttttcctctgtgaaaagtggcccttcagttttgttaggaaacccaggaactgttttatatgatctcaagattttaattcatttctagtgctacactatgtgaatgagtgaattgtaggctttaatcatttttttaaa

SEQ ID NO: 544120 - DNA, 839 bp, Homo sapiens
aacagatgaggcgaaggaggacggagaggaggcagaaggctctgggctcctctgaaaataaattaaacatacttaatttacaatataaaaatcataatatacacatataagaaataaaaagaagtctcagttgcagctatttgtcaaacattaatatccatttctttttatataccggtgaatatggcgcaataatagatctggatttgaaccaccttaatgaagcggcaacacccaggtgtttgaggtgtggcatccttcgctgatttggctgtccccaatgtttcacattatttaatcttgcaaaaatggttctgtgcacctgtggatgtgaaatgctgtccagtatattatataatgtggttatcctgtggatgtacaaaaaattcagaaaatgatctctgtagatatctgtataattggtggtcatcttagaagttatcaggaatgtgtttaacaccaagaagagaacttttttaaggaatgatacatagaaaaagattttatttacaactgagtgtgtaaagcttgggtttcccttgtgctggcaggcaatctggcccaaggtttacttgcaaatgggaccccattttgtattgttcagaaaaaacgaccacagacacagcacagcaaggcccactcggcgaacagcacagaaaacaaggggttgccgttttactaacacccccttgcagctgggtgtggcagcgcccggtaatccccaacataatggcagcacacctcctagtggagggcaaacaggctccagaggggccattttgacggcgacaggtgcgctaccggcccggacccacagaagtgggagtttcgataaaggg

SEQ ID NO: 544121 - DNA, 113 bp, Homo sapiens
cccccccccccccccaaggggttgggggcttttttttaggcccctccccccccctttcctgggggggggggggggggttttttttttccccccccccccccccccttttttta

SEQ ID NO: 544122 - DNA, 102 bp, Homo sapiens
caagtcaaagttggcattcccatcctgggggaccctgatgtgtctaaagcgggagatggtgttgatgtacggtgccatctggtcctccggtaccttcttcat

SEQ ID NO: 544123 - DNA, 205 bp, Homo sapiens
ctagaggctcttctaggcgatcgacgccatccacgtgcgcgtgcggagccacacgagcttgaggaactccattctgcatggcataccatggcagctttacaactatgtggcgaccatgcctgacaattccatagtgcttatggcatgcaagggaagatacgtctccagaggtccatggaccaaaatgccgggaaagccttgagca

SEQ ID NO: 544124 - DNA, 483 bp, Homo sapiens
ttcttattcatttaaaatcctgttctttctgtatgactcatacagaagtcctttattgattgtccttatcctgacaacgaattttttcagggaagataaacttcaccggaaaatatttttctggtcgtccgaataacagatgcgcgtaacgtcgtggcatcctgaccttcattacttaaatgaacgtcgagcgcaccactggggtgttcaatattgatattgccgtatcctacagaagggacgatttgtcgggtgacggtgccttccaatgcacaactactggaaatagcaatagcaccggttatcgccagcgcgcgatggcaagaatgcggcataaaataacgcacattaattgccccgcctttctgcgctggagaaataagcacaggtttagggataaccatattactgacatcacctaagcccattgctttacccgcttgtagacggatagattcaatgcgggctaataatgctttgtcg

SEQ ID NO: 544125 - DNA, 374 bp, Homo sapiens
  misc_feature (313)..(313): n is a, c, g, or t
atacggttagcgtcaacgtttacagctgatgacttaccagttgtagccaatgagctgtcgacaatcttgttgtaaaccccagatgaaacataagcagttacgttttctgttgctaattcaagttgtgttaccttgtcatcagcttcattaaacaatgcttgaacgtcttttccgtctgctgtcaaagctgtaccagcagcaaccaatgcagcaccataagcaacgttagaacgttggataagtgcttgtgcatgtttaaccattcgatcagtaacggcagcttgcaagtcagcgttgacagtgtagcggtcangaccttcatgatagcccaggagagttataggacagttgtgtcagcgtaaatcacttcttgc

SEQ ID NO: 544126 - DNA, 381 bp, Homo sapiens
agaggggcagcaatttgctgaaggtgtaaatgcgcagatgctgcaacacgcggaaagtcgcgtcgtgacttaccagacgttcaaaatagcgcaccactggggtgttcaatattgatattgccgtatcctacagaagggacgatttgtcgggtgacggtgccttccaatgcacaactactggaaatagcaatagcaccggttatcgccagcgcgcgatggcaagaatgcggcataaaataacgcacattaattgccccgcctttctgcgctggagaaataagcacaggtttagggataaccatattactgacatcacctaagcccattgctttacccgcttgtagacggatagattcaatgcgggctaataatgctttgtcg

SEQ ID NO: 544127 - DNA, 360 bp, Homo sapiens
atgcttcatgcttggcctagatgtcagagctgccttcgctatgattatcttgcaagttctgcattattgctagtgggttgtgctacaaattgagtattggtagtcagtcaataaaacctgtgccttaggtagtcatccgacatgctgatggtattcttcaatttgttaaatagcattggatacagagcaggactcaattctagacccaccagatccttaacattggtccgtatttgaagtcccactttctcatggttacacaccattaaggacaacagccgatccataaatttgctgacaggtgtatctgcgtttccctctgaagacatcactgaaatcatagaacccttacgttcactg

SEQ ID NO: 544128 - DNA, 688 bp, Homo sapiens
agcggcttctctgcccagtggacgccggcgagaaagcatcgtgaaagtctctcttcaccctgaccgtcctgtctaagtcagagtctcctaacagagccctgaccacagctgaggaagctcttcgttggagggtctgagccttctgacacactaactgcatgagagcctgaggagccatttggagcaatggggaactgctcactggactgtgtggtaatgagagatccaaagatcatgcgctccagggcttagggtttgtcactatatgccagctgtggaggaggtggattgcaggctagtgaatgcatatgccataatcacaggtgtcatggaagagtcgtggaaggcaattacgagagctgtctccaggagacatgacttctcaaaagacacagtgtgcccaacttaactgtgatacaagatctttgtcggtggcattaacagaagacactgaagaacatcatgcctaagagtattatttagacagcagttactggtaaaattgacagtgcattgacagatcatgactgaccgtaggcagttggctcatgaaaaggggcttggcccgtttgtaacctttgacgaccatgactcccgtggactacagattgaccagtcagaaataccatactggtgaatggcctacgacctgtgaagtttcgaaaaagcctgtcacagcgaagaaatg

SEQ ID NO: 544129 - DNA, 468 bp, Homo sapiens
cgggaggattcatgagaatgaaactggccggcttttttatgggttaaaaggcctttgggaagaaatcaggggatactggatttggtcccggcaatgaaagtttaaaggctgtaccaatcctttaatatgaaatgggggaaagaatggagagcagccgtaaaagaaatatctaggggaaaaacaagaagcggattggagcttggactaaaatttcttcttgggattaaagagacaagtttatcacagaattttttttctgctggcctattgctataccaatggatgtgagtggcattttttttttaggttttcattaaccctcttaacattttttggagatgacatttctgattttcagaaattaaccataaatccagaagcacgatttcgaaagctgagaaccctggacaggtgatcaagtttacctatgggggctctgcctttaactagagggggggaaggcagacc

SEQ ID NO: 544130 - DNA, 220 bp, Homo sapiens
tgatagagtcttaaccagaggaatcaggcagttggcaggaacacttcaaagcagtgtgatcctcagtcgatgcccaactggaacttactttatcccctctttaattctatttctttatcttttctttatatttttttggaaacagggcctcactactgatgcctaggcggacgttgcaggggtgaaatcacagcttcactgcaaccttagaacccctcga

SEQ ID NO: 544131 - DNA, 782 bp, Homo sapiens
accacgcgtccgatcccagcacttaactgggaggccaagggcaggagagttgcttgagcccagaagtttgagaccagcctgggccacatgatgaaaccctgtctctacaaaaaatagaattacctggggcgtggtgacacattcctgtagtcccagctttccagggaggctgagatgggagaatctcttggagcccaggaggcctgagggctagcaagtgagccatgacttgtgccaataggcactccaggctgggtgacagagaagaacaaaaccaaaactttaaacttcatattaccttgaggcatattctcatatttcaaaccacaacgaggtcctcttccggtacctatggacttctagggagtccaagactaggatctccttggatacggaagggaggatgtgcaagaacaaaactggacgaagggccttactggtgaggccagggaaatggtggagaacaatggggatactggtcccttcaatcaagcatggtcctattttcccctttaaagtcccggtaacaatctctggtttacttcctagagggccaggcatagaatagcaacaggttcggagctgtggatcaatacttggtgacttgtcacaggactcttcctacagggactggctgccctgattactctggctctgaactttctcatatattacagtactgaatgatgatgggcatgtcacatgaacttgtccaaatattgggtaccaaggccaggatccgaggcaatactggcatgtcccaatagccacagtacggatgg

SEQ ID NO: 544132 - DNA, 170 bp, Homo sapiens
agaggaagttagtcgctgatggcgatccttcaaagctgaactgaatgagtttctctcactcgtggaggcgtggactgaagatggctactctgtgagtttgaggtgcgagttacatccaaccaggacagtaaatcattatcttacgcgcaccagaacacagaatgttcttg

SEQ ID NO: 544133 - DNA, 117 bp, Homo sapiens
aggctgagaaaagagccaaatgaaaagcaaaaaaaaagaggaagaaacagcagaaacgcagtctcaggtaacccagcaaatatggctcgactaatatcgactggcctaacgcgtcag

SEQ ID NO: 544134 - DNA, 124 bp, Homo sapiens
catttaactgcatatacgaaaacaagtcagacttactggaaattaaattacctatcccatgttttcagtgggaaatgaactacattttgagatgctcacagaaaactgcctcttacagtatgaa

SEQ ID NO: 544135 - DNA, 910 bp, Homo sapiens
gctgagacagggaggtcaccaacgggagaacctgctggactttcatctaaacacaatccagctgccccttgtcattgatgttcaccgagcagagtgtgtctgactatgatcggcaaactgacgtcaacttcaaaacaggagccgagagcttcaaggggcaaagatccttgttcagtctatcatcagacatgcagaccacaccgacaaccagacgcattcctcgaggttctttggcctgaacgaaggaaagagtgcccggccgtgcgcctcatcacccttggaggaggagatgacctaatgtacatatgccctgaatcaggaggagctagactggcatgcatgtggatcacagagttctgccaccggcttcctggagggcaaaatcaagccccagcctgatgagcctagtgagctagccagtgaggactgcggacaaggcagcctgtcaacggctgctctgtgtagggtacagaacttctcgaagtacgtgagcgtatttgatgagaaacaccaacagtctcttgtaggagttctatgccccatggtgatggtcactgcaacacagcctcgtgctcgccattcttgggatacacatctggtgactaggaccgtacaaagggacccactgtactaatcattcgctcactcggccaaagattcggaactcgtactgtggcaagcgaggtctgggagtgcctgtcagaaggtgtcagcatgattcccctagagctcaacgttcttttcgctgccatgtgcccgaccagggacggtcatcgagtaacaacggtggaacgacacgctggactgcgtgctaaggaaattcctgcgacagcaggtgcgccaggattggtggcaggggcatgatggacgaagcatcgagggacacctggaagaaagcacaaggagccaa

SEQ ID NO: 544136 - DNA, 259 bp, Homo sapiens
acggtggctcacgcatgtcatcccagcactttgtaaggcgaggtgggctgactcacccttaggtccggcgagaccggcctagccaacatgctgaaaccccgtctctactaataatacaaaaattagccaagtgtggtggcgcgcaccgtgtaatctcagctactcgggaggctagaggcctgagacttgtttgaacccaggagccagaggttgcagtgagccggagatcgtaccaccgcactccagactgggtgacaga

SEQ ID NO: 544137 - DNA, 1511 bp, Homo sapiens
gtccagcttactaccagacaacctttagccaaccgcatatctatgcgcacagatcatacagtactagcgacgactagatagactttgatagacctagggccgcgaactgagcatactacgtgaccgccagaggtgcatagagcactcgcaaaacatgatatcctaacgacattaatgatcatctaacggactcaagcccgtattaccttctgcgatcaatgatatcgagctagagagataatttctgcaaggagaacggcaagacgcttaaggacctccctgaaaggcacgaacgatgctacactacatgaaacaggtctatagacagaagcgagagccccgttctatggtagcataacataaggtgaggagagatcttactacgcgtaagaagcgcgtagagaaaccatacgcgatgccccatgggtgaagtaggacatggctctgatccccaatgtagtgaggacaatctttgagttgtcacaccatatgtaagagtcgtggccacacatggaaacccttgcttaagattcctcgcggggctaaacattttaaagcataggtataatgtaccaagaaaaaggaagggaaaacaaggagttcattttttggaagacgaacgtaaggagaagaataggaaggcattggggctaaagaaaagaaaggaagttagaaaaaatcttaagaaatcagggacaaattaggttgaaggccattagaaagaggcaacgtgcgatgcaaagtgttaccgtaagaaggcgtgtttgccaaggtcgtcgaataaaacccgcgagtgttaacccttaaaagagaacattcgcgccaaaaagaagttaattgacttggaaagcataccgtccaaagggagtgcgaaacttgggaacccagaatccttaattgcagagcccttcagtgagaacgcaacaacggtgaaggtggtatacacgtaattacaagggttacaccagtggaaggagagcaaatttccttcacgttgccgagattacaaggccctgtcgattcagtagtgtgtaacaacacaagggtcaaggatgcagaatgtaaggcaagggtccacagaatgcataactgaatcaaaggcgaaaagaaggatcatttaatttaaggcttcgaatggtgtaagaccagacaacaaagggacgatgggaccaataacgtgaaccagggtttaaacaaagaaaatacacaccaacgggagcgggacaagaccagagagtaaacacctccgaagtgggaaccacaggacgtaaggcggaataaccagagagtacaaggaacaacaaatgggaccaacaagagagaacagaactcagaaccactaagacactggacgagatgtaacaacggaatgtcatgggcacaacacggcaacaagacaacattggaaaaggacaaagacgggaggggaaaaatagcaacacaatcacgaacgaaagcaacagggagcaaacacagaaggagaaaagaaaagagagaaacaagaagaaaaa

SEQ ID NO: 544138 - DNA, 163 bp, Homo sapiens
  misc_feature (4)..(4): n is a, c, g, or t
  misc_feature (60)..(60): n is a, c, g, or t
  misc_feature (112)..(112): n is a, c, g, or t
tggnttcgaacacggcacccgcacatgccgtcaatggtgcaggcctggtatatggacgangccccgggacaccgcggcaaaccccaccgccccgaccccggccgcccagtgncatggagcagcatgcggcggctcggggtgcatctactggaagcatggatgc

SEQ ID NO: 544139 - DNA, 401 bp, Homo sapiens
  misc_feature (401)..(401): n is a, c, g, or t
ctgtagacgacgtgcacaaatgggacctcgaaaggggaaggagaagagggaggagcaggtcatcagactcggacctcaagtggctgtagggagagaatgtatttggtgtgtgcgcatatctttgcattcttcaatggcacttttgtgcatgtgactgatctttctggcaaggaaaccatttggcgtgtgacatggtgggatgaaggtaaaggcggaccgagatgaatccttaccatatgctggtatggtggctggccacagaagtggcccagaggtgcaaggagctgggtattaacggcctacacattcttcgggccacaggagggaatatgacccagacaccctgtgacctggggcccagacgggccttagagaccttggccgcttgggtatgagcgggn

SEQ ID NO: 544140 - DNA, 293 bp, Homo sapiens
  misc_feature (74)..(74): n is a, c, g, or t
  misc_feature (206)..(206): n is a, c, g, or t
  misc_feature (252)..(252): n is a, c, g, or t
gttgcgtggcgcgagcaccccacaatgctctgtcgttcagaaaaatctgtgaacggactatatccagcagggantactgcttgatccctctaaagtgtgatttgcagccacccaccgcactggaacagccctttgccataacctttgaaaaacggcgcggcaagaatgacggaaaaatccgtgagcacaaggcaaaggcttgccgngtgggcatgccgtgcccgagcgggcacggccggggacgctcagagngtggagaggaaggtgctgttgctggcttgccactcgcggat

SEQ ID NO: 544141 - DNA, 297 bp, Homo sapiens
  misc_feature (2)..(2): n is a, c, g, or t
gntctctagctgactcttgaggatcccctcgcgaacgtattatccatggagatctgagacatcctggataacacggaggaaaccccgtctctactaaaaatacaaaaaaattagccgggcgtgggggcgggcatctgtagtcccaattactcgggaggccgcagcgggagaatggcatgaacccgggaggcggatcttgcattgagccaagatcacgccactgcactccagcctgggcgacagaatgagactccatctcaaaaaaaaagaagaaaccaaggataacccgttcgcgag

SEQ ID NO: 544142 - DNA, 122 bp, Homo sapiens
ttactctgcctcccagattcgagacttggaaggaggtaataatatatagtagtaaaagaattgttagtttatctatactaataccaatatcctgtggaggaaattggcgaaaaacaaaaaaa

SEQ ID NO: 544143 - DNA, 371 bp, Homo sapiens
gatagcatttgaatccctcatgaggattgtcaaagtaagtgtatctgtgaatctacattgagcttcctaatgagaatcacaatcgcggtcaaggactagagtcacttagcattatgctgtgaacctgcgttgtggttccgccttcccccactgtgaatatggcatctcctcctgtccgtatgcacgcttgtcaacatttcatgttgggattgtcggcacaaatgctttcgttcagggtccaggcaggtgacctggtaaggtggtgggtaggtggtctctgacacctctctccaggcgacacagagtacatgatggtggttcaaagcaccaccatcgcagaccgatgatgtgtatggcaagtgacatgacag

SEQ ID NO: 544144 - DNA, 128 bp, Homo sapiens
cgatcttctaatgtgtcatcacaggctgctttatcaaaagggaaactcatgctttctattaaaatgctttttgtattgtcatacgtcactatacatctgagctttataagcgcccggggaggacaatg

SEQ ID NO: 544145 - DNA, 130 bp, Homo sapiens
catcgcctgcagttttccttcaggctgaggtgctgagatgcattgttcaggctgacgcccttttgtgtagattggggttgctgagtgacttccctgtgtgccaaggtggtgtggtaccgcagctcgaatt

SEQ ID NO: 544146 - DNA, 425 bp, Homo sapiens
gcgtcggaccccggagcacactgcaacacctagaaatgttgaataaaacataaaaggcaatcttttaaatgcataaagaaatctcaagaaagcaagaaaatacctaaggcttaggagagatatatatttttaaatgcttagaggaagttgaaattcggagttatatctaccaatgcgcatttcctcaacaaaggtgtgggcccagggagataacaggctatataatgttttcagggagctcctgtccattcactgggtcaacagttaaagctaaaatttcagaccatggtataagaaaaaaaaagtcactgaaatgactttggcaaagttcagagtcaggtcagctaccccaggctgatcttgccatcatcctgacacctgtggaacctgggccctcctctgattttcaatttggattgctctat

SEQ ID NO: 544147 - DNA, 371 bp, Homo sapiens
ttttgcctcccgcgcgtattttgtggggattttggggggaaccctttttcccgggaaccggttgtccagttttcggtttttaacgccccccataggggatttggccccccgggcccaaaatttgggccggggggcaactcatttcccggccccccttttggccctgttttcccaaccccccgggcctggaaacaaaatttttttgggcccaggggcccggggggtgggttttcccccccttgggggtggggtcctttgggaaacctttctaaggggccccccttggttcccccccggttgggttccccccccccccctttgttttttttttatttgggggggtccccaaaaagggggattttgttggggga

SEQ ID NO: 544148 - DNA, 598 bp, Homo sapiens
  misc_feature (586)..(586): n is a, c, g, or t
  misc_feature (591)..(591): n is a, c, g, or t
ggtctggctcttttgcccaggctggagtgcagtggtgcaatcatggctcactacaccctcaaccttccaggcccaggctcaagcaattatcctacctcagcctcccaagtagctaggactacaggtgcacactaccatgcccggctaatttatttgtttattttttgtaaagacggaatatccctatgttgccgaggctggtctcaaactcctggactccagggattctcctgcctcaacttcacaattcatttttaaaatttcagccacagcatagagttttgcaataaacactcacctacccaccacctagattctaacattaacattttactatgcatgctttatctcacatttgtccatctaatcttccctctatccacccataaatctaccttgctttttggatccatttcatagtaagttgcagtcatcagaaaggaaaagtaaaataagtaaatttattggtaaataggcaattgatgggagtcaaaagatatttaaatgatatcaatgaatgtcacttaaagttaaaaaatcgaatagcagaaggaggtaaagaaaaaaggaagtaaagaaaaagacntttanaatgact

SEQ ID NO: 544149 - DNA, 941 bp, Homo sapiens
  misc_feature (416)..(416): n is a, c, g, or t
  misc_feature (435)..(435): n is a, c, g, or t
  misc_feature (941)..(941): n is a, c, g, or t
ctcaactttaatgatttaatgtcatcttgccgttcccatgacacctgaagatccttcatttggggactgtgttttgctgtcacagaagaaattccaatacgaaatggtacaaagtcatgatgagttccctgagataagcaaagggaaatgagaagactgtgttgtgatcgttccgtattgcactggagataaataagagtgctctgtttagttatcaacattttattctcagcgaaaggtttgttataagagaacgagataacttttgcgccaattatggaaaaagggaatggagagttcatggttcaaggaatagctcactgggaatagcagtgtttaccctgtttcttctcctaagagttgcagttcgaacttgatacggaagggaatggcggagatcttaacagtgatagcantgctaagctgtagaacagnaatagaacaatgcatcgatataggcaaaagaggaacacagtttagaagtgcgtatcgttctcaagaggataagctagcgtcttgaaatacctgtggagtagtcctttgtgcagcagcctttgtgctctcggggaaaatggacatccatcattgacgatcatttctcgaatctattttgctagcacatgcagtggggaaaaactgctaacctggatatgttgggtgaacatttgcctgtttttaatcgtgcaagccatactcaactagttctacatcacaattcatgatcgcgtcttgatagaacgaataaaacgtctctttagagatggggctctacgtaacatggggtaccgatcaggggattgcggcatatagagccttcatcttgaggaagggggtccgacggagatgggcaagtagtgcgcgctcaaaggaagggttaacccaatggtgtcccacaacatgattatacatctgggccataagggcgttacgcctaagggaan

SEQ ID NO: 544150 - DNA, 132 bp, Homo sapiens
tctctagagagtatccccctacaaagcttcagctctttattaaacaaggaggaggtagaaaacagatacgggaacagttagggatcccttctttcccctatacattacactgacttacagaacacacgcagc

SEQ ID NO: 544151 - DNA, 223 bp, Homo sapiens
aagcagggactacaggcgcataccgccacgcctggctatattttttgtattgtagtagagacagagtttcaccatgttgcccaggctgctctcgacctcctgacctcaggttatccgcccaccttggcctcccaaagtgctgggattataggtgtgagccactgtgcccagcccagacacattttctcgaaaaattttagatcattactatttattttattat

SEQ ID NO: 544152 - DNA, 210 bp, Homo sapiens
  misc_feature (151)..(151): n is a, c, g, or t
accatgggacccgtctcaaaaaataatataagtaaatggtaaatattggtctaaccaaaataatgatccaatgaccctgggaagatgtgggaagtgtgtgggtcatgagtaggggatggaaggggaaaagagccaaaaccttttgttcttnccttaaatgggaaaacaataaaaaaatttcataaaaacccaaaaaaaattcaaggaagg

SEQ ID NO: 544153 - DNA, 417 bp, Homo sapiens
aattagcttggcacagggaaagatgaatgctaagtggaataaaaagactcctgggaacctaattaaattagaatacaactttaaccaaagaaaactgtaaggccaggcatggtggctcatgcctgtaatcccagcactttgggaggtggaggcgggaggatggcttgcatctaggagtttgagaagagcctaggcaaccttgtctctaggaaaaagaagagagccaagcacagtggtctgtacctgtagtctcaacttagtctcaactccttgggaggatcacttaggcctgggaggtggaggctgcagtgagctgtgattgcaccactgcactcagcctgggagacagagtaagattgtctctaaggaaaaaagaaagaaaaaaaagctgcagtggctaaattcatataagacaat

SEQ ID NO: 544154 - DNA, 128 bp, Homo sapiens
ttacagaacgcgacttccactaacctgtgcattttttatgtacaaccctgaccgtgaccgttggctatattcctttttctatgagataatgtgaatgataagtaaaacagctttgactttccgtatgg

SEQ ID NO: 544155 - DNA, 620 bp, Homo sapiens
  misc_feature (613)..(613): n is a, c, g, or t
ttaacatggaggtctatatcatgagaatacgcgtagaccatcctttacagtatctgcctgctataatcactcctattactgtgaggaacattttgagactccgtcaggaagttgactgctatcacattcatcgtacacaagatggatggtcgtcagcagtaccatgcctcatactatgttagtatccttatttgcaaaacggatatcatcaaaattacggaagcatgtttgttcagggtaaatctatagacgcaagctgccatcctgactacgctatgtcgcgcagaccccagacacatgtatggagaatggctgcactactactaccagatgcattccaggcgaagcatgtaccacatcaagaatggatattgcgactggatttatttctgaatctcagtatacatatgccttgaccgtaaacgcgatctatgaatgcagactaccgatatgaacatgcagacggtgaaacatcaggatcaactacatgtgcgtaagatggatggccagctcagcccacgagcacttaatcgtgggacatccccagtattatgaatgccgggactgtggctatgaaagcattactggcacccactgctacattatgggtggntactggt

SEQ ID NO: 544156 - DNA, 109 bp, Homo sapiens
tcgagacaagcgggataatcatgcccatttctcaggtgagaaagctgaggttgaggggggtcaatgaccagtccacgcctaatacaacgactcaccattctaggcctct

SEQ ID NO: 544157 - DNA, 465 bp, Homo sapiens
aaggatcctaggtgaaggagttagtgtaggtgtggtgatactgtgtgacgaagtgagtgtgaaggttgtggtgatgatggtggtgacgaagtgagtggtgaaggtggtggtgatgatggtggtgagaagatagtggtgaaggtgatggtgatggtggtgatgacagtgagtggtgagggtcatggtgatggtgatactactacgtggggctactggtggtactggtgcctgttgtactagtactggtggtactcgtactggtggtggtactacccgtacgtggtgcgggtcctggtgctggtactagtactactacgtggggctagcttctggtgctggtggtggtgctggtgcttgttgtgctggtgctggttgtgatgacagtgagttggtaagggtcatggtgatggtgatggtgatgatgatgagtggggatgattatggtgatggtggtggtgatggtga

SEQ ID NO: 544158 - DNA, 106 bp, Homo sapiens
tcgatacgactttttttgttcttttactttccttgttttccccttccctcctcccaacacacacacacacacacacacacacacacagcccttctgtcgtcttctc

SEQ ID NO: 544159 - DNA, 231 bp, Homo sapiens
aactctgagatttaaaagacctgcctggctcctatcccgacggctgagaaggaccgaggctgaggctctggtgtggtcacatacacgctgccctgtatctggactggggatggtatgagttccaagtttgtcacatgtcccatctgcaaacattctttcatcacaatcaccagcacactcagccagtcaatgcatgtgcacccggcaaatcactgtttggcagtcatcatg

SEQ ID NO: 544160 - DNA, 227 bp, Homo sapiens
  misc_feature (16)..(16): n is a, c, g, or t
  misc_feature (22)..(22): n is a, c, g, or t
  misc_feature (79)..(79): n is a, c, g, or t
  misc_feature (133)..(133): n is a, c, g, or t
  misc_feature (148)..(148): n is a, c, g, or t
  misc_feature (154)..(154): n is a, c, g, or t
ctagagatccatggtntcatcncccagatgacaggatatttgactctttggggaaggtcgaacagtcaagtcaaaaagntgaggattggagaagcagaggcaagagagatgctgggatccgggaagctaaagncaagcaggaaaaggngtctgntcagtacctgagtgagatcgagatgggcaaggccacaggagaggattaacgaacttggaaggaaggccgcctt

SEQ ID NO: 544161 - DNA, 319 bp, Homo sapiens
  misc_feature (28)..(29): n is a, c, g, or t
attcaccgcgtgtgtcaggaaataggcnnctacgctccccccacggctagcggcgccttccatcaggcttacttgccttcagtcaacgcgttgtagctggtgaacaggttgcggtagtccggaatgtgattggagaacaacgtccccaagccctcgatgtcgttgcgccagtcgcggtgcagctcacaggccaggccaaaccaggtcatcagttgcgcgccgttggccgacatgcgggcccaggcggactgttgggtcagttcgttgaaagtgccggaggcgtcggtgaccacaagcacttcaaagccttcggccaggg

SEQ ID NO: 544162 - DNA, 90 bp, Homo sapiens
ccggaacctggcgcccacgccgcgccgtcgcaaggcatccccgagccggagggcgaggcggctgggaagatgaccaccgaggagcagcag

SEQ ID NO: 544163 - DNA, 248 bp, Homo sapiens
gcagtgaagatcctggtgtcgccatgggcgggcgaccgaggcgtagtaaccggtagtttgtaagaacaagactcggacccaaagtctcgctgtctgcgcgaggtgtgccgtggatgccaatgattcggcggtcatcgactcgtagcgtggctggagagagaagggcgacacacaggtggatgcatgtctccgctttggtggccactatggatgctccgatgactatgagcagcagtctctctgaagcc

SEQ ID NO: 544164 - DNA, 130 bp, Homo sapiens
gacatttatatatgatcacaaaaatagcagagattaaaattatgttacattcaactaagccttggtaaagggcattgttcatatgcctgggtttggattgtgggcatataccaattcaggtgcattcttg

SEQ ID NO: 544165 - DNA, 404 bp, Homo sapiens
gatttgtagcaccaagtacaggttccatatccaccacagaagaaagttcattccagacctgtataagcagttgtaatactaacgaaggagcatctccttggtgccacataacttaaaagacttgttaaaagcatctactggctaaagtcagatagttctgggcagactcgttgacttccatgtcctggtcatcagaagactcatcttctgctaggacatatgcagaatctggttcccgaatcagacagaatagaactgtccccacgaaggctaatcaccgttgagggcaaaaaacactgttcttcgggcactctctgatatctgagttttcccttgcccaggcacacagtatatgtcgagatttccaaagaacaagctagactgcagacgtgcccagaaactcc

SEQ ID NO: 544166 - DNA, 693 bp, Homo sapiens
tggtacccggtaattcggccattattgccgggagtgaagtagctgttttctttttgacattgtagacatggaaggtctttaatgcaactttaaatggttcaccaaaggatgctctaacggatgacagcgatactcctacatattatctgcacatagaaccacacgatggatgtcatcctgatgacagcgctgaaaggagtgtgacctgtctgacttctgcatcagatgaaagtgaagatcagcttgacgtggacgctcatgagcatctgaccagcatatacagtgcgacggcaaagtcccaagtgtctgtgcagctcagtctgagtagtaatgaaagctgcacattgagctgcgaggctcttacagtcgagaactggcacaatacgctttgtgaagcctacagagatgaccagcacttgttgataaaggacacatacctcctgtgaactgaaggccaccatgcactatggcgactgctaagatgataccaccacgtattggttaaccttgaagctatgctatactctaattagatacaaatgaaccgtctagccctccgatactgtgataactgccctgaaccttgcttttttgcttacgttctgcagctagatccgccgcagtacatgtagaaccaactgcatggtattccagtgggatacctctacccacttgtccaacccattgtccgct

SEQ ID NO: 544167 - DNA, 895 bp, Homo sapiens
  misc_feature (309)..(309): n is a, c, g, or t
  misc_feature (377)..(377): n is a, c, g, or t
  misc_feature (381)..(381): n is a, c, g, or t
cgtgcggctggtgctgagaggcatgggcgggcttcggtatgggcgtggtatgaccgagatcaacaaaatatgtctaatgtaataacaacacaagttcacagatttacagtgaactcgactctacaagcttcacagatccatggcggtggttcaatagatctattcctacggggaagtaagaagttgcagctcagtgcacataaagttgagacagagatggagacatccagccccacctctcgggaaccaagaaagatgacgggggaggaaacacaggtcagcatgggaacaggggctcacagcggacangggggtgggctgtctctccacctcctcacattaggctaacagggacgcagacacattcaggtgccttngcanaaagagatgccagaggctcttgaagtcacaaaggggaggagtgaagaaatccggcatctcagtccctcacaagacagctgtctcaggcttttcaagctgtgagagactcatcagagcccggggcacggtggctggacgcagcctgagagcagctccctccttttccactccatctcagggtgaggggctccggcagcccctcgtgctgaacagggcacgtgtatctctgctcttctccagaaggcaccaccacagctgcccacttcgggagggtccatctcctgcgggccgggtctccacaagctcggtgtcctgagtttgggtcctccccatcccactgccaggtcagtgtgatctccgcagggtagaagcccagggcccagcacctcagggttggcctcatggtcagagacgggatggtgggtcacgtgtgtctaggggtgtgccgcgcgcggcagcgtctccttcccgttctccaggtatcggcggagccactccaggcacgtgccctcca

SEQ ID NO: 544168 - DNA, 923 bp, Homo sapiens
  misc_feature (678)..(678): n is a, c, g, or t
ggcaattctcctgcctcggcctcccgggtggctgggactgcaggcgtgcgccaccacacccagctaattttgtatttttagtgaagacgggttttcatcatgtggccaggatggtctcgatctcttgacctcgtgatccacctgcctcggcctcccaagggcgctgggattagagctgtgagccactgagcctggcctaaaaattttttttaaacatttttttcaaataaaaaaattcgctgggtgtagtggtgtgcacctgtagtctcagctactcgggaggctgaagcaggagaataacttgaacccgagaggtggaggttgcagtaagccaagattgcactccagtctgggtgacagaataagaccctgtctcaaaaaacaaaaaataaaaatttcagcctggacaacatggtgaaaccctgtctctattaaaaattggccgggcgtggtggtgcacacctgtggttccacctacttgggaggctgaggtaggaggatcagtgcctgggaggtcgaggctgcggtgagccgagatcgtgccactgactccaacctgggcaacagagagcctgtctcaaaaaaaacagaatagaaaaaagaaattttttttgaaaaacacatggtgatgccgggcgtggtggcttacactgtaatctcaggagtcagatgatcatnggactccatcctgggtgaccagagtggaattctgtcaaaaaggaagcgcaagcgaatgagaactctccggcaggaggtggataaagctgacatccgtttgcgggggggaacgaccctaagggggaggcagggccctcggcaaggggccaaatcgtggacctgccggacccaggagacacagatacccagggagttgatcggcaggccaaggaaatgccaaccaggaccggaaaacaatttcttgg

SEQ ID NO: 544169 - DNA, 319 bp, Homo sapiens
gttctacccctccagctaccaccaactttcctgcacctcctacccgggccaggttgtccaggccagacagtggcatactggcttctagaattcctctccagagctactctcaagttatatccaggggacaggcccctttggctccaacccacacgcctcttttcccacccactggagggctcacaggcaaggtgagagaggacacagagggtgccaccactgtcgctacagtagggccctcagtgcctctgcgaattaccgtcacatccttccttaggggaggcattcgtagtcagggacagattccgtactttaccag

SEQ ID NO: 544170 - DNA, 415 bp, Homo sapiens
  misc_feature (5)..(5): n is a, c, g, or t
attanacgaaatcttcaaacattctatgaggtcatacaggcagcatgacaaatagattaaggcaaatcagcacaccaactacgaagagatacactgagcaacaaacaaaagtcctaaccaatccaattcagagtgcgacaggcaggccactgtcagttttataggcaaagaatggcagattcctgccgcgcagaaaccataactggtcaaccctggagtgctgctatgaacacagtcatgatgcagggtcaagaaaccctccttccatgatattctgctttaatcagatgcaaggttgcctttgtgagtagcaaagatggggtctcctacctgttatgatttgaggccccctgggaaggacccaattccctagtcctcacctcctctggtctgatggagttatatgccactccag

SEQ ID NO: 544171 - DNA, 527 bp, Homo sapiens
caaattgaataattatggaccttttggatgccggtatctacttaccaacctaccactgataagacgtctaatagaactgcctcctctacacccacatgaaagggcgctataatggatcaaagggtctctggatgcagagccttgtttggtgtaacgactattcttctcttgggtgagtaacatggaccatgacagcgctgaacatgtacatcggaaactcttgcgcgaaaatcatgcaaactgttcaatgacattttttagcatgaacaacagcctgatatggtctgccttgcacttaaacaacaacatgaaaggtaactgcatcactaaagaaatgatgcagacattttattccagatgctatagagaagctcacacctttaaaccctcctgcatttgtgcactcaaacttggctaccggacatctacccctacaaagtcaggcaagctgagaatgtacttccgtattcaaggattaccgagctacccctgcagaacgtactgttctgtttgcaacgagaaggata

SEQ ID NO: 544172 - DNA, 175 bp, Homo sapiens
tggaacatctcaaacatgcggctcatgtacctggccagcaagtccttccggcagatttcactcatcccggggacgtgattgatcttctggtaacttttcatgtccatcacacgttccagtgacacttagtaatctgtccaatagagagtccagtcatcgtctaaccctccctctc

SEQ ID NO: 544173 - DNA, 788 bp, Homo sapiens
gccatggctgcgcagcgggctggccgggggtctcctgaacccgggcccggccgccccgagccggccggccccgtctgccgtggcttgtccccgtccgcgtccgtagcgcgtcctgcgctgcggctgagatctctttaatgagtggatgggagagcaggcagactgcgtagtgtctctgcgctcatacaagatcagcgtagatcatcaaaggtataccgctgggtccgaccactcaagcacggtgctgcacgcaggctgcaacgacgcagcgtctccgcgggctcttctgctgacgtcgtcctggtggccgatgagcagctgtgtgccagtgccatcgcaacctgctggtccgtgtgcaggcgacgtacgttcagactccgatgttcaccgatcggcatgcagggaatgctttccagaatggacggtggagctgatcgtgcgcctcctacattgtggtctcaaggccgtggtggacttcctgtacggcggggagctggtagctggatgtgctggcaaacattgactacgtcctggacgacggctcatcttgctgcagatctgtgacggtggctagacttctgctgtgatgtacctggtagcaggagagtgagcgaggacaacgtatccgtgtagcctgtcaggagcttgggctcgcatctacgagccgtcaaggcggcttgatgccgttcactcgagtgggcttcatcctgaagccacttcgagcacgctgtccttttacgcgcgatttccttgcagaacgtgtccatgcagaaggctgagtgtctacc

SEQ ID NO: 544174 - DNA, 210 bp, Homo sapiens
caaagaattcggcacgaggcaccattgcgggttgcaagaacaagcgccttacggaaggcggcaaaaagggagccaagaaggaaggtggttgaccaatttttaagaaaggattggatgtagttgaagcaaccttcattttttaatatatggaataatttggaaagccgcctgcaaccaggacccaagggacccaaaatttcacctataggg

SEQ ID NO: 544175 - DNA, 266 bp, Homo sapiens
tggcaaccccacacgcctctggctcaatgaagagtgtaacccttatgtgacttctttttctatttagctcggatgattccatggctgtggttcgccgcgatgcacacacgagtgaggttgctcatctagtgacagattctggataagacttcgctgccttgatgctgatggcctgtgctgagtatcttgagcaatgctcatttgaagatcatgtaacattagtgaatgacgtaactgtctgcacttgtgatgccgttgattcactt

SEQ ID NO: 544176 - DNA, 158 bp, Homo sapiens
ctaacacgcggagttccccatgactttgcaatctccatttgtgagtgggggtaaaaaagggaacccagctagaggattcacagagaccttgaatgacacgtaacacactaccttatctacactctccgattctttaaatagcacaaagccaaatcccc

SEQ ID NO: 544177 - DNA, 204 bp, Homo sapiens
  misc_feature (100)..(100): n is a, c, g, or t
  misc_feature (105)..(105): n is a, c, g, or t
  misc_feature (125)..(125): n is a, c, g, or t
gggactgtcgcgctgtcctgatgagtcagacagaggcaggttcattttcctcaattgcgtgcttcctctgtatccccttgaacctaaaaacagctatctnaggangagggaggagagcgagtttnactgatggattccccaggtgcccaaaccctttggtccaagtgcctcccacccccaacaagtgccagcgggttttggttt

SEQ ID NO: 544178 - DNA, 83 bp, Homo sapiens
  misc_feature (27)..(27): n is a, c, g, or t
  misc_feature (82)..(82): n is a, c, g, or t
gttctttttttaatctgatatgtgagnggctcccaattttacaattcataataacgtcatgaacaatgaccctttagggatnt

SEQ ID NO: 544179 - DNA, 226 bp, Homo sapiens
taacccctttccactcagtgacaagacattaggacccgtagcgtgatgagaaacggatgtccatgtagagatgacacaatgtggcagctctactacagtggcagcagcgtcatttttataacaaacatagcaccctccctcgacacagtactttgagctagtcccaaaaccatggtatatatttctgaccagacaatgcactctattcccacatcaccttcccacg

SEQ ID NO: 544180 - DNA, 596 bp, Homo sapiens
  misc_feature (127)..(127): n is a, c, g, or t
  misc_feature (131)..(131): n is a, c, g, or t
gggaggattagcgcttcagaaggagatagtaggagatcgaggctgctggtgagagaatttgaagccatgcaagcctggtagtccaagctaggtgaagaatggagaagcagaagaccagaggttgcantganctctaaaacgagtgtagtggaaatagaaagactaggaatggaggccagtagtcagaaaaggaatattggaattttcagttttgaagctgacagaattcctgaattatatagctctggcatttgaccataggagtggatggctgtagtgaattctatcctagaaatagaaagtgaaaaccaattaaaaccattctttttctgcaatgccaaacttactgagttatccttcagcattggctttctctcatttatcccaaatacatcaaccagcagtatttattttaactgctaagttgattttcagcattctcacgtgatatgaaacaattgataattaggatacaatttataatccgaaactgatgtgtttgcctttgaattactcattcatctataagtttagtccttttattaggtgaattctgtgtatattggatgcaaaaaagaataagacaaaagcaaaaa

SEQ ID NO: 544181 - DNA, 1112 bp, Homo sapiens
  misc_feature (1)..(1): n is a, c, g, or t
ncaacatgtggatggcatgtggacgaggccgcgccgtcactgttcggtgtttgcttcttgtggtacggtgtcttcgtcgattgtcgatagcccatacgagaccccccgccggggggttttgttaccgcgccgcgtgtgcggtgctccgtaccgccgcctagtattgtaactcttgtgtggtgtcccaccggccacacgtgagtcgggacttaacgcgggtttaccgggggtcatagggtgtgcgcccagtctgtcccctgcgcgctgggggattttcgggcgcccgtggcttctcttctaaggggcgccatctggggccttggggtgaatgaagacttgcctgattccagaggcccggccctgtatgaccccggagaaaggagaaagggaccagacgtgaacgggttccaatgcccgccgggaccccccgaacgtatccccaacttcgcagagtgtttcaggatgacccccagtccggtaagcctgacctggaccaagttctggacctggagttgaaaggtgaccttgagaaatgcctccccgctttcgtgaagtgcgcccaccagccaacccagcgtttctttgccagagaagcttctatccagcccatgaaaggtgttggagactccgcccataaggccattgatccaggattatggtttccccgttcttgaaattgaccatggatgatatccaacgccattcttatccagaagaatgtatggtatctctcccctttgcccagccctccctggatgaaacccaaggagattatgagaaaatccctggtggctctctttgtggaggaaacttaaccattcccctgatggtctccagctatgatccagaagacctttaattattatattttccatccctataagctttaataggaaagtttctttccaccaggattacccgtgtagctacctacatgctgagaaaatatagccctttaaatccatttttatattataactctgtataatagagataagtccctttttttaaaatgttttccccccaacccattaaacccctataccagttgttttagtaaccatacatgagaaagatgtttatgtagctgaaaattaaatgacgtccccaga

SEQ ID NO: 544182 - DNA, 83 bp, Homo sapiens
gcggccgcctactactactgctcgaattcaagcttctaacgatgtacggggacatgatgtttttaaaatcttattaaagtttc

SEQ ID NO: 544183 - DNA, 546 bp, Homo sapiens
agactaacttggcagagtgtaatagagcaaaggtgtagataataggctagtatagggccaaataatgtacagactgtagagtttagtattttcatgggtgagtacagtttatatcttattctgaatgggttagagaaacaacttcacatagtagtttgatcaaatgtactgaatggaataaatgaaggcataatagtcatgcattcattttactgaccccattatgagactggggtccacctattaatatgtattcagttttctcaatatgaccacttagattacttaataatcaaaacaggacattatgcagtaaaagtaggatggcgggcatcaaactatgactacagctgaaatacaactgagtggtaggactacacaccagctcagaaacaaggatctcattcatccaagatggttatgtgtgaaatgctaacatatgaatacaactaggtcaatgtcaaattctaatgaaaactacctagtctataaaatagattatttccaaattgtaaagaaccacttctagtgtgtcatccaacatga

SEQ ID NO: 544184 - DNA, 490 bp, Homo sapiens
ggcggagggaaagtcaccctcaattaccatctgacatggtctggtctcagctatgccacggggggcatgaagagtagaaagtctattatacatgcccgactgaactgaggaacatggcttggggcctccaggacagttcaggtccccaagctaaccccctacttcccagacagctgctcgtacagtttgggcacatagtcatcccactcggcctggtaacacgtgccagccaccggggccctgagctcatactttttacggaaggacgccaccttgaatttgccacggtggtctccagatcggttgctgaggatgggctcgtcacactttagcggcctgtcctgctcgtaaaccagccagacatagcggtggaggcctgtgcccttgggaggcccgagcccacataatcggaaaggactgtgccactgctgatgtcattgcccttcatgttgaccaccaggaaatgatgcatactctgtatgggggatct

SEQ ID NO: 544185 - DNA, 105 bp, Homo sapiens
gacgcatcaaccccatctgctgaaccgtggtgttctccagtggcatctgggctgcccactttaggatacacagcatcagagcgttgctcacggctcctctatgtg

SEQ ID NO: 544186 - DNA, 1867 bp, Homo sapiens
aaagtgaacttgaggtatctctaaggtaggcctgtatttcatacatgaagaaaggcatagagaccaatataattagtacccatattctacctctctgttttagctataaatataattcttcccctccttgtcccagaggtagccactaattccagagtttgtgtgttgaagggcacctttcctgccagaagcccgtaccctggctgtgctgatagatggggtccacaaattctttgtaggatcccctttttaaaaaaagctttacataaatgttatcatttaaggtaaacaccattctgtaacttgattttctttaataaaagtcagcatgatatttttgagatgtattgttcttacatgaccagatatggccccatacttaatagttaaatcaggaaattgaagccagacagcttgaaaaccttcttaatggaaaaaaatgcaagaagtgggtgggatagagtttctgttgaatttttgtatagaacattgtcatttgtgggaaactagttgatttgaattctgtgttattttgaatagcctggggtgggggatggaattcaactttacctaaaaaaggtttcaggccaggcatggtggctgacgtctgcaatcacagcactttgggaggccgaggcaggcagatcacctgaggtcaggaatttgagaccagactgaccaacgtggggaaacaccatctctaccaaaagtacaaaattagccggcgtggtgacgcatgcctgtaataccagctactcaggaggctgaggcaggtgaatcacctgaacccgggaggtggaggttgtggtaagccgagatcacagcattgcactccagcctgggcaacaagagcgaaaactccgtctcaaaacaaaaaaaaaaaaccttaagctgggtgcggttgctcacgcctgtcatcccagcaccttgggaggccgaggtgggtgcctgtaatcccaggtacttggaaggctgaggcaggagaatctcttgaacccagaaggcggaggttgcagtgaaccgagatcatgccattgtactctagcctgggtgacaagagcaggactccgtctcaaaaaaaaaaaaaaaaaaaaaaaagaagtagagacagggagacggggtctcactgtgttgcctaggccggtcttgaactcctgggctcaagtgattctcccaccttgacctcctaaattgttgggattacaggtgtgagacagtgcacctggccgaaatagctcaagtttctgaaaaacaaatctgaatctatttgttattcttagcgtcactggtctggctttcagaattaacatacaaggttgccacacctagttctgcccagctttatgtcttttattccagtattccaccaaagtttgttttcctgcattccagttctcaagtcttaagataaagattgtacttgacagtttagtatatccataaaactatttgaggtggttaaggttcttgggttcattttccttaatactttgctgaatattgtagattgtaggcaatgaaaaagtctactaaattaggaaaaccttgaataattaggtatcctaggtaagagcccctaaacatcaagcaatctgtgagtctgtaaagaaataaatattttttggattattcttatctaattccacccctgttggaagatgatttctttgttctttgcaactatggaagctgtgaaaatcatcacaagtgcctctgaaagcgagtgttaggttggttagagggtttaatattttctgcaatggtttgtaggaattttaataaatgtagtatattttctgagatgattttgtaaaagtactattttaaatatcaaatcaaccaataaattcacatttgtgttaggaac

SEQ ID NO: 544187 - DNA, 108 bp, Homo sapiens
tgacttttcacaggccacagatgcagcctgctattagagaacgagacttcaggtcttaacttcctctgaaagccaatgatgacaggagcaacttcgtgcaaaccaatt

SEQ ID NO: 544188 - DNA, 1319 bp, Homo sapiens
ggagaactaccaagaaagtctatgagcagttctcttgcaccttaaaggcttggtaatacacgatgactctcacacatcggaagaagctctccagaggctgtatacaggtactatacattctgagctctggtgagtgatgatgagtgtctctcgtcaaggcactacgtgcacctagtaatgacgggacgaacgcagaacatcatactctacttatagtcagcagtgtgtacgactctagatggactcagggtagcgtaacctcgaggactcgtattggtggtacaccgtcattgcgtgacaagcatggcctctatgacatgttgatctcaatatgaatttgaggccctagttcgcagtgagataactggtggtccatacacgctgacaggaacttatgagggaggcacatgatcgtgtagaacttgtcatgttcttcccaaataggcaacaggccctttggcacatcatttccccaaggacgggactggaggtgcaccatgaggacataacacagaaagccatgggcaatgacgacaaatttataccgagatgtgtgtgggacgaaactctccgttggcgacaaagaatccactcgaaaactgacccagtaactccggggaagcaattagccataaggtgttaggcatatacaagggctagggttccaagaatagggtccgaaaaacctctaggacattattgagctttggcaacaattccggacctccactaggactttagggtcatttggaggcacaacaaaggggcaaacacctagtttgtgaactccgcctaaacagggggaataaaccacatggggacgaagacactctcaatttgccttcacggacgtcctcacacaagtctcacttctaaaggaaagatacagagagggttctataaacaaagtagcgtgcgttaaatccgattgggggcattgcccagaggaggacaatacccgacaacattgggcattgactctagaagacaggcccttgattaacccccaaattgtgcgccaactgtaatttgggcgaggcaaccccttgtactttggggccaaagttaccactggacccagctaggggctccctgagtagaatgcaaaaggagaacccgagagatgtcttaggttccacaagggggagtccgggggggtacccataccttccttggacgtttttccacatgaaattaaacctttgcgcgccttggctcaattgggaaacttatgcggttagggatcttttaccgcaaaaatccttaagaggagagggcatataccttctccaaggaaacaagcgcgtgtgggctttaac

SEQ ID NO: 544189 - DNA, 383 bp, Homo sapiens
ctaggcaggtggaaatcaggaaaccatcttattttatgcgcgtgtagtgagggctgatgggccttgaaatgtatttcctgcactatgtgtgtgtgagtgtgtgtgattatactttttaggcctcacagccccatcatccctttctaataacgtcacgtcgataaggggcttaggattgcatctggcctgtgtaagccctctgagttctgcggttcttagagttcccttttcagcactatagctctgccttgttcccttgttcctccttctggcgccccgtgctgtgccccctgcaggagtccaagctgtccccatgctgcgtactggtccggccgcccctcccgtggtgtggccctggacgaaccccctcctgatttccacct

SEQ ID NO: 544190 - DNA, 141 bp, Homo sapiens
ctgtacaagagcctaaatacagtacagtcaagagagttgcctctttgcatgatctcaatatgatatgtcaatgtcggtacaggataaataataggaaactaccttcagattattgggacaagataagaatatcaggtgtgt

SEQ ID NO: 544191 - DNA, 710 bp, Homo sapiens
  misc_feature (134)..(134): n is a, c, g, or t
tgcccctcggtggcagcagtatacatcatgggtgatctggcgcagcagacttgtggagcccatgatagagatgacttgcccagcttataaccatcgtggtgtgcgtggaccgcgtatacgcatgccactgcttntatgacacactgtctgagcagggagagaatgctcttcaatagtgagcactacccactccgctcagaggacagacgactagagagacgcagttctaggtggaagtaagtgacaacgaaacccggctcctattcgtggtctagatgactcagtggcaccatatcgcacgcatgggcatgcagtgtgtatggataatgaccgcacatgacctactatgtgtctctagcccacactgatgccacgcgagcgcgccgagacccttggacacccaagtgcggatggtgctcgagatattgtgttgtgtgaagataacgctacacgtttattctctttgactaaactcacatcgccgcgtggagactgtgactacatgtggacacagggttgtaatacctgctttataaatgcactactgtgacgtgtatattactaagactaggttctccgcgcactgctgagcatacacaacctgggggaattgttcatcatgcacactttttgatactctgccttccgtatgttggagcccacggtagagggtgacggcttctgtctgagcgtttgataatactggagtg

SEQ ID NO: 544192 - DNA, 430 bp, Homo sapiens
gcctggggcactttccttttactccaaaaagcatcaggtctcactttcagcatgtctttgtcatagtctaagtgcataatccatgtaccgaaaatgtgtgttatagtgttgcagtttccagatcacaagatgtgccaccatttggcccagcgattcctcagaggatgtaacttttccaaagttcagccgtgtcccgggcatgttccttttacgccacacatgtatactcgatgcatgtaccatgcaggtccataaactctcataagtttcgacgcaattggccactcgaatcgaccgcagtgatgtacttgaaagatctggcggagaactttgtcacaaccgtcctcgtgtatacctctgtgaagttcaacttcattaccctgggtgccaaccaaacggataccgtcaagcccaggaaggttgcccactt

SEQ ID NO: 544193 - DNA, 1159 bp, Homo sapiens
  misc_feature (3)..(3): n is a, c, g, or t
  misc_feature (289)..(289): n is a, c, g, or t
  misc_feature (535)..(535): n is a, c, g, or t
  misc_feature (551)..(551): n is a, c, g, or t
  misc_feature (582)..(582): n is a, c, g, or t
  misc_feature (598)..(598): n is a, c, g, or t
  misc_feature (611)..(611): n is a, c, g, or t
  misc_feature (633)..(633): n is a, c, g, or t
  misc_feature (676)..(676): n is a, c, g, or t
  misc_feature (684)..(684): n is a, c, g, or t
  misc_feature (754)..(754): n is a, c, g, or t
  misc_feature (856)..(856): n is a, c, g, or t
  misc_feature (910)..(910): n is a, c, g, or t
  misc_feature (1043)..(1043): n is a, c, g, or t
  misc_feature (1049)..(1049): n is a, c, g, or t
  misc_feature (1056)..(1056): n is a, c, g, or t
  misc_feature (1061)..(1061): n is a, c, g, or t
  misc_feature (1093)..(1093): n is a, c, g, or t
  misc_feature (1098)..(1098): n is a, c, g, or t
  misc_feature (1122)..(1122): n is a, c, g, or t
aanaatctagcactagtatataagaaaaccaaatataggcagtgatttattcatatattcctgttcaaagccacactgaaaacagaggcagagacatgtactctggtgtgatctcttgtcctcagtgtctctcctgggctcctgtccctcttgctttatagctagctgcccggagaccaaggtacaggtgaaagcaaggtagcagcttgcgggaggaggcctgtctggcttaccagtttatacactgtggcctcaacctcccagacagggcagagaactgtgggcagcncgtttgctttctaggctggctggagaggtgggagcccattgatagactcatgaaggaaactatttttgaaacaggcttcctccttcaggagagaacatgcggactaaactgtagcaattccagtccacctggcagtaatccttttctttgcaaagtactgtctctttggttccagtaagttggaccaccacatgacaacaatttccctggaacctggtcactgactaacacagacaattgggactncagagcctcaagagcnaggagagggcacagtacatacagagggagtnaaatgggatctcattntgagtgctgcctnccgcacactcagaacggcagcnccaaggcccggagtgtacaggggcttctggcctgaggtgaatntgccaggnccaagaaggcacacaggtaggagcacagagagcgccattcccacaggcgggcggcccagcagcaccagtngaagctcagctgtgctccagctgctctcggcagagagtacagtgcacagtgtatgcgctagctgagaaagatctcccggacgtatgtgagcacaccctctcnctcctcctcctcagggctcctgctacaggcagagctggaaccccccggcctctnggtaaggctgagcgctggagcgagtgcctgtgtgcccactgtgctctccctcactgctgcgccgagagctcgtgtgaacgcgacaggagcagggaggggagtctcctgggtatagccccgccagcccggctcncgcagnctcttcntgttncgctctaataagattccagacacacaactatntactnatcagcgtcaagtctcgtgcaggnttgtttttattagaagtaattgtcttgtaaccggatc

SEQ ID NO: 544194 - DNA, 729 bp, Homo sapiens
tttcaagagaaatttttaagcttaaagtttatatcccagtgcctggtacaaacagtgtgtctccctgactaggcacacagcttgtagaaacagtgttagaactcactgaaagcctggtcttatagaggaatagcggcatcatatttcgttcacatataggaggttggtttaagccctttatttctcgttatggaccagagcaagcacttcttatggaaaaagtagtctgtggattcaacgttaactaagcagtatagttaaaagtcgctctttgggtgtctacctccctccatacatgagcttcaaggacactaagatgttataaaggagtaaataatgatgttcattttgacactgccacagttttggtaactagggtcctacggagggaaatgttcgcctgtcgaacttctctctgttatgagaggattcagttaggtcactcatgtgttgctcactcagcttcaatcacaataagcctagtataacctggtttcgttacaggtgtctccagtccagatgttcttcgtaatagaatcgaagtttttagtcctttgagtccaaaccagcttggtaggcataatatgtactttgaaaaataagatcttatcttggagccccatcagtatgtagagtttattatgtaaattatttctaaccaccgaaacgaaagctttgattatctaacatgtgagtctatgggacgaaagtgaaattagctttttattg

SEQ ID NO: 544195 - DNA, 113 bp, Homo sapiens
  misc_feature (93)..(93): n is a, c, g, or t
gcatgtggaagatctacacttcttcgtcgcgctcccgggatgcagcagcatgctgaatgtgtactgaagtcgcatcacggagagcacgagagnaccgagttcatcggctaacc

SEQ ID NO: 544196 - DNA, 1091 bp, Homo sapiens
cagtgtggtgtggccggtggtgtgtgtgagtgacctgtggtgagatgtaatgtaggctggggaaattggggcctgttggtggtgccgctgaaatatgtttatggtggttctttgcgtaggtgcgcagttggagggttggcaagggggggtgtgccgtgtcgcacaggcgcggtaagcttcgctagtggaatcgatggccccagtgtttctcacgggtgataatacggtattgagaggtttgtttggagggggaaagcgtgtgtggggatgtaagtgttgtatgatttggaggttgtgtggctagttccgttggtgttaccgaagatcctttggtagtggtacccaatggaaactggtgtaatgccgttcttatttctatgtggtctgcggccctatgggaggtacgcgtttatgtgtggtcggaggttgacccaggtgaattgctctgagctcatgttgtttggcgctttccctgcgtgtgtatgctagtgtgggtttcttgtgagtctgggtggttatttataacaagggtttctggggaactttgcggaggtatgtgggatctggtcaagctgggaggtgtctcgcatagtggctctgtgtgagtcgtgtgaattcatttgtgatgtcaatattacagtttattgtggtataaggaataaggagataggatgtatattatgaccaaggaatgttcatgtgtaggacggggattcctagaattatctcaggtaatcataggtagttggaattgcctgcgcccagatctctcaaccggagttggtggtggattttgtgtgatgtcgaagattaaggtgggctattgcccaagagttttttgttttcctatttttgacgattggagcccttaagatgcacgatggaagttgtgttgtctgcgtttctttggtaaaaggagcaaagcgaggacctggagataaaacgctggaagcaatctgccttggaaggattcagcacgagtagatggtaaacactcttaaaggggaaagggggggtttgatttaaatagtaaatcagtaagtcacttgtaatttaagcaaaacaagttggagttacagagggtagtttcc

SEQ ID NO: 544197 - DNA, 206 bp, Homo sapiens
ctgtcccgagtctacaatgctatcattccctttaatatgcgacatatgcattgtaccgagaaacttagtgccgaataagtgatcaggtattgctgtttagatatccccaagtccttcaatgctatcatttcctttgatatttggatcatatgcattgtaccgagaaattagtgcgaagtagtgatcaggtattgctgttaagggga

SEQ ID NO: 544198 - DNA, 875 bp, Homo sapiens
caaaataagacaaattaggcggatatagtggcatgtgctggtgtcccagctacctgagaggctcaggtgggagaatcgcttcagcctgggaggtggaggttgcagtgagccgagatcgtaccactgcactccaatctgggtgacagagcgagaccctgtctcaaaaagaaaaaaaaaaagggataatcgctggtgagccactcggcggcccgggcctctaacgactaagaatgacaatagaatagacttaaccaagactatggtgggtggcccaccttgtaaatcgccggctactgggagaggctggactgtgggagaatcgactctgagcccaggaagtcgatggtgtagtgagccaatgattgcagctcactggacttccagcctggggtgacacgtggaactggtgaacctctggtgttcagaatagaaaatagaaccgatgaagacaaagcaagttcaatctgcaaagagctccaaaaaacacacgtggtggggggaaacggagagttggctaggatttggactgggggccatggcgtaggccccaatttgctcgattgccgcccggctcgggtcactccggggcgagctggtgggttggggcgggtcgctcctaaaccgggggctgggcgccatgctgtgtgttactccgcagcttttgtacatggatgttcccctgagtgtgtgagaccttggcgcccaggtgggtctcctcgccgtcggaaattccccacgcaattcgcggggacggtctagaggtggggtggaactcccgttgcgcctacagggagcttaagccccccagcctgtgtcatgatgcgagagatccgtggtctgttcttaacatagataggtttcgccgggtttgttga

SEQ ID NO: 544199 - DNA, 765 bp, Homo sapiens
tagcctactgtggctagtcaaccaccggggtccctggccttctcgtggctggggccggcgcaccgcggcaggacggggaggcgggacatggcgtactgcgtgggtgagccggaccctaagcaagggatgatgtgaactacaaaatgcatattccggatgatcaacgagcagcaagtggaggacatcaccattgagcttcattctaccggtccgcaatgccatcgaccctgcgtcaggttcaccatcgtcagcctcatgtacttcgcctttaccagggatgactcgtgtgccagaagacaacatctggagaggcagtcctctcgtgtatatgaacttctttctgtatcatcagtgtgttagctttccccaatggtccgttcacgtcgacctcatccagccttatggcgaatggtttgagggactcagtgtgctctacttccgtgtgcctggtattccatactcttcctgaatttcgagcaggttaaatctctaatgtatggctagatccaaatcttcgatacgccacaagggaagcagatgtcatggagtatgctgtgaacttgccaatgtgatcacctgggagaggattatcacgccactttgatatatttggcattaggacattgtctggggctgggacaatgaaggggcttggtggatccggagtgacgggctctgctggacaatcaggatacctgggagctgatgcgactcatctcatgcattcctccaatgtgcaatgcgggggaccagggatcggaactc

SEQ ID NO: 544200 - DNA, 168 bp, Homo sapiens
ttctgaatgagacctgctctcgtctctctttctctctctctcacacacacacacacacacacacacacacgcacatatatatatctataaaaagtctcagagggaacatgtaaatgtgtcccactacatattatttactccatatatattataggtttcatcaaattg

SEQ ID NO: 544201 - DNA, 122 bp, Homo sapiens
gtcgaccaaaaatgctctgtatggttctctgttagcaagtggtgtaccagacaaacacacgtgtatgcacactcacatagacacaggcatactcgtgcccaaatgaaattaaaagatgattt

SEQ ID NO: 544202 - DNA, 595 bp, Homo sapiens
  misc_feature (492)..(492): n is a, c, g, or t
tcactgcagttcggtttgttgggaagtatattgacctgtgaaatttaaatttgcttactaggaaaaccgtcttcagaggcagtccctaagcccaagagagccccaaaacagaagaaagtagtagaggctgtaaactctgactcggattcagaatttggcattccaaagaagactacaacaccacaaggtaaaggccgaggggcaaagaaaaggaaagcatctggctctgaaagtgaaggcgattataaccctggcaggaaaacatccaaaacaacaagcaagaaaccgaagaagacatcttttgatcaggattcagatgtggacatcttcccctcagacttccctactgagccaccttctctgccacgaaccggtcgggctaggaaagaagtaaaatattttgcagagtctgatgaagaagaagatgatgttgattttgcaatgtttaattaagtgcccaaagagcacaaacatttttcaacaaatatcttngtgttgccttttgtcttctctgtctcagacttttgtacatctggcttattttaatgggatgatgaaattgacgggtttttattattgtgggaggccttttaac

SEQ ID NO: 544203 - DNA, 468 bp, Homo sapiens
  misc_feature (148)..(148): n is a, c, g, or t
  misc_feature (150)..(150): n is a, c, g, or t
tgaggatcctgtgcactgcttcggatgcaggtctgggggcgcacggttggggcctgagctcagttatagggaagggctctggatgcaaatcacccatagcctactgcccccaacgggcaactgccctggtgcggtacaacctctcagngnctgtcacctataagggctccctgtgtcaccacaggcaggtggccagaaaggaaaacagtgaggcacccggaagagcagcaggcagatctccctgcagaaggaacacaagactcggaggacatggagcgcctggacctggagcgagcatgaggctgtgcggggaagcagagccaggatgggggtgctaagcgcctggtggcctgaaatgtaccacagctaccaccgtaatgacgcgagttaccataattacccagaatggctgcgatggatgctccctgctcagcgccttcctagacacagatgctgctggggcaggag

SEQ ID NO: 544204 - DNA, 280 bp, Homo sapiens
aaaagggtcgaccgggcgcggtggctcacgcctgtactcccagcactttgggaggcgatttgggcggatcacctgaggtcgggagttcagaccggcctgactaacatggagaaaccccatctctactaaaaatacaaatattagccaggcgtggtggtagcgtgcctgtcattccagcctgagtgcagagaaagcacctgcctcccaaaagaaaagaaaataaaagaaattcggaatatatagtaagtcaatcttaccctgtctttggcttgtaccgctg

SEQ ID NO: 544205 - DNA, 156 bp, Homo sapiens
ctcttgtgttgtgtggtatgtatatatcgtgtggtattgtgtgtggtgtgtgtgatgttttgaggtgtgtggtgtttagtggtgtgtggtgttagtgtgtggtgtgtatatatcgtgtggtgtgtgtggtgtgtgtcatgtgttttgaggtgatct

SEQ ID NO: 544206 - DNA, 287 bp, Homo sapiens
  misc_feature (9)..(9): n is a, c, g, or t
  misc_feature (90)..(91): n is a, c, g, or t
atcggcggnattcgtcgacccacgcgtccggcagaggcgcaggtagatcgagttggggagttgcctggagggcgggaaggaggcggcggnnaagagggcgagcctgaggtgaaaaagcggcgacttctgtgtgtggaggttttcctcggtcgcaagccttcagtgtccgcagttggcgtcaggtcttcctgccgagaaacgacgtggagaatgaaagggcgtttaacgtcgtcgtcgagccgccgtcgggaggagcgccgttgaacgccgaccgtaaccagctgctg

SEQ ID NO: 544207 - DNA, 164 bp, Homo sapiens
ttcacctctcagcactgaaaacccaaaacccagctggccttaacactccttaagacagaggtcacacttgaccaaaaccacacacaccaaaacctgatttggaggatggtgtctccactaggcacctgctgggctgagcttctacctacgagtaaacctctgtc

SEQ ID NO: 544208 - DNA, 270 bp, Homo sapiens
  misc_feature (179)..(179): n is a, c, g, or t
  misc_feature (182)..(182): n is a, c, g, or t
gagtttctggagctgttccgagtcccgtggagtctccatctgagccctttcctagtcctggcatcccgaagatggagaatacgtccctgagcgttttgccctgtgcttcttgctgttggctgtttttttttctctcttcggctcagctctatccatagatgaaacacgggcgcccctgntgntgaaagaaaagatgatgcggttcggggggcggctggcgctgaacaccaaggaggagctggccactgagaggctcctgtcgctcaaaat

SEQ ID NO: 544209 - DNA, 137 bp, Homo sapiens
  misc_feature (93)..(93): n is a, c, g, or t
  misc_feature (110)..(110): n is a, c, g, or t
aaaacaaccttcacctgtcgcacccacactcattcgggtggacttgccggcgtcaccgccgcggacttcgcttgggccatgaccagatataantggtgattacagacttntttccccttctaattaaatggggggga

SEQ ID NO: 544210 - DNA, 379 bp, Homo sapiens
cctgacgtagtcgctattggttggcatgatagctcatgcctgtaatcctagcatatttgagaggcctaggtgggaggattgtttgagcccaggagttcaagattcagcttgagcaatatagccagatattgtctctacagaatatttaaaaaactaggtgggcatggtggtgtgcacctgcagacccagctacttgggaggctgaggcaggaggagtcacttgagcctgggagttcaaggctacaatgagctgtgtaagtgtcactgcactccagcctaggtgacagagagagaccctgttgctataaaagaatacagtatacaatacttataacatacaaaatatgtgtcaaactatggtaaatgtagtaggaaaggc

SEQ ID NO: 544211 - DNA, 457 bp, Homo sapiens
  misc_feature (94)..(94): n is a, c, g, or t
ctgggctcccagtccagccactccagggtggctcctgcccggtgggggctgggccttgggccagctggcagcacagccagggtaagcatgtctntacccccacacatctcccacccacctgagcgccatgtgttcccggacacgggcgggcgcctccttgggcagcaaggggccccaggagccaccctggagtggctggactgggagcccaggagggctagggtgctggagacccctgaggacaagacctccttaccaacaggtacaggggcaggtgcagctcagtatcttaccgaccagctcagcccttcctgtgcgcactggctgagcacctgctagggcctcaggctccctcggccttcccatacctgccctgttgtacccctgaggcatccttatggtcttgcccatcccatgccaaggcagctctggcctgctcctcactgtcctggagcct

SEQ ID NO: 544212 - DNA, 343 bp, Homo sapiens
  misc_feature (94)..(94): n is a, c, g, or t
ctgggctcccagtccagccactccagggtggctcctgcccggtgggggctgggccttgggccagctggcagcacagccagggtaagcatgtctntacccccacacatctcccacccacctgagcgccatgtgttcccggacacgggcgggcgcctccttgggcagcaaggggccccaggagctctcactgttggcccttgcgtagttcactgtcttcccacttgtttagaatgaaggggcaagaatttatacaaataagcagaattttttctttcttttttttttttgagacagagtgagactccgtctcaaaaataaaaataaaaatttaaaaaacccaaaa

SEQ ID NO: 544213 - DNA, 129 bp, Homo sapiens
aggcacgacaatgtacatgtcataaggatgagactgtctcagagaaactgttagttcaaaaagtacagtacacatccggattacatcccatatttgttgcatatttttcacaaagtgccaatcaagcct

SEQ ID NO: 544214 - DNA, 329 bp, Homo sapiens
  misc_feature (181)..(181): n is a, c, g, or t
ataattactgaaagagcaccactgacacatggcaccgtcccaagcgctatgctgaacacttcacactcattaatccctttaagcctcccagaaatcccgggaaggaccattgctgtcatcactcccattttgcataagaggaaaccaagggttagagaggcgagcaaatgtgcccaaggtnacacaaacagccagcagtagattcccatgcaaggagtcttacttcaaaactcaaactcctatgaacaattaacacggttgctgcctacaaacacgttatgggacactagtgtgttgccagggcagttagggtcacgttacttttacag

SEQ ID NO: 544215 - DNA, 475 bp, Homo sapiens
  misc_feature (438)..(438): n is a, c, g, or t
atactgagtatggaacttctcgcctccgggacgggtgaaaaaataagttcgtggtggttaaagcatccagcctacgttattgtcgtgggggcacccctaccagactaatatagtagggtacctccctatttttctgactctagactcttttataccccctaccaaatccaatcctaccatagtggcccatcatctccaagtgggcattctctgcagtcaagtatggctctgcagggtgtccggaacactaccttgggtgcgggggggcgccgggttcaaaataagacgcaggccaatagattatttcaacagcctcccagtgggtctcggtgcctttccccttcagtttatcttcaatctactcctagaagagcggccaggggattctatgaaggcaggtccaaatatcttactcccctgtacaaaacctcggagggnattcccatctcactcagagtagaagatcatattctta

SEQ ID NO: 544216 - DNA, 146 bp, Homo sapiens
gactctaagaggatcccggtgtctttctgtccagaggggtccccacaatcttgaagcggatctcatcggcgggctgaatcacaatatcctcatccatggtctggtagcggggggggtgggagaaggaccggtggggtaccgagctc

SEQ ID NO: 544217 - DNA, 190 bp, Homo sapiens
caaccatgcatttgtaataatcttcttcatagtaatacccatcataatcgcaggcttatggcaactgacataattcccctaataatcggtgcccccagatatggacgtatcaccgcaataaacaacataagactacatgactctatacctaccctctactcctactacctgactcgacatctgcatacag

SEQ ID NO: 544218 - DNA, 326 bp, Homo sapiens
gtaatcactcatatattaggatttaagtctgccattttggtatttacttttgtgtttgctccctctattttacctgcctctatttcccctttcttatttttctgtaggttactttaacatttttagtgttctattttgattttacagtactttttattatatcactttaatattttaatgattgctctagagattgcaatatacatatgtagctgctcagcctaccagtattaatttttcattgctgctgttgttgtttttcgagacagagtctcgttctgtcacccaggctggagtgcactggcgtcatctctgctcactgcaag

SEQ ID NO: 544219 - DNA, 313 bp, Homo sapiens
aagcttcgactgtgaatggaatgttgtggcgtgtctggatcgtatgtctgttctgtgccagatgagctgtcagtccagttccagcctgactcgcagttggctaccggatcgctatccgcgatggctggaccaggacgatcgatcgagtcgatctggcagtcttgatcccttggactgtgggccgacgacagtcgcggatcgatccgagcgcgcgatccagcaggctggtcgatcggttctggtcggtctgcagcagatcggatcgatcgccatctcgtcggtggatcctgtcagcctggtgtatttgtgccgg

SEQ ID NO: 544220 - DNA, 374 bp, Homo sapiens
aaatcccctgcagataattatttgaggcccagcctgaaaatttcctctatggggaaatcccccaaaaaagtccccccccggcccaaaatgcccttttatccctaaactgaaaaaaaaaatgttttcagctaatttggaaccaccctttaaaaattttattacccccccccccccaaatttggtacaaaaatattcaaatttgggcccccccttagcatgggcaaacaactgtaaaacaaggtcaaaaacccccttttaaaaccccccaaaaaaaagccccttttattaccccccccactggggaagggaaaggcccttcctttttttaaaaaaaaacacttttttggaaatttttggcaggggttagatttttg

SEQ ID NO: 544221 - DNA, 204 bp, Homo sapiens
tgatcgactcgggccggtagagcggctgctgcagcagacacagaggtccactatatcttttcagatttagtgtttttgcattcttcagataaatatccagaagtggaatagctgtatcacatggtagttctattcttaactttttgaagaatctccatattattttccacagtggcgccaatttatattcccaccaacagtgtt

SEQ ID NO: 544222 - DNA, 126 bp, Homo sapiens
tacgcccagaggcagcatataccgtcatttcctggtgggcgaggcatgctgcttcccaatcatgaggttccttctgcatggggggagtgccagtcctggtatcacatttcgtgccttctctcccca

SEQ ID NO: 544223 - DNA, 127 bp, Homo sapiens
gaatggtgcggctaggaagatctcctcctttacatttctcttctccctcctcctcctttttctaaaactgtgcctccaccagaggggcagggctcttgtagatgagaatcctggcccagtgacagga

SEQ ID NO: 544224 - DNA, 792 bp, Homo sapiens
acggcgtctgctttgtcagaggaacctttgccccgttatataaggtgcggcgtgtgcctgtaggtaggtcgctctgccacgtgtgcgtagtgttccatcctggcacacgcacgattggggggttgtattccagcctcccctggttccgcatttctgccacagtctgcctgcctgcttccaccgatgtggggttgaatataccccgtggtgcacggcgacacccttaagaggatgcgccgtcgcttgttggtacaccgacgctgaggattgtggcccgccttattttttgccccactcttcggacgcatgactggcacgccttgtatgttccgccgccgcctgcccctcgtggttaacgtcttggcaccccggaaggccgactgcgcccgttcgttcactcccccgttgttccgtcctcccccccccctcttgtccctcccttggtgagctgcaccttctcgcccttatacctggctgtttgctgccccagtggctccccgtgctggtagatttctcgccccgaggtctaggcgtccctcgttctctgtctccccccactctgttcccccgctcccccctccttcaccctatccttcttctctcgccctagttatccccccccgttaccactgcccccaaatttagccaacggttataaataaaccctcacctctgggtaaaaacatcagccccacccccatgcgcctcctcacccatctttccccccttctgactgcgtagacctatactcacgtgccccccttctataatataaatcttcttaaacataac

SEQ ID NO: 544225 - DNA, 688 bp, Homo sapiens
  misc_feature (63)..(63): n is a, c, g, or t
tggaaatgtcccatcaattgggcggcccaggccatagtccccccacgatgcctgaccagttanagagtctaatcccggcactgccgttaaggacggcaggaccttcacagctttctgggagtcgtttcccagttgcaaaatcacatacaccgggagagcaaccccttcctgcgactcctgcttccctttccggagggcagcccctaagagtttcaggctgtccgcatccctgcgttccaactgactcaaagggatgtggagagagtgcggcaggcgacagatgtccacctctacttgaggccggacgtccagcaacacatggggcgccccggaatccagaagccgcttgtagtcggtcacagaaatccgctcctcggggcacagcagcttcagggcgcggcacttgtcggtggccgaggagccgcagaaggcctcgtagtcctgcaggcgggtcacggtgggctgctgcccgcacacgacgcagtcaggccggcggcgccgcagccggatccggcggaagtggcccccgaggccgtcgaagagcagcatgctgccgctgtaggaggagccgaggccggcggcgatcttgagcacctcgagggcctgcgcgcagcctagcacgccgggcaccgctccgagcacgccgccgtctgcacagttggtcactgtctccggcgggggcggccgc

SEQ ID NO: 544226 - DNA, 179 bp, Homo sapiens
tagcacgacggtgatgcataagcagtgagcggctagtaattatagtatgcttcgtatgtataactatctccacagtagtcaaggtaccatgtctgacccgctatccgtactcatcagaattccatcttaaaaaaggaagagcctgtacccaatggcctccgggcacacccagtattgct

SEQ ID NO: 544227 - DNA, 137 bp, Homo sapiens
tcccccacactcacggtgtcacactcacggtgtccacactcacggtgtccacacctgcacgggagcgtgtgttctccgaggaccgggccgttctatgcgctgagattgtgtcagccctggactaccttcactcggag

SEQ ID NO: 544228 - DNA, 1722 bp, Homo sapiens
gcggctccaggcagagggccacggcccacccacacgccacctctagccccgccccgcggccccttcacccggtgggcgggtgggcgggtcatcgccatgcgcgcgccttgccattggcccgcgccggtggaggcgggcctgctcacgtctgccgggccctctgttagtcgtttggcagcggatagaggacacgaccaagatggcggcggtgtctggcttggtgcggagaccccttcgggaggtaggcagcagcgcgcggcctgtattcccacgcgacccctgcccaccctgcgtcccgccgtcatcttcctctctccctgccaggtctccgggctgctgaagaggcgctttcactggaccgcgccggctgcgctgcaggtgacagttcgtgatgctataaatcagggtatggatgaggagctggaaagagatgagaaggtatttctgcttggagaagaagttgcccagtatgatggggcatacaaggttagtcgagggctgtggaagaaatatggagacaagaggattattgacactcccatatcagagatgggctttgctggaattgctgtaggtgcagctatggctgggttgcggcccatttgtgaatttatgaccttcaatttctccatgcaagccattgaccaggttataaactcagctgccaagacctactacatgtctggtggccttcagcctgtgcctatagtcttcagggggcccaatggtgcctcagcaggtgtagctgcccagcactcacagtgctttgctgcctggtatgggcactgcccaggcttaaaggtggtcagtccctggaattcagaggatgctaaaggacttattaaatcagccattcgggataacaatccagtggtggtgctagagaatgaattgatgtatggggttccttttgaatttcctccggaagctcagtcaaaagattttctgattcctattggaaaagccaaaatagaaaggcaaggaacacatataactgtggtttcccattcaagacctgtgggccactgcttagaagctgcagcagtgctatctaaagaaggagttgaatgtgaggtgataaatatgcgtaccattagaccaatggacatggaaaccatagaagccagtgtcatgaagacaaatcatcttgtaactgtggaaggaggctggccacagtttggagtaggagctgaaatctgtgccaggatcatggaaggtcctgcgttcaatttcctggatgctcctgctgttcgtgtcactggtgctgatgtccctatgccttatgcaaagattctagaggacaactctatacctcaggtcaaagacatcatatttgcaataaagaaaacattaaatatttagtttggacttgaatatcaagtcgttgaaatttatttgaaatacttgctggcactgcacctggatttgtactgcaagacctgactattcataacggaaaacgatttctaaagcaacagcaggtatttttgtacagggaagtttaaatgtgtttgtgtatggaaaactctccactctcctcccctagatgccatgcttccttttgtctgttacggttgccatgttctttgaataacaaattatataacattttatcctctctcaccacaaggacaaagtatggatgtggcagagtcctgatgaaagatgtatccaaacaagataacttatatgtataaaattaaagcatataatatacattta

SEQ ID NO: 544229 - DNA, 206 bp, Homo sapiens
  misc_feature (150)..(150): n is a, c, g, or t
gtcccaaagggagaaaggggaaagcagatgctggaaaggatgggaacaagcccggcaaaaaaccgagatgcctcgtacactccatgtcccgagaaagcgagaaggcacgggggcatgccaagatgaaatgtacatttttgcagagctctngtacttatatgtgactctacggtttgaaagtactattgtttttaaattcaaagttt

SEQ ID NO: 544230 - DNA, 1223 bp, Homo sapiens
  misc_feature (665)..(665): n is a, c, g, or t
cctgtgttactatctggtctttctattaggttctctttctgttgtttgtacgcgtgatgttttgtgtcccatattgtggtgttgttgtcctcgtgtgttgttgctagttccgactgtttttttttatattttcgtctcggggcatctttttttttgtctgtatctttcccgtgtgtccgtgttttaaccaggtttgaatagtagtttctcccttgtctttaacttcccctgaaggaggtgttttaatgtttcgccgcatatttccgggaccgcggccaatgtcttggaatgccaccgtgtttttggagatcctgtttggcctgtacttcctgtgatactgaactgttctgctgaaccagctattatttgaaaatatttagtatgaaaggggttatgttatactatcccttccctcccagaacttaagtttttaaaatgaccacaactgtgtccctaaagatgttgttattaacttcgagttagttcttatattcctctgtgttatattgtttgattctaagtgaccctgattctgtgaatagtgacctcttgtgttatgtaaccacgggagaagagaatgagacttaaatttgaaataatggccttctataagatatcactataaagggtggcttccacaaaataaatgtatgaaaccacttagntattgaaaaatcacgctgtttgtaacaaggagtattaactcttgctcgtgttgtgcctcgaaggtttttcgcgttcttgtgtcacaaaaggagagagaatttcttgccctcgccactaccacgagaaacttcttctatggcacctctccctcgagcctctaaaggctctttttctataaaatttctcgttttgtggtgagaaagtgatccacacgggatataccacaatagacttacacaacttgccacagcttttgtgaagacctaacgcgtcacacttaatgagattctggagatttaataaaccactgtaacttgggaataaacgctttttcactgttcccttaaatggttctctgttttttggctctaccacatctgttttgtttttgtttttatctaatatcttggtagaatgtatttcaatccctagaggcacggtcacgcctccttcccctaaatgcgagaatgcttgttttgttaagggaaagggcttcctcccacttcgtgtgaaattgtgatgttgaagtgaataaatgtctattgtgtaactctcca

SEQ ID NO: 544231 - DNA, 1766 bp, Homo sapiens
gcggctccaggcagagggccacggcccacccacacgccacctctagccccgccccgcggccccttcacccggtgggcgggtgggcgggtcatcgccatgcgcgcgccttgccattggcccgcgccggtggaggcgggcctgctcacgtctgccgggccctctgttagtcgtttggcagcggatagaggacacgaccaagatggcggcggtgtctggcttggtgcggagaccccttcgggaggtaggcagcagcgcgcggcctgtattcccacgcgacccctgcccaccctgcgtcccgccgtcatcttcctctctccctgccaggtctccgggctgctgaagaggcgctttcactggaccgcgccggctgcgctgcaggtgacagttcgtgatgctataaatcagggtatggatgaggagctggaaagagatgagaaggtatttctgcttggagaagaagttgcccagtatgatggggcatacaaggttagtcgagggctgtggaagaaatatggagacaagaggattattgacactcccatatcagagatgggctttgctggaattgctgtaggtgcagctatggctgggttgcggcccatttgtgaatttatgaccttcaatttctccatgcaagccattgaccaggttataaactcagctgccaagacctactacatgtctggtggccttcagcctgtgcctatagtcttcagggggcccaatggtgcctcagcaggtgtagctgcccagcactcacagtgctttgctgcctggtatgggcactgcccaggcttaaaggtggtcagtccctggaattcagaggatgctaaaggacttattaaatcagccattcgggataacaatccagtggtggtgctagagaatgaattgatgtatggggttccttttgaatttcctccggaagctcagtcaaaagattttctgattcctattggaaaagccaaaatagaaaggcaaggaacacatataactgtggtttcccattcaagacctgtgggccactgcttagaagctgcagcagtgctatctaaagaaggagttgaatgtgaggtgataaatatgcgtaccattagaccaatggacatggaaaccatagaagccagtgtcatgaagacaaatcatcttgtaactgtggaaggaggctggccacagtttggagtaggagctgaaatctgtgccaggatcatggaaggtcctgcgttcaatttcctggatgctcctgctgttcgtgtcactggtgctgatgtccctatgccttatgcaaagattctagaggacaactctatacctcaggtcaaagacatcatatttgcaataaagaaaacattaaatatttagtttggacttgaatatcaagtcgttgaaatttatttgaaatacttgctggcactgcacctggatttgtactgcaagacctgactattcataacggaaaacgatttctaaagcaacagcaggtatttttgtacagggaagtttaaatgtgtttgtgtatggaaaactctccactctcctcccctagatgccatgcttccttttgtctgttacggttgccatgttctttgaataacaaattatataacattttatcctctctcaccacaaggacaaagtatggatgtggcagagtcctgatgaaagatgtatccaaacaagataacttatatgtataaaattaaagcatataatatacatttactgttagtttgttttgataaggaataaaggaatttctaacatga

SEQ ID NO: 544232 - DNA, 1337 bp, Homo sapiens
tcttgcttttgtggtgtggtgttttgtgtcgcttgttgatgtggtgatgctcctcccacacgcggtgttgtgtgtgttcgtttctttgtttcgcggtgtttgcgtacttcttgttgttgctgctttcgcggttctggcgcggtgtgttgtgctggtggttgcgcgactactgccttcgtgggtgggtcttttaccggggttttgtggggtcctcccgcctttgttgcctcctcttatcgccggggatcacttttggtttggtcaggggtctgatttttttcccaagaatgttgtctcccaacagtggttcccccatatgctcgcacaagaagttttccccggggggagctccctcatggggcgttagtcctcttgtgggagaaattgtgtgcccctctggggcacaacatttgttgtgtgatttggtacgcccggctgtttcgtctctattcccgccacatgttatcccaccagggcgcgatgtacacccgggtgttcgcaaagggtttggtggcccaaaactgttcgcccgtggtgccctttcaagctttaccattaaggttctgagattggtgtaaaacccgttcgcttctttggggacccgcggattttcaactctctggtgtggacatgagccaccccttcttgttagctattaattaccgcaggcacactgtgtgtctatgaattattgtgctccacggtacaaattctgaaagttaatctcgctgagaacctcggaaattcacacttttaaagagcctcccctgtgggtaaattgtggaagaggtgaacccgcacgtacaccaccccgcgtggggctctctcggtacagaagtttcaccccgctatgcgtcttcttgcacccacaactcgcaccctgggcccgcctcaaagtctgctgaatgtggtattgtaacctcgtatcttataccccccctccacgataaaggaattttaccacgagaaacctgtgtaacaaggtttttcttctaaacttttctcacaagtccccctgatttgtggtgttgtggtctttcggggacaggggtttgttctctggggttgtgtttcttgttgtttttcttgcccacggtgaagatacaaactgacactatgagacaaaggctggaagagagattctgttgcactatgagctatgtcctatggagaaaaacccagcttctgttatgaaatgtctcgcccttaactggtttcccccagggaaagggaaaaatacacattccccccttttttctaagtgttcctctttagtctcccgattttggaaagatgttaagccgttatttttagttaaaaattaaaactaatttcat

SEQ ID NO: 544233 - DNA, 517 bp, Homo sapiens
tagacgatccccaggcaccactgcaagaaaagatatggaggtttaaaacctgacatggtcaaaaaacgtatatgggtagtctactttggctcgatggtaaggtatagttgattagttaagaagtataataaaagctttgttgttggggggcaggcagtcaggcatcaaagaaattattttgtcaaagataataagatggactgaaatgaaggaaaaggaaagagaaacaagtttaaaagctattatagttgccaagataagaagtaatgaggggctgtcttgggttgatggcaaaaggaattaaaaagggatcaacatgagaatcgttgtaaaggtagataatgtttagctcaataagcagttacaaagctgagttaagaaggacaagttcttagtctggcgcccagagaaaatcaagtgacacaaatgaaaagctggcaagtgggatgagaaattatttctgaataaatttaaaatcccaaccgacatgttaggaaggtactgaccaacaaatttt

SEQ ID NO: 544234 - DNA, 134 bp, Homo sapiens
gatacgaacttgagctgtgtaccagcttagttttggcctgccagctgcctgctctggcgcgtgaaatcgactccagccagccggtcagcatcgactcgctcaagcagtcgttggacatgcagatgcaacgtcag

SEQ ID NO: 544235 - DNA, 291 bp, Homo sapiens
  misc_feature (259)..(259): n is a, c, g, or t
ttcatctcgtcccaccgtcaccactccagccctagcgcaggtggacgggctgtgcgcatgctctgagttccggttgatagaaagccctgcggtgactcagtgccaagcgcaggctgaatcccaccctgctccttgttttccccttcccagcatcctgtagtttctggcgtgtccaggttagcagctgctaccttgggcctggttttacttcacgttctttctaaagaatcagaaagcttgggctgcagagtagggagtnggtgggaggaaaagagaaggaaaaattcaaca

SEQ ID NO: 544236 - DNA, 1786 bp, Homo sapiens
gcggctccaggcagagggccacggcccacccacacgccacctctagccccgccccgcggccccttcacccggtgggcgggtgggcgggtcatcgccatgcgcgcgccttgccattggcccgcgccggtggaggcgggcctgctcacgtctgccgggccctctgttagtcgtttggcagcggatagaggacacgaccaagatggcggcggtgtctggcttggtgcggagaccccttcgggaggtctccgggctgctgaagaggcgctttcactggaccgcgccggctgcgctgcaggtgacagttcgtgatgctataaatcagggtatggatgaggagctggaaagagatgagaaggtatttctgcttggagaagaagttgcccagtatgatggggcatacaaggttagtcgagggctgtggaagaaatatggagacaagaggattattgacactcccatatcagagatgggctttgctggaattgctgtaggtgcagctatggctgggttgcggcccatttgtgaatttatgaccttcaatttctccatgcaagccattgaccaggttataaactcagctgccaagacctactacatgtctggtggccttcagcctgtgcctatagtcttcagggggcccaatggtgcctcagcaggtgtagctgcccagcactcacagtgctttgctgcctggtatgggcactgcccaggcttaaaggtggtcagtccctggaattcagaggatgctaaaggacttattaaatcagccattcgggataacaatccagtggtggtgctagagaatgaattgatgtatggggttccttttgaatttcctccggaagctcagtcaaaagattttctgattcctattggaaaagccaaaatagaaaggcaaggaaggctgccacattcctcagctcactggaatgaagttgaattgaagactttatgaatgaacaagagccacagctggcggcacagtggtgtagcatcttcagtttcaacctgatctctgatctgtgaccactctgttttcaggcaaggaacacatataactgtggtttcccattcaagacctgtgggccactgcttagaagctgcagcagtgctatctaaagaaggagttgaatgtgaggtgataaatatgcgtaccattagaccaatggacatggaaaccatagaagccagtgtcatgaagacaaatcatcttgtaactgtggaaggaggctggccacagtttggagtaggagctgaaatctgtgccaggatcatggaaggtcctgcgttcaatttcctggatgctcctgctgttcgtgtcactggtgctgatgtccctatgccttatgcaaagattctagaggacaactctatacctcaggtcaaagacatcatatttgcaataaagaaaacattaaatatttagtttggacttgaatatcaagtcgttgaaatttatttgaaatacttgctggcactgcacctggatttgtactgcaagacctgactattcataacggaaaacgatttctaaagcaacagcaggtatttttgtacagggaagtttaaatgtgtttgtgtatggaaaactctccactctcctcccctagatgccatgcttccttttgtctgttacggttgccatgttctttgaataacaaattatataacattttatcctctctcaccacaaggacaaagtatggatgtggcagagtcctgatgaaagatgtatccaaacaagataacttatatgtataaaattaaagcatataatatacattta

SEQ ID NO: 544237 - DNA, 135 bp, Homo sapiens
tgtttcatctatttttatcaaattctgttatctaggcattcggtcaaccagatctcggttgactagcaagtgctgctattttagtcaccatatttatgactgatgcttcatgcagccccttcacaagggctcggg

SEQ ID NO: 544238 - DNA, 181 bp, Homo sapiens
tatcgccatgattacctccttgtaccaaaggaacgacatggcgaaatgttagcacaattttatttttttgttaccttgtaaatcgaatcgagcacttgagtaacagacttcggcaggtcttcggtggaaacatgcaccggctcccaccgtccgcggcagtgcgaatgctgcgcaccggatg

SEQ ID NO: 544239 - DNA, 1586 bp, Homo sapiens
gcggctccaggcagagggccacggcccacccacacgccacctctagccccgccccgcggccccttcacccggtgggcgggtgggcgggtcatcgccatgcgcgcgccttgccattggcccgcgccggtggaggcgggcctgctcacgtctgccgggccctctgttagtcgtttggcagcggatagaggacacgaccaagatggcggcggtgtctggcttggtgcggagaccccttcgggaaggtgacagttcgtgatgctataaatcagggtatggatgaggagctggaaagagatgagaaggtatttctgcttggagaagaagttgcccagtatgatggggcatacaaggttagtcgagggctgtggaagaaatatggagacaagaggattattgacactcccatatcagagatgggctttgctggaattgctgtaggtgcagctatggctgggttgcggcccatttgtgaatttatgaccttcaatttctccatgcaagccattgaccaggttataaactcagctgccaagacctactacatgtctggtggccttcagcctgtgcctatagtcttcagggggcccaatggtgcctcagcaggtgtagctgcccagcactcacagtgctttgctgcctggtatgggcactgcccaggcttaaaggtggtcagtccctggaattcagaggatgctaaaggacttattaaatcagccattcgggataacaatccagtggtggtgctagagaatgaattgatgtatggggttccttttgaatttcctccggaagctcagtcaaaagattttctgattcctattggaaaagccaaaatagaaaggcaaggaacacatataactgtggtttcccattcaagacctgtgggccactgcttagaagctgcagcagtgctatctaaagaaggagttgaatgtgaggtgataaatatgcgtaccattagaccaatggacatggaaaccatagaagccagtgtcatgaagacaaatcatcttgtaactgtggaaggaggctggccacagtttggagtaggagctgaaatctgtgccaggatcatggaaggtcctgcgttcaatttcctggatgctcctgctgttcgtgtcactggtgctgatgtccctatgccttatgcaaagattctagaggacaactctatacctcaggtcaaagacatcatatttgcaataaagaaaacattaaatatttagtttggacttgaatatcaagtcgttgaaatttatttgaaatacttgctggcactgcacctggatttgtactgcaagacctgactattcataacggaaaacgatttctaaagcaacagcaggtatttttgtacagggaagtttaaatgtgtttgtgtatggaaaactctccactctcctcccctagatgccatgcttccttttgtctgttacggttgccatgttctttgaataacaaattatataacattttatcctctctcaccacaaggacaaagtatggatgtggcagagtcctgatgaaagatgtatccaaacaagataacttatatgtataaaattaaagcatataatatacattta

SEQ ID NO: 544240 - DNA, 391 bp, Homo sapiens
  misc_feature (9)..(9): n is a, c, g, or t
  misc_feature (129)..(129): n is a, c, g, or t
  misc_feature (145)..(145): n is a, c, g, or t
  misc_feature (198)..(198): n is a, c, g, or t
  misc_feature (285)..(285): n is a, c, g, or t
  misc_feature (310)..(310): n is a, c, g, or t
  misc_feature (320)..(320): n is a, c, g, or t
  misc_feature (332)..(332): n is a, c, g, or t
  misc_feature (340)..(340): n is a, c, g, or t
  misc_feature (384)..(384): n is a, c, g, or t
cattccccntaatggcccccttccacctagttggggtatttccctataggtattttccctataaccttattttcccccagccctcagcctcaaccatgacctttcctccccaagtagcctccctcaatncctttaagcctcaaancccaattagcacaggggccctatgaaaccctgacaatttgcctcatatggagnattaggaaatattgcactttaatgcataagacaccttgtaaaatacccataaaattttaactggctgcagtgttaatgaagcaaatnccatggagttataatagcttttgantgtgatttantcttacagctantgaacagntgaaaagcactgtccttttttaagtaaacactacacactccagntggattg

SEQ ID NO: 544241 - DNA, 1283 bp, Homo sapiens
atgggagtgtcaataatcctcttgtctccatatcagagacaagaggattattgacactcccatcggtggcgtgggagggtgaatttatcgtcttgttctgcatatcagagatgggctttgctggaattgctgtaggtgcagctatggctgggttgcggcccatttgtgaatttatgaccttcaatttctccatgcaagccattgaccaggttataaactcagctgccaagacctactacatgtctggtggccttcagcctgtgcctatagtcttcagggggcccaatggtgcctcagcaggtgtagctgcccagcactcacagtgctttgctgcctggtatgggcactgcccaggcttaaaggtggtcagtccctggaattcagaggatgctaaaggacttattaaatcagccattcgggataacaatccagtggtggtgctagagaatgaattgatgtatggggttccttttgaatttcctccggaagctcagtcaaaagattttctgattcctattggaaaagccaaaatagaaaggcaaggaacacatataactgtggtttcccattcaagacctgtgggccactgcttagaagctgcagcagtgctatctaaagaaggagttgaatgtgaggtgataaatatgcgtaccattagaccaatggacatggaaaccatagaagccagtgtcatgaagacaaatcatcttgtaactgtggaaggaggctggccacagtttggagtaggagctgaaatctgtgccaggatcatggaaggtcctgcgttcaatttcctggatgctcctgctgttcgtgtcactggtgctgatgtccctatgccttatgcaaagattctagaggacaactctatacctcaggtcaaagacatcatatttgcaataaagaaaacattaaatatttagtttggacttgaatatcaagtcgttgaaatttatttgaaatacttgctggcactgcacctggatttgtactgcaagacctgactattcataacggaaaacgatttctaaagcaacagcaggtatttttgtacagggaagtttaaatgtgtttgtgtatggaaaactctccactctcctcccctagatgccatgcttccttttgtctgttacggttgccatgttctttgaataacaaattatataacattttatcctctctcaccacaaggacaaagtatggatgtggcagagtcctgatgaaagatgtatccaaacaagataacttatatgtataaaattaaagcatataatatacattta

SEQ ID NO: 544242 - DNA, 408 bp, Homo sapiens
  misc_feature (18)..(18): n is a, c, g, or t
  misc_feature (119)..(119): n is a, c, g, or t
  misc_feature (162)..(162): n is a, c, g, or t
  misc_feature (164)..(164): n is a, c, g, or t
  misc_feature (290)..(290): n is a, c, g, or t
  misc_feature (307)..(307): n is a, c, g, or t
  misc_feature (352)..(352): n is a, c, g, or t
  misc_feature (381)..(381): n is a, c, g, or t
  misc_feature (385)..(385): n is a, c, g, or t
  misc_feature (404)..(404): n is a, c, g, or t
aatggcaacaccatgtgncgggcagggggtcccaggtgctccctggtgggctgcattctcccctgggctctgacacactcccaggggacagggccgatggggatggaggggagcgttgncaccactgggctcctctgcaagtgcgaggcctggcccccaccncncaactccggcactgagaaccccacacggacggatgatctgcacaccgaagctgctcttctgagccctcggggagccaggcctggggacagagggtcatgtcaattcagtgggtgctctcacccctnctgtggctccagtgcanctccccacaacctcggcgggccgcggcctcatcactgactcactncggagggaggcccctcccctatatctttntttnaccaatcattctttaattnaagc

SEQ ID NO: 544243 - DNA, 1542 bp, Homo sapiens
gcggctccaggcagagggccacggcccacccacacgccacctctagccccgccccgcggccccttcacccggtgggcgggtgggcgggtcatcgccatgcgcgcgccttgccattggcccgcgccggtggaggcgggcctgctcacgtctgccgggccctctgttagtcgtttggcagcggatagaggacacgaccaagatggcggcggtgtctggcttggtgcggagaccccttcgggaggtctccgggctgctgaagaggcgctttcactggaccgcgccggctgcgctgcaggtgacagttcgtgatgctataaatcagggtatggatgaggagctggaaagagatgagaaggtatttctgcttggagaagaagttgcccagtatgatggggcatacaaggggctgggttgcggcccatttgtgaatttatgaccttcaatttctccatgcaagccattgaccaggttataaactcagctgccaagacctactacatgtctggtggccttcagcctgtgcctatagtcttcagggggcccaatggtgcctcagcaggtgtagctgcccagcactcacagtgctttgctgcctggtatgggcactgcccaggcttaaaggtggtcagtccctggaattcagaggatgctaaaggacttattaaatcagccattcgggataacaatccagtggtggtgctagagaatgaattgatgtatggggttccttttgaatttcctccggaagctcagtcaaaagattttctgattcctattggaaaagccaaaatagaaaggcaaggaacacatataactgtggtttcccattcaagacctgtgggccactgcttagaagctgcagcagtgctatctaaagaaggagttgaatgtgaggtgataaatatgcgtaccattagaccaatggacatggaaaccatagaagccagtgtcatgaagacaaatcatcttgtaactgtggaaggaggctggccacagtttggagtaggagctgaaatctgtgccaggatcatggaaggtcctgcgttcaatttcctggatgctcctgctgttcgtgtcactggtgctgatgtccctatgccttatgcaaagattctagaggacaactctatacctcaggtcaaagacatcatatttgcaataaagaaaacattaaatatttagtttggacttgaatatcaagtcgttgaaatttatttgaaatacttgctggcactgcacctggatttgtactgcaagacctgactattcataacggaaaacgatttctaaagcaacagcaggtatttttgtacagggaagtttaaatgtgtttgtgtatggaaaactctccactctcctcccctagatgccatgcttccttttgtctgttacggttgccatgttctttgaataacaaattatataacattttatcctctctcaccacaaggacaaagtatggatgtggcagagtcctgatgaaagatgtatccaaacaagataacttatatgtataaaattaaagcatataatatacattta

SEQ ID NO: 544244 - DNA, 1042 bp, Homo sapiens
  misc_feature (14)..(14): n is a, c, g, or t
ggtaaactataganaagtttgacaaaaagcaggctgtaccgtccggattcccggatgcagtgtagctgcccagcactcacagtgctttgctgcctggtatgggcactgcccaggcttaaaggtggtcagtccctggaattcagaggatgctaaaggacttattaaatcagccattcgggataacaatccagtggtggtgctagagaatgaattgatgtatggggttccttttgaatttcctccggaagctcagtcaaaagattttctgattcctattggaaaagccaaaatagaaaggcaaggaacacatataactgtggtttcccattcaagacctgtgggccactgcttagaagctgcagcagtgctatctaaagaaggagttgaatgtgaggtgataaatatgcgtaccattagaccaatggacatggaaaccatagaagccagtgtcatgaagacaaatcatcttgtaactgtggaaggaggctggccacagtttggagtaggagctgaaatctgtgccaggatcatggaaggtcctgcgttcaatttcctggatgctcctgctgttcgtgtcactggtgctgatgtccctatgccttatgcaaagattctagaggacaactctatacctcaggtcaaagacatcatatttgcaataaagaaaacattaaatatttagtttggacttgaatatcaagtcgttgaaatttatttgaaatacttgctggcactgcacctggatttgtactgcaagacctgactattcataacggaaaacgatttctaaagcaacagcaggtatttttgtacagggaagtttaaatgtgtttgtgtatggaaaactctccactctcctcccctagatgccatgcttccttttgtctgttacggttgccatgttctttgaataacaaattatataacattttatcctctctcaccacaaggacaaagtatggatgtggcagagtcctgatgaaagatgtatccaaacaagataacttatatgtataaaattaaagcatataatatacattta

SEQ ID NO: 544245 - DNA, 169 bp, Homo sapiens
  misc_feature (16)..(16): n is a, c, g, or t
  misc_feature (66)..(66): n is a, c, g, or t
  misc_feature (104)..(104): n is a, c, g, or t
gctattctggccaatnagatagcggtagtgataacagaggagttttattcactccattattgactnggtgaaggtctaccataagaaagaccaaacaggcaggngtagtctacctcctgtgaacactcaaaactgacttgccaaggtgccattctagaccagagcccta

SEQ ID NO: 544246 - DNA, 903 bp, Homo sapiens
caggcacagtggcacaatgcattgcatagcactgcaaggtcagactcctagtaggatccaccaggtaaatgtatgctgtatggggttccttttgaatttcctccggaagctcagtcaaaagattttctgattcctattggaaaagccaaaatagaaaggcaaggaacacatataactgtggtttcccattcaagacctgtgggccactgcttagaagctgcagcagtgctatctaaagaaggagttgaatgtgaggtgataaatatgcgtaccattagaccaatggacatggaaaccatagaagccagtgtcatgaagacaaatcatcttgtaactgtggaaggaggctggccacagtttggagtaggagctgaaatctgtgccaggatcatggaaggtcctgcgttcaatttcctggatgctcctgctgttcgtgtcactggtgctgatgtccctatgccttatgcaaagattctagaggacaactctatacctcaggtcaaagacatcatatttgcaataaagaaaacattaaatatttagtttggacttgaatatcaagtcgttgaaatttatttgaaatacttgctggcactgcacctggatttgtactgcaagacctgactattcataacggaaaacgatttctaaagcaacagcaggtatttttgtacagggaagtttaaatgtgtttgtgtatggaaaactctccactctcctcccctagatgccatgcttccttttgtctgttacggttgccatgttctttgaataacaaattatataacattttatcctctctcaccacaaggacaaagtatggatgtggcagagtcctgatgaaagatgtatccaaacaagataacttatatgtataaaattaaagcatataatatacattta

SEQ ID NO: 544247 - DNA, 898 bp, Homo sapiens
  misc_feature (19)..(19): n is a, c, g, or t
gtaaggaataatttctccncatgaagtgctaccttcatcccaaataattcatcttcctgagaatgaattgatgtatggggttccttttgaatttcctccggaagctcagtcaaaagattttctgattcctattggaaaagccaaaatagaaaggcaaggaacacatataactgtggtttcccattcaagacctgtgggccactgcttagaagctgcagcagtgctatctaaagaaggagttgaatgtgaggtgataaatatgcgtaccattagaccaatggacatggaaaccatagaagccagtgtcatgaagacaaatcatcttgtaactgtggaaggaggctggccacagtttggagtaggagctgaaatctgtgccaggatcatggaaggtcctgcgttcaatttcctggatgctcctgctgttcgtgtcactggtgctgatgtccctatgccttatgcaaagattctagaggacaactctatacctcaggtcaaagacatcatatttgcaataaagaaaacattaaatatttagtttggacttgaatatcaagtcgttgaaatttatttgaaatacttgctggcactgcacctggatttgtactgcaagacctgactattcataacggaaaacgatttctaaagcaacagcaggtatttttgtacagggaagtttaaatgtgtttgtgtatggaaaactctccactctcctcccctagatgccatgcttccttttgtctgttacggttgccatgttctttgaataacaaattatataacattttatcctctctcaccacaaggacaaagtatggatgtggcagagtcctgatgaaagatgtatccaaacaagataacttatatgtataaaattaaagcatataatatacattta

SEQ ID NO: 544248 - DNA, 1154 bp, Homo sapiens
tttttttgcttgtggtagacatacagatctttgttttaattaaaatttttccttttacagtttgtacattcatgaataggtattcataggcagattagattttcctagatacaaagattaacaggaaacaaaaaaggaaatggtattatggggataaggctctatttgtgctgcaatagctctgtaaacttgattatattacctgtttaggtgataaatatgcgtaccattagaccaatggacatggaaaccatagaagccagtgtcatgaagacaaatcatcttgtaactgtggaaggaggctggccacagtttggagtaggagctgaaatctgtgccaggatcatggaaggtatttcaaagaaactggttctagaatacagtcaagctatagtaaacatcatgtacctgaatacgtacaggataaagagattgaaagctaggagtggccaaacgacttcaactttaaacttgtaagtttggcatttctcttcaggcagatatttttaaaagcaaatccagaaagcggttccccataattagcattccttacattttcttcttcctggtcagccacacctctgtgcccaaggtggtagtgcccagctggcatttgcactctctcagttgagccttccttctcctagggtcctgcgttcaatttcctggatgctcctgctgttcgtgtcactggtgctgatgtccctatgccttatgcaaagattctagaggacaactctatacctcaggtcaaagacatcatatttgcaataaagaaaacattaaatatttagtttggacttgaatatcaagtcgttgaaatttatttgaaatacttgctggcactgcacctggatttgtactgcaagacctgactattcataacggaaaacgatttctaaagcaacagcaggtatttttgtacagggaagtttaaatgtgtttgtgtatggaaaactctccactctcctcccctagatgccatgcttccttttgtctgttacggttgccatgttctttgaataacaaattatataacattttatcctctctcaccacaaggacaaagtatggatgtggcagagtcctgatgaaagatgtatccaaacaagataacttatatgtataaaattaaagcatataatatacattta

SEQ ID NO: 544249 - DNA, 123 bp, Homo sapiens
gagcgggctcgcgatgcttgtttattaacagtcggatcccctgtcgacagttctaagtcggctgctaggcgccggcgaggcgaggcgccgcgcgggcggggttggatgcagtcgggtaccgag

SEQ ID NO: 544250 - DNA, 395 bp, Homo sapiens
ggaatccttatgaatgtatagaatgcatactcctaggcccccagtcgttctgcagtaatttcaaaagcttggtatttttcttcctaaattgttcacattagcaaaggcttgccccaaattccccaaactttgttctttcaaaaggtttgacaaggcttaaattgttgggcattccagttggccttgttggacccccccccttgccaccacgacttgcttgccaacccggaggttcccccattgtcttttggtgccttgggcttccacgagtccctcccatcaaggctaccagcttgctcaagtagcagcaagcagtcccagctttatgttcttagctaaagcttgcatgagggcaagggtagggatgggtctgttagatgcctagctttgtttcg

SEQ ID NO: 544251 - DNA, 537 bp, Homo sapiens
  misc_feature (7)..(7): n is a, c, g, or t
  misc_feature (9)..(9): n is a, c, g, or t
  misc_feature (11)..(11): n is a, c, g, or t
  misc_feature (236)..(236): n is a, c, g, or t
ccaattngncntggccggggaaggacagcctaaaaatagtcactggtcttgactaaggggaaaaactagtaaaggaatatgcaagtagcaaaaatgaacacatgttttttcttgaacttggaagcaggtctgcaaagttagactatggtgacagattatgaagctaagggcgcagtgtaggagtgtagggaaataagtgactgagtgacacagcttattttatagccacatcttanaagaaatgtgaaggagtaaggtggatcaaaatgagatgattaactaaattctttatgtaaaacatttattcttttattttagtgtgtactgcttttcctgtacagtaagttatatatcctaataaaaattaaagagcaaattgtgtttggaagatcgggtcatcgtaattcattgacattaggccacataactgaataatgtcttccttcagcaaaatacatcaaatgagatcaacaattatgactcataaacatgccttgcaggcataaaacagcagggaattagcatgtgaggctgata

SEQ ID NO: 544252 - DNA, 214 bp, Homo sapiens
attactagtggtgcctcccaaagtgctgggattacaggtgtgaaccaccacacctggcctaagagcaccatagttctttgaactgttacgaggattaaaagatgatatacatatgtgatccactctggatagttcctagttcatagaatgctctcagttgatagctgttccattgtgaacaggcccacctatccatgaggctagagtcgctaga

SEQ ID NO: 544253 - DNA, 671 bp, Homo sapiens
aataaaaacaatggtcctgccattttttatttatcatagcaatacatacttacagaagaaaaagaatcacacattttaaattctgatcattacactatttttttggggttgaataataaaagaatgaatctcttagtgactttttaaaataccttcaatgttggaaaaatgcaaattatgatatgataaacattcaataactggagtgagttcacttccaaatgaaagacacttggcacccagtcacagtaatgaaattaaacatcactgaagacagtaaggaggtctgcctggaggtctctaaggaggtctgtctggaaccatatgtttagtgtagattcacaatcaatccaatctttcaacctacattttaataatttagctttagaagataacatgtgaattagttttctctaatacgcccttgaaaagttttattcctgaacactataaagagagggaaattttttggttgtaaataacaactttcaaatttgggttttaataacgattattaaatcctttttataaagggcaagggcccactaaaacaaggggatttgggctttaccagttagagcgtaaaataattagacacaaaattattctgggaacaagacctaattggcctgtaggtgggaaatttttataaaaggaatcctgtccggggg

SEQ ID NO: 544254 - DNA, 111 bp, Homo sapiens
  misc_feature (1)..(1): n is a, c, g, or t
  misc_feature (85)..(85): n is a, c, g, or t
nggtcagtgtctcatagtggttagcttctatagtctagtagataacatgcagcatccgtcagtgagtagctctaatacagatcanagggacagcatcaaggaagcagatga

SEQ ID NO: 544255 - DNA, 993 bp, Homo sapiens
  misc_feature (122)..(122): n is a, c, g, or t
  misc_feature (134)..(134): n is a, c, g, or t
gtaatgattatgattctcagggattgggcgaaaggcgttcacagaattctcgcgttaattccttctcgtgagacacttttcaagccacgttaactcaaggacgtgagcagtaagcacgtgantgaattgctgantatatcaggacgacatgatcatgaagccatgtgagtagattatctcttaaaggatatcatcatggtaatgactatttaatacagcctatgcctatagctttcttatctcagcaaaataaacgtcaaatagactatgatatcatagtatttctgataccttactttaagatgaaacaaccttgacgtgcaccaatcagtctgcacatcccaatcccttcacattcttactacacattattgctagatcactgttctttggttaggagcactttcactgagcatacatttgtccatggactacatagtcaactcagacatttacatcacgctaaatcctttagaacttggcgttgttgaaaatcgggagtatcatcatatttacaagtcatttctatgttaaatcttacagtaatgtgctagtctgttgtctctggacatctacgctgttaacaccggaacagttagaccttggattcatgtgaggctccttcccagtgggcttctaacggtggtttcgccgcaaggtaagactttccgttagcgttaacagattgatactatttaaacatggagcccactaagtgtgccagatatacttaacggtaattttggggtactactccagtatccccacttgtccttctgtgaagccatcctctgcacacgtgaagtcgggtctaatcgcctttctggcgtggattgaaacaattgtgttaacattcacacacatttgcgaacgtgccgcacccaggggaccccctgggtatcggtgacaacattatacgatagttaaaggacggtcttcataaattctgtcgcgtgcaaacaggtgtaaaggtaaattctacgtgggttagca

SEQ ID NO: 544256 - DNA, 873 bp, Homo sapiens
  misc_feature (14)..(14): n is a, c, g, or t
  misc_feature (165)..(165): n is a, c, g, or t
  misc_feature (414)..(414): n is a, c, g, or t
cacggcgcgggcantgtggccacggttgacgtagcgggtcaagcccacgagggcaccacgggcgtctggacgccagtacggcgcgaacaggccagagaaggccggcacaaagtaggcgccaccattgtcctcgacggtgttagcgagagcttcgatttgcggggnggtctcgaatatcttgaggttgtcgcgcagccactgtaccagcgatccagcgacggcaatcgaaccttccagggcatagacggtgggctggtcaccgatcttgtagcagacggtggtcagcagaccgttctcggagaagatggcctcctcacctgtgttcatgagcatgaagcagccggtgccgtacgtgttcttcgccatgccctttggaagcaagcctggccaaaagtggcggcctgctgatcgccnagaatgccggagatcggggtatcgatcagcaggccgttcttgcgaccatagccgtagatctcggaggaggacttgatctcaggaagcatggacttcggaatccccatgacctcgcacatcgagtcgtcccactgcagctttcggacgtccatgagcatggttcgggacgcgtggtcggatcggtgatgtgcacgccaccgttaataccgccaagtcaggttccactagcacccaagtgttcaatgttaacggaagcagcagatcgccggctcgggcctcgccaaggctcctccacgttgcgagaatccattgacttcggccagagaatcggtgacggccgacccacatctctggcgcggcgggcctggtaacagtcaatcgtcagaacttgatcgggtggcgccaagcgttcacgccagggttggccacacggtgcggtggatccaacaagcggggcgt

SEQ ID NO: 544257 - DNA, 115 bp, Homo sapiens
tggcctggcgtttctattagctcttataagattacacatgcagcatccccgttccagtgagtcaccctctaaatcaccacgatcaaaagggacaagcatcaatgcactgcagcaa

SEQ ID NO: 544258 - DNA, 1241 bp, Homo sapiens
  misc_feature (279)..(279): n is a, c, g, or t
  misc_feature (379)..(379): n is a, c, g, or t
  misc_feature (757)..(757): n is a, c, g, or t
gctgctggatggcttctgtgcgagtccggctgcgcgttctgctccgcgcgggggcccggttcccgggctgctggccatcgcgcgtcggacgtgaacgtcgggcgtgccgggcggcagggagactgtgtcgcgtccgctttcgggagccaagcgcggtgctggtggagccaggactgcggagcgctgccaggagtgtcagctagttgacttagacataattcaagaaccccccaatagaactacgcctgtacgctctggtacgttactagacgagggatnctgagtacatcagctctgtgagcaagctcggagcaattgacgaagacgcttcgcgcggctcgtcattcatgacctctgtgaccggccttgcgcgtgtctntctctggccaggactgggacgcttcgacagagatgattgttgtcgtggacggatgcgcccggcacctactactgctggtggtcactggtacagcgccgtgtcaggcctgctagttgagctcgcgagttcgtaccgcagtcctaaccttggtgctcggtcttcctgtccatgcaaccgtgaagacctcgaccgcgttgaagaaggctagccttctgtaggggccctggactcttgtagtacgtaaaccgcaattccttaggcagtgagcaaccccatgagtactagcatacgtgactcaagtgatgatcccaggaatagtggcgatcatccgactccctatttcatcgggttggaaaacgaccacccctatgcgtaggnaatctacgcattctggcgcgagccctgggcggcgctcggaagcggttgtcctatgcgagcttcgggtgcgtgcctcattcccccgcgctgacgggacgcgcccgtgcagggcttggggccttaggttcggagccaacgtgttgggatccccagctaaagcgaagcaaggatgctatgaagccaactggacaggcatgctccagctggaaaacgcccccaagatgggcatggggcccattcccaagaacgcaaatgcctccgaaccgtaggcattgagagcaaatgggtcctatggaatgggcgtgaaaaggggccaacaggggcccaaggcccggccctgtggtcgacgccaggacggggatccggaacggttgcaaaaaggtttcgcgtcacagggttccattcttccaagaagaattccatccaagaaaagtacccgtggagaattgtaactttagaagacgggtctccaatgaacaaactg

SEQ ID NO: 544259 - DNA, 238 bp, Homo sapiens
tacgtgtacagtgtataatgcttggcagcatatctgaatacaacatgaacggacacggtaccaccagtgctgcgtggagaccctgcactgcgggctcacaactcagctcgcaatttcagagtacatgtggtggggtagcggtgtgtgcctccggtccccggacaggcagaaccacgagcagcaactaacatgggtgagaggatctttgacgggggtgtgacccttgaggtcggaagag

SEQ ID NO: 544260 - DNA, 343 bp, Homo sapiens
ctagagatccctccgcaccctgcggatgggcactatcatgacgcggataccctggagcgcaacacccctttggatcaacttctatcacgctgagtgttccacgacatcctggccttggtctctctttgcagtcatctttcctagtgagattgctgggcaatgccctgggtgctctgagtgacggcacttcgaggcccagcggatcatccatgccatctggttcctcaactaggcggtagctaacttcctctcctgcctggcgctgcccctcttgttcacatccattgcacagcatcaccactggcccttgggcgcggccgcctgcagcatcctccatggtact

SEQ ID NO: 544261 - DNA, 900 bp, Homo sapiens
  misc_feature (228)..(228): n is a, c, g, or t
tggttcgcggtgtttaattgtcccgcgggggtttcccgccgtgtgtgtgccaaacccggggaatctcccactcttgtgggccccccgccttttgggaacccgtttcgcgccaccacacgggcgccagtgtccggtctcccccctctgtggcgccccgctccttcccgtgggaagttgtccggggcgtctcaaaaccaccgtttccttcgggcttatattctcgccccnggacaaattctgctcttgcaatgcgctgagcccccttttctcggcgcattgcccctgctgcatagcctctgggctttctaaccgtcttcttctcagtatgtctgaacctccagggattggtgccccccccgtgttttccccccgggcactcaagaccccccctcaacaagagacggcgtatacccccccgcggctcctcgtaggcccccttcccccttggaattaactctcgcccctggcccgctttctgggagtctctcccccccgggtgtgttctcccccgaggagacccccctcttctagggaggctccccgagggcaccccccccttctcccaaaagcgtggggaacgcagcctctttcacacagacagagtgggggtgcccccccggcatctgccacctcgatgggtggcccgccaaagaaggagctgggccaaccaatattctgttgcaagcatgtctctccagcacggaggatagggacgcctttggtgcgcccccggaaggttttcaagccgcgcgccctctcctcgtgaattacggtctgtgagcgctagagacacgaggtacgtcccccgcgacccaattgggccgtcgctttcttctacgttgcacccaacagccccgtggccccaaagggaaaaaacactcttttcgaacaaacaaaaca

SEQ ID NO: 544262 - DNA, 1232 bp, Homo sapiens
tataaaattggggtttcgccagtgtttgcccaggggggctctggaaactcctgtggagcttcaggtgatccgcccgcctcggcctttccgaaggtgccgatcacggggtggtgagtcacggcggcccggatctccacgtggtttctaattctccaagggagagtgcgaactctgtggtataagaagcctcaatcgtgggtgaacctcttaattccttatagtgaaccagaaagtgtgtgcagggacaattcgtgaacgtggaattccaccccgtgggcgaaaagtgttacacggagctttaatagacacgtgggcacacaagcgagagcgtgttttttacctcttatatcgcgtggtctctttgtcgcgtgagacaccgcagacacaactcttcgagagaggacctcgtgagaagggtggggactctcccgcggcgtggagaggacaagtagcaaacccccggagaccccacataagaggacactccaattacaaacacaacacacaaggtgagacaataaaagatatacgacagggagggagcgcagagaccgggcgggaagagcctctcagggaaacaatcccaagaacgaaatcccccggggaacgaacagaacgcaacacaaaagaccgcccaccacaaaagcgtggcgccaaagagagacacacaaacaaaactcaccaattaacacaacgtatcgggggggcgacaacaaagaggggaaaacacacagcaacacacaatcgcggaggcaaccaacagagaccaacacccacacaaacccgggggccccaccatatcgtggaaccacctataggaaacacatcgagagagggaggatatattaggcaatgataattagaaaccccagtttgtgtacaaaacaatttttaggacaataaagtgagagagaccaggtggtagaaacaagtggagcgaacagctagggcgcattccactcccaaagaggagagatggagcgaggagaaactctggggaaacgtacaaccctgcaacaacgcataacagcagcaagacaaccacaagagaacacaaaaccacataggcaaacaaactccaacacggagtagaacaaaaaagacacacgaaacgaacccaacgcaacacaaaacgtgcggacaacaccaaaaagcgagagggcccccaagcgacaccacacacacagaccacaatcaatacaacaccaacaccagaggacaacgaggaaaaa

SEQ ID NO: 544263 - DNA, 158 bp, Homo sapiens
ttcagatagcgtagtaagcggagcatcagtaagctcagtaagcggagcggtcacgcctgctgggtatgttgtgttgaaagaagaggaggcgaggaggtggcatatgctccgttaactgatgctcgcttactgatgctccgcttactgacgcttactga

SEQ ID NO: 544264 - DNA, 263 bp, Homo sapiens
cagtgacggatatctgcaaactgttccaagcatctgctgttacccaggttccaaagtcgcttccacattttcagcagcaccccactcgtggtaccaatttactgtattagtctgttttcatactgctgataaagatatatccaagactaggcaatttacaaaagaaagaggtttactggacttacagttccatgtggatgggggaggtctcacaatcatggtggaaggcaagaaggagcaacgtcagtgctcgttaacactgg

SEQ ID NO: 544265 - DNA, 433 bp, Homo sapiens
  misc_feature (52)..(52): n is a, c, g, or t
  misc_feature (72)..(72): n is a, c, g, or t
  misc_feature (87)..(87): n is a, c, g, or t
  misc_feature (124)..(124): n is a, c, g, or t
  misc_feature (142)..(142): n is a, c, g, or t
  misc_feature (161)..(161): n is a, c, g, or t
  misc_feature (175)..(175): n is a, c, g, or t
  misc_feature (193)..(193): n is a, c, g, or t
  misc_feature (199)..(199): n is a, c, g, or t
  misc_feature (201)..(202): n is a, c, g, or t
  misc_feature (215)..(215): n is a, c, g, or t
  misc_feature (223)..(225): n is a, c, g, or t
  misc_feature (228)..(228): n is a, c, g, or t
  misc_feature (235)..(236): n is a, c, g, or t
  misc_feature (238)..(238): n is a, c, g, or t
  misc_feature (241)..(241): n is a, c, g, or t
  misc_feature (245)..(245): n is a, c, g, or t
  misc_feature (247)..(247): n is a, c, g, or t
  misc_feature (249)..(249): n is a, c, g, or t
  misc_feature (251)..(251): n is a, c, g, or t
  misc_feature (256)..(256): n is a, c, g, or t
  misc_feature (260)..(260): n is a, c, g, or t
  misc_feature (266)..(266): n is a, c, g, or t
  misc_feature (271)..(271): n is a, c, g, or t
  misc_feature (276)..(276): n is a, c, g, or t
ctgaagagcagcacagtggggcccgtgctgctgtgggagaaactgaggctgngagcctcagcagagaccggngtcaagagtctctgngaactgcataggcctgaggaacatgcattttcaagtngtccattgatggtttcgnacctgaatttctcaccttntgtgaacatcttgngaggtgggggttttgcangggtgntnnaagcaaggcttgnagcccctnnnctncagctgnngnctncttntnangncctgncctnattcangccantttgnagagaaatgccctgacctcgcaagatggttgcccacccccatgtgatatgtagaggactgtgtgctcaccactgtgccctgtacacatcttaggggacggttaggattaggattctggcatggcgtgcatccagacacattgtctgagctccgtctt

SEQ ID NO: 544266 - DNA, 394 bp, Homo sapiens
  misc_feature (52)..(52): n is a, c, g, or t
  misc_feature (72)..(72): n is a, c, g, or t
  misc_feature (87)..(87): n is a, c, g, or t
  misc_feature (124)..(124): n is a, c, g, or t
  misc_feature (142)..(142): n is a, c, g, or t
  misc_feature (161)..(161): n is a, c, g, or t
  misc_feature (175)..(175): n is a, c, g, or t
  misc_feature (193)..(193): n is a, c, g, or t
  misc_feature (199)..(199): n is a, c, g, or t
  misc_feature (201)..(202): n is a, c, g, or t
  misc_feature (215)..(215): n is a, c, g, or t
  misc_feature (223)..(225): n is a, c, g, or t
  misc_feature (228)..(228): n is a, c, g, or t
  misc_feature (235)..(236): n is a, c, g, or t
  misc_feature (238)..(238): n is a, c, g, or t
  misc_feature (241)..(241): n is a, c, g, or t
  misc_feature (245)..(245): n is a, c, g, or t
  misc_feature (247)..(247): n is a, c, g, or t
  misc_feature (249)..(249): n is a, c, g, or t
  misc_feature (251)..(251): n is a, c, g, or t
  misc_feature (256)..(256): n is a, c, g, or t
  misc_feature (260)..(260): n is a, c, g, or t
  misc_feature (266)..(266): n is a, c, g, or t
  misc_feature (271)..(271): n is a, c, g, or t
  misc_feature (276)..(276): n is a, c, g, or t
ctgaagagcagcacagtggggcccgtgctgctgtgggagaaactgaggctgngagcctcagcagagaccggngtcaagagtctctgngaactgcataggcctgaggaacatgcattttcaagtngtccattgatggtttcgnacctgaatttctcaccttntgtgaacatcttgngaggtgggggttttgcangggtgntnnaagcaaggcttgnagcccctnnnctncagctgnngnctncttntnangncctgncctnattcangccantttgnagagaaatgccctgacctcgcagcaaggatttccccaccctcccctgtaatgaacaggtcagcgcggccaccagagcgtcctcgaaccatcctaccccaatgacgctggctctttgtc

SEQ ID NO: 544267 - DNA, 197 bp, Homo sapiens
catcagtggacaaggtgatggtggaggcatgaaggccctagatatgaatcatgtcgcggcccttcatcccaatctcatcttgttttctgcgcaaggtaggtttgtcaacgaaagggtgtaacgcacactacgtcatagtccgccgtagaagcatttgcggtggacgatggaggggccggactcgtcatactcctgct

SEQ ID NO: 544268 - DNA, 243 bp, Homo sapiens
ctcccccactatagtatccccatctccaaatatctcatcttctccgtatctaatcaccacccaacaatgactaggtcaaactaacctcaaaacaaattatatatccatacacaacactaaaggatcgaacctagatctctatatatctagtaatacctattatacatattttatatgccatcaactaaacctacctacggactcctaggctacactacattgtgacacctaatccacccgaac

SEQ ID NO: 544269 - DNA, 889 bp, Homo sapiens
tggttcagaggcaggttctagagctgcaggagggagatcgtgattgcagaggaagagcgatcatgtgggctaacatctgagaagtgaagaaatcggaagcccgagaacacactgtggccagccctgggggatttttttcttctatgcctcgtctggtggacatgacggttggcgtgtgtaggcagtcgttttcctgctgactgatagtttcttggcctggaagaggtactgagtttaaaagagacagctcagtgtgacacgtccatggaagagttagcctcttcgtgtgaagatctcgcctaccctgcatccgaatgacaatgtcgtggtctccacaaatgctccttatccaccatgtgcatatactgactgaggggcaaaaggatggcttcgagaaccttcgagttccttcagcggtgttaggtagaaggcacgtgtggtctcttgccacacaggttgaaagaagagcaggacaaaagaatcctcgaagctgtatgtatccagccacagacggctcccgatgcgctggccctctgagaaaagacttgaatggacgcagagtataaaacagaagatgtgaaagaggcaaagtggattgatcctgcagctcaagcaggttcttgcctgtggtaatagcaagttatgagggcattgacagttgtgattcagtcacctgctgtctgagcgggcaggaagctagctgaaacaaaaacaaaatcctatctcaagaacttgttaacctccggggagagctagtccactgcttcaaccacctgtgagaaattagaaaaagccagggaatggggttacaaaccgtgttgaaagcattcgtccaggagaccgggtgaaaaacgaacgagagaacgggtaagagtttacccaggggttg

SEQ ID NO: 544270 - DNA, 531 bp, Homo sapiens
tgttacacggttgcccggagtttcaacggccttgccggtttgacacagttacccggtcgcagctgtgtgtcagtgcccaaaggaggtcggttgatggtgcttacacagacatgaagtatggtgtaataagaataatatctatccaaaagatttttacaaatagggctgtgtttcaaaaataaaacaaaacaagaaaagcagcagtgatcatagagaggtcacactctaagtggggtcgcggcgtgaccacgcttcacggtcacgctcgtccgtcctgcagtggcgatgtttacatggtcacacgtgtgtgtatcaccagtgggtcaactgcttgtcatatcctcccgtggcagttggtgtagacactcttactgagcaaaaggcaatgaaaagtcttggttcccacactgcgatatattggaattttcacctcagtttatgaagttaatttcgaaatccatagtcatctaagcatgaatacctgtctgccatgtatttcactcttagtgagccaaaattgttagtttgtta

SEQ ID NO: 544271 - DNA, 109 bp, Homo sapiens
ttaagaccccatactcattacataaacttgcatcgcgatcgagttcaattggtatataggtttgcaagttgaattattctgcacatgagtcatgggtacgactcaatcg

SEQ ID NO: 544272 - DNA, 128 bp, Homo sapiens
tcagtgtagttgtgtccctccttatttcccagtgatggaagatggtgacagcttacaacacaagtatgagcaagaaaaacatgagtaggtcagcaaaggtcaatgtgcagggataaagaaaaagtggt

SEQ ID NO: 544273 - DNA, 306 bp, Homo sapiens
  misc_feature (275)..(275): n is a, c, g, or t
ctctagcaggatccccgggcacagaacttagaataacactgtacagctcacgagaagcccattctcatctgatttcacttcttcgctacctcctcaggagaagggagaggcccatgctattgccttccactttacctgggttgcaagctgaggctcacaacttatttcaaggacctcacagcatgttgggatggggcaggacctattccctatgtcttctttctcctatttctgtgcccttttcaagggtacccagcctcgaaatctccttgtcntcgtcctagctctttcctgtgctgacaaccc

SEQ ID NO: 544274 - DNA, 383 bp, Homo sapiens
gcagagatagaaaaacctctggcccatttggataaaaacttgtacaaacctccagctcactcagataaaggaacaagaacgacctagcacagaaatgcctttgtttggccagccacggtggatcatgcctgtaattccaacaatgtcggaggcagctgtgggcggatcatctgaggtcgggagtttgagaccagcatgaccaagatggacaaaccctgtctttactaaaaatacaaaactagccaggcatggtgctgcatgcctgtaatcccagctacttgggaggctgaggcaggagaatcgctagaacccaggaggtggaggttgctgtgagccgagatcgcaccattgcactccaggctggccaacaagagcaaaactgc

SEQ ID NO: 544275 - DNA, 139 bp, Homo sapiens
cggccagatctcgaggtcaggtgtacgagactagcctgcccaacacggtgaagcccaatctctactaaagatacacacacaaaacaagacgccggcgtgatgatgcatgcctgtaatcccaggctatcggcaagctgag

SEQ ID NO: 544276 - DNA, 115 bp, Homo sapiens
  misc_feature (27)..(27): n is a, c, g, or t
cgaaatcaatctcgttccccagaacgngtaaatcatggattgtgatggacggaggatcccctgctcctcactgagaggctccttaaaggtgctagcccctgatacagccacaccc

SEQ ID NO: 544277 - DNA, 917 bp, Homo sapiens
  misc_feature (23)..(23): n is a, c, g, or t
  misc_feature (29)..(29): n is a, c, g, or t
  misc_feature (330)..(330): n is a, c, g, or t
  misc_feature (371)..(371): n is a, c, g, or t
  misc_feature (382)..(382): n is a, c, g, or t
  misc_feature (505)..(505): n is a, c, g, or t
  misc_feature (524)..(525): n is a, c, g, or t
  misc_feature (558)..(558): n is a, c, g, or t
aaacctatactgggcttaagtgntagctngaggcccctggcggtgttttaacaactttccggggcacggaggcttctctgagtaggagtcttcatccttagcaccacagacttctgaggtcctgtgccctttacttgctggtgaggtgtcataggtagaaaagggctggcccttcagatctgggggtgtggtgagtggcaagtaagggcagaattttaggagaaccagagtcacccgctggctctactgagattgttacacccagaatccttttgtgtttttttgtggtttttttttttttggaggtgggagtctggctctggtcacccnaggctgggatgtggctggtgggtgcaatctcgggctcactngcaacctctgnttcccggggttcaagctatttctcctgtctcagcctccccagtagctggggattacagggcacccaccaccatgcccagctaattggttggtatgtttagtaagagacaggggtttcaccatngtgggccaggctggggctnngaactcctgggacctcaagtgatctacccgccntgggcctcccaaagtgcgggcatttacagggtgtgagccaccgggtgccccgggccaccaagaatcctttggggtatagccaagcctttgggttaccggcctcattgaagaatatgcttcccgcatggtcctagtcccagttgtattctcacaggtgtatgtcgcggacacaatccaaatcataaaccgggtcatggccaaacatttctgctatagggagggggacccacagaacccaaaatggcacgggtcctcctcaagaggagaggggccgggtctgtaaagggtcaagtcggcacactgggaaattccccaaatttgatcttcccagttaaaaactttcccctgagaacgaggtg

SEQ ID NO: 544278 - DNA, 469 bp, Homo sapiens
  misc_feature (55)..(55): n is a, c, g, or t
  misc_feature (394)..(394): n is a, c, g, or t
taaaatccatattccatttattagtggattttattgtttggaaaggcacatgcangtgactaatatactttcaatttgcattgaagtattgtttaactcatgtcttctcataaatataaacatttttgttatatggtgattaatttgtaactttaaaaactattgccaaaatgcaaaagcagtaattcaaaactcctaatctaaaatatgatatgtccaaggacaaactatttcaatcaagaaagtagatgtaagttcttcaacatctgtttctattcagaactttctcagattttcctggataccttttgatgtaaggtcctgatttacagtggataaaggatatattgactgattcttcaaattaatatgatttcccaaagcatgtaacaancaaactatcatatattatatgactaatgcatacaattaattactatataatactttcaaataaaagaatctaaga

SEQ ID NO: 544279 - DNA, 328 bp, Homo sapiens
tactaagccccgcacttctagtggtctcacctggaggcaagagggaggcgacagaagttcctgccacgctccgctgcctcctgctctctggaggtactgagacagggtgctgatgggaaggagggtagcctttggggggccacccggagcctggacctatgcagcgaggccacgtgccaccccacctcttggctctgggtccctgctcccctttgggaagtgagtgcgtgatttaaatttctttaggggcaaagtggtcagaaagaaaatggaggacttggagtttcactgcagtaaactggccccatgcggcccccgccaaaaaaaa

SEQ ID NO: 544280 - DNA, 574 bp, Homo sapiens
ccggcggtctgacatgtcagaatgggaaacaacccctgtacgtcatatggaaccaaaaaagagctggcatggccaagacaatcctaagcaaaaagaacaaagcgggagtcattacactactggacttcaaaatatactacaaagctatagtaaccagaacagcttggtatgggtgtaaaaacaaaggcatagaccagtggaacagaacatagaacccagaaataaatccacatatttatagccaacggattttggatacgggtgcaaagaacatacatgggggaaaggatccttcttgaattggctgagaaagctgggtatctctcaagtcaagatgaattacagacttaaacataatacccgaaactataaaattactagaagagagcataagggaaacacttcaggacattagtctgggcaaaaatggtatgtgtagcacatcaaaagcacaggcaacaaaaaaatagacaaagcagacgatatcaaactaaaaagcttctgcacagcaaaagaaacaatcagagcaaagagacaacctgttgaatgcagaaactatctgcaaactattcat

SEQ ID NO: 544281 - DNA, 257 bp, Homo sapiens
tctgtgctgaaaatgatgtctccacactaggctatgactcaccttcagcactgaggtccaagagttggagtttgtgaagttcgtgacctcaaaccccaatgggggcccacattcttggtaaacagaggagaataagaaaggagtatgtacacctgggtatgccaagatgagaattgacagggaggccattccggcaaggcaggtttgggcgggctattcctttaaggaaagcggctctcctaatggaaggaatccaa

SEQ ID NO: 544282 - DNA, 389 bp, Homo sapiens
catggtctgtgggatcctgtcatataggcttggctcaggcctatctgaggtgctgacaagggcgggaggattggagggaggagggaagtgactatgtgcatgcagaagccatggtaattgcaaagggaatattagtccaggagctgctggcccaggaaattgctttctgtagaagctttccttttcatggttttcaatgcaaattgaaaacataaatgggcacagaaaagtgtaggggggacaggtggggtgccagttgggatgtgataacatccaaaatcttcagcagggtcttaatttgcagaagagaatttcaagtaacaagagacaaccttataggatattaaaataatgttagagcatgttttgctgtgacctacccacaacca

SEQ ID NO: 544283 - DNA, 786 bp, Homo sapiens
  misc_feature (614)..(614): n is a, c, g, or t
agaatacctttgaacctaatgggccctttaaataaacttgttccataggacacactgagggggatatttgatacccggaacactttcgggtgggcctttcttttgggtttaaaatgtttaagcccccccataagtgtttaaaaattccacctagttgttaaatgagccgaatgcctgtaggggaaatccaagtggtccaggtaccctggccctatttttaaagctagggtatatccaccctatgtcatacccacttcacgtaatgtttgctcttttaaaaataaggtgaacccacccacttatagttggttgtatgcccctgcacacttccacgaggatcctagttctttaactttcacaggttgtctgcttaggtccctctctgtttatactatgagcggagatgcttatatataaaactaatgcgagcctgaatgggattttcacgcccaatttatgtcttgtctctcactcttgagtttggaaattaaattcccaattctaaatgaagtgtcacgtccacccatagctctatggggatgaagaaatttgccctactttgccccggtcctaagactgtgagttgtccaaatccctatgactgtaagctcttncaaggagcccacagaaggcgcacattttttcccggtcaagtaattttttttaaggtgtttggcagccctctgtaccctgtggagtactccgtaccttttgtttgatgttgctgaccagacctggaaaaaaatcccctttaaaaaaaaaccccttaaagtgtagccaaaccga

SEQ ID NO: 544284 - DNA, 157 bp, Homo sapiens
ctagagtatcccaagcttacgaggcatactgggctgcttcttgtaggggcttgatcatttatgaagtacttgggtaaatttataacaccccgcttccttttgtttacgcctttaattccgtctttgtgtggattgcctttcatcatagatgagtaca

SEQ ID NO: 544285 - DNA, 125 bp, Homo sapiens
  misc_feature (119)..(119): n is a, c, g, or t
cttgaacaggataacgagggctcatcagcttcgaggaggagcgggccagctgtccttcaacactggacacgctctgttgaccacccagatgctggtgcacgggaggacactgctccaanctgacc

SEQ ID NO: 544286 - DNA, 442 bp, Homo sapiens
  misc_feature (111)..(111): n is a, c, g, or t
  misc_feature (153)..(153): n is a, c, g, or t
  misc_feature (264)..(264): n is a, c, g, or t
  misc_feature (287)..(287): n is a, c, g, or t
  misc_feature (289)..(289): n is a, c, g, or t
  misc_feature (306)..(306): n is a, c, g, or t
aacgatggtcctcagctcaacgatggtcctcagctggggtaatggatgtataacacctctcgtcactgtttatgagtctataattaaaaagcagggcctggcaacagagtngtgttgaatcccccattaccccagctgagaggtgactttttnctcctggcatttaacgtaattcttaactacctatttgctctgtgcctttctcccccaggagaaagcagaagctgagtctgttttgttcactgctaaattctctgtctcctngcacagtgtgtggcacctgtgtntngaagtcagatgtttggntgaaagaatagttatggacacaggtgacttaaattctctcaggcggtctgcagttaggtcaatacctccctgtcaggacgatgggagaattagatgtgtataatgtagctcaagctgaggaccatcgtgggggtac

SEQ ID NO: 544287 - DNA, 283 bp, Homo sapiens
  misc_feature (228)..(228): n is a, c, g, or t
  misc_feature (258)..(259): n is a, c, g, or t
cgcttggggctggatgagccactgcacccagcctttttttgagatggagttttgctcactcttgtcgcccaggctggagtgcaatggtgcaatctctgctcactgcaacttccacctcctgggttcaagcgattctctggcctcagcctcccaagcggctgagattacaggtgcccgccacaacaccgggctagtttttatatttttagtagagatggggtttcaccnatgttggccacgcgctggtctcaatactcnnctgacctctatgcatactgcctgc

SEQ ID NO: 544288 - DNA, 232 bp, Homo sapiens
aggagccagcctcccaaagtgcgggatacaggcgtgagccaccgcgcacagcaaggcgggtctgctggtgtttcccagactagacgggtcttgaattccagtgctcaagagatctcccacctcagcctcccacagtgctgggattacaggcgtgagccgccacacccagcctattcaaaatttttttttcttagagacagggtcttggttgcccaggcggggcgtgcagggg

SEQ ID NO: 544289 - DNA, 978 bp, Homo sapiens
  misc_feature (228)..(228): n is a, c, g, or t
  misc_feature (687)..(687): n is a, c, g, or t
  misc_feature (737)..(737): n is a, c, g, or t
  misc_feature (894)..(894): n is a, c, g, or t
ggcgaactggcgcctccggcccccggcccggactccggtggctccggggaggtagacgagctgttcgacgataaatgaacgccttctacatctggcagctaccagcattgcataaacgaggcgtcagcgtggttgaagctgtcaagctcctagagagagaacgtggatcagggacggtcttccggatatagagctgtaccttgtgcgtcagagtgaaggttctggtgntggttccgtggattgagtatcgagtcccttccgtcggaccccatggagctccgaggtcctgtgacgcattgtttgcctgatctaccgtcggcccatcgcagaggtcaggagggtacacgtcgatctgatggtccgcagtgctggatccgatgatgatgacgcagggcagcgtggtactgtgaatcaatcaccaacccttgccttgctacatgggactctgcacatcctactactgattcgtccgatcgaacgcaagtaacccccgtgagtgtccgtccgcttgcggtgctggctgctagccgatggggtgacaagccctgagaagtgcaacagacctatgaactagtgcgagaatccttgtcttgagagctaggaccccgaccttgggatccttctgcaccgtgcacagggagctagacatgagtacattgcattggatcctagcgagcgaaggattgnccaacccttctagccctatggctacgcacacttggccctgaggatcaagnccattggtgccagcagggttgagttgaagaaaagcgttagcatgggaattgccttgacttaagcatactttcccaagggagcattggcttcgactagagttgcttcgagcctaaccatgcgtgactagcttcaaatgaggccaaggccgcgccctgnccacattggggccccagggtcccgctaggcgatggccgcttgaagggcccttgcttgcacgaaggcggctagaacgaagggatc

SEQ ID NO: 544290 - DNA, 255 bp, Homo sapiens
ctggtgggggtgcggactcatctctgtccgctggccacagccctcttactggtcccggtaggctgccattttctcacactcttaccttatcatgcctcatggccccacccccattctaggctgcgaccttttcgccaaagtcaaagcttctatcacctttactggcccccttcacccacgacgtcccctccggctcctctccgcatagtccggccccggacccccctttcccacgatcccccgttccggcctctc

SEQ ID NO: 544291 - DNA, 209 bp, Homo sapiens
tgaggacggttgaactcctgacctcaaccgatcgcctgcctcagcctcctgactagctcggattacaggtgcaaacataccacggccagctaatttttgtattcgagatattctttttgttgttgttagttgttgagacagagtctcactctgttgcccaggctggagtgcagtggcacaatcttggctcattgcaacacggtctctca

SEQ ID NO: 544292 - DNA, 197 bp, Homo sapiens
aagctgcactggactcaaccaagaaagagagaattcaaccagatggtagtgaacatcagaaggactgaatgacatgcaagcgcaattggtagaggatgtgcacataggatgagcttcagatgcagttggcagcaaagggggttattttggcatttcgttctaactttggcccttcgggttctcaggtttgctggttc

SEQ ID NO: 544293 - DNA, 312 bp, Homo sapiens
tggttcctgcagtgtagagatatgaacagggtatggtaggattggggaaaggggagagatacccattaaattcactccttatcctccccaaagtttaagctctatttctgcgccctagtcctagacacacattatactcagggagttttgcctgaataccaggtcccactgcccactggttgaagagtttgttttacatgggaaaactacgctggagcatgggtttttaggcactctgagtattcttagggtggctttgttcttgcctcttcagggtaattaggatggctgatctagacattttgttcttct

SEQ ID NO: 544294 - DNA, 259 bp, Homo sapiens
ctccatgttggaaaaagtccaaatttgcacatagattcatctaaatccccgcgtaaagataactgttagtgcaaagaggaacagctctgtgaacactaggaaaaaaccttgtggagagagtaaaaaatttaacaccctagagataacagcgcaatcctattctagaggccatataaacaattgtgtttacgacctagaggtcggattaggacatgccgatggtgcagccgctattaaaggctcggttgctcaacgatta

SEQ ID NO: 544295 - DNA, 100 bp, Homo sapiens
acagcagtgatcgagccggtcccacttcaggactacagtgaacattgtaaacacaatgatagtggtaaaagagatgttggaattaaccaagcaacccctt

SEQ ID NO: 544296 - DNA, 1535 bp, Homo sapiens
  misc_feature (551)..(551): n is a, c, g, or t
ggcggcctcgaggtgacaactgtctccgtcgcaggctccggcggtgtggctgcatggatgtgtctgccctggctgctgtcactgtctgggtctgtgcgatgccactggtgtggcctgcctgcagtcacctatgtgctgatccacctgtcagcatctcatgtcgctgtggccctgggttgttaccatttcgtggtgaaggcttccaccgctctagtgatgacgccgtatccgcgttcctgggcatgtccaatacatggctctccaattcaatgcagtggagcgaaagttcaatagcctgtggttctaacgggtggtatttccccaaagggtcccttaggcgggaagccttgggccccctccaatggtggtcccggtggtgcgcctgctaaaagggtcctgaattagtccctttttttgcgcccgcacattgggctttgaactcccctcgctgggcaacggtgtgttggtcctattgtgtcccaatcgcggctcttaggctcgggtatggtcccataatcgctctcattggtcatttgtgtaggagtaggtcnctcccctgtgggagatgcgctccttttcgggcagacaaacgcgcgaagtgttttcgaaatgcccatagtcgggcttttcgcacgggctatttatgcgcgaaacgtcaggtaggggtctctcaactcaactcatactgcgcggcatttcatatgggcgcgaagtgagccgccctagaaggagaattgcggccaaaacgaaaccggttttatattaagacagcccgtagagctgtagagggtcgcacgcagaaagcgttttttttgcgagaaaaagagccagatcccgatagcccgccgtagggggttcgtgcctcgacgcatacgaacggattttttttatgctggttgcggttcgaaaatgatctcgccggtcgccgtatacgcccgggcgacgcctgctggtgttttgtaaaaggcgcgccgcgctgtagttattttagggtggagccggcacccacccatgtgggtggatgaacaagctctccgcaggtttttaagggcggatggcgctccatcaggatggtcgctcctctcctgtgattatttattgagtgcgctctcggcatgagagggctgcccccccgctgtgttatttataaaacagccccgcgaggtgggaagcccacctggaggaggggcgggccactcatatgtggggggcgacgacacatgtatttatattaaaaaggccgcctcctcgtatgtgtgtgagtcgtaagaaacatgagctggtgcggtggttcactaaaaaagatactgatctgtcagctgccgactgtgtggggtgaggttgctcgctccgacttgagtccactactgatgccgtcgctagttgaagaataaaattgacccccgctgaggtcgtatgaggtgggtgggtgtcagctatcgaccgtagtaatattagatcatcgtcgccgccgacagtccacgtacgtatgatagagtcaaatgccctatccagctaaatattagtccattatg

SEQ ID NO: 544297 - DNA, 397 bp, Homo sapiens
ccgattagcccagagaaccgtctatctcttgtgaagtttagactgtagatcctaggacggacagctctcaggacactagggaaaatcatgttgcagagagagtagaagattaatgtccatagtaggcctaaaagcagacgacaattacgatagcgtgcaagctcagcacccactacctataaaatcccaaacatattactggactcctcacagccaattggaccaagctatcaccctatagcagaactagggtcagtataagtaacatgaaaagattctcctccgcataagcctgtgtcagatgaaaacactgtaactgtcaattaagaggccaatctctgcaatcaaccaacaagtcattatgagcctcacggtcgggctgagcggggggggatcc

SEQ ID NO: 544298 - DNA, 386 bp, Homo sapiens
gcattcaattaacattaacctggttttcatgataggatatgtgtcaaatttctctttttccacttgtgcttttgaaatcttgtttcatctccttattttttaaactagttttgtaaagtttcctaattataaatctctctgtctctgtctctctgtctgtctcgtgtgtgtgtgtgtgtgtgtgtgtgtgtgtgtgtgtgtgtgtgtgtgtgtgcgcgtgtgtgataaatctgttctggctgcacattcaccttctacaattcaggccagccaaagcccataaattatagggtaacttgtaataagcaatctagaagcatactgttcaggagaaatataatgtgtaccacatatattaattttaaattttctagaaggatactaaa

SEQ ID NO: 544299 - DNA, 122 bp, Homo sapiens
  misc_feature (47)..(47): n is a, c, g, or t
  misc_feature (76)..(76): n is a, c, g, or t
  misc_feature (119)..(119): n is a, c, g, or t
tccagtagtataagcgacagacctatgtgatagggtactgaccttcncccggcctgccttgatcttggatcacaanacggttctgggcacttgaactcagggcccaagcagaagcacangcc

SEQ ID NO: 544300 - DNA, 1262 bp, Homo sapiens
tggtgtgcatgctgtgctgtgctgcggtgacctggtgcctggtggtgaatgagtgcgtgccgcgtgcgggccagctggctggagccgtgtagctggatgaatgctccccctccctgcttcccttgtgcctgatgcctggtggtgctgctgctgctgcactgctgtgactgtccatgatgctgtgtgctcccacacccctctgactcctgctgaccctgcacctgaacccccaccctgggcccgggagtgatgatcgaatgctcaatgtctgaaccatgaaccctgcacctactgactgtgcgactgtgctacaatgaagctgtggcctgcagtgccattgttggtttcctgcaagctgaggatgctgatggagggatgtgttgcctagctcgatgcagcatgataggtctgccatccaagacatggatggactttgtcccctggacgtgacgtgcattggaagccctgagggacggaggccacaggtgttggcaagcagtttcggtgacagtctgtgatgtgatggctttgagtacaatgggacattggggaagattagtttggaatttgttgagaagccaggagaggaagcaacaggaggtatgtctatgtgctcattgtccactgaagtgctggaaaactgggaagaattcaggataccatttggcacggcaacaacggaacttgagagaagaataccacagacgacaaaaacacgatggctgcagtactccccacacacccgtgcacggcgcatcaactcaggcaaacaatgacggcagggctactcagccagacggtgtagggacacgccaggtcgagtaggcaggcagacatactacaggttccgtcggtcacgagctctcccatgtcaggggcctcacagatcagcttggagacagttcctggtcacaacaccattggcagctttgaagagccacacatcgacattcgaagatgcattcccgcaaacccttgcgtcagtcgcccagactccacaggccccaccctaacaacataaggggttgcaggggaggcacccacagcggagcaagagaaaggcagacacacgaggacagaaggcaggtacgcagtcacagacggaggggcgggcaggaatggagagggcgacgggcacgggacgggcacaacagaggaacacacacgacacggccgccgagcacagagtagagcgcgagagcagaggggagccgaacgcaggggcccgcaatgtcttataggagccaaaaagaaagcaaagg

SEQ ID NO: 544301 - DNA, 903 bp, Homo sapiens
cgtatcctgaaaacgtggaggtgccttcaaggttctcatcgctgctcagtacagcgaggttcaggtccgcgtgctctccgagccagcccacttccattttggacaaaccaaccgcacccctgaatttctccgctaattccctgccggccaggtcccagcattatgcagggctagactagactcgtgcatatcttgttgtgtttccgagagctaacgctcattgccatacgtatgtgctgacaaatgaggagctgtcggggaaagtactccagaggcgagcagcccaggtgtgtgcacgtcgtgtgagctttgctgattccgatatatgtgcccccagccagtaccttgggtgttccccacgcttgggcatcatgcaacaaacaaacaggccactgagaatgcaaaggacggaacgtgagtgcgaattcctggggctgctggatgcttacttgaatgacgaggacttaatctggtgggcgaacgagtgacattggctgacatcacagtttgtctgcaccctgttgtggctctataagcaggttctagagcctactttccgccaggctttcccaataccaaccgtggttcctcatctggcattaaccagcccagttccgggctgtcttgggggaacgcggaaacctgtgttgaagaagaatggcccaagttcgatgcctaaaaaaggttcggagagaccaagctataaagggacacaccacggaacggacaagggtccgggaagaagaacagaaggctcggcggcgcggacggcggcgacacaagggggcgtgccctaccgtagaagcgactggtactgtgtacggcggtgtgtgccccagggaggagccccgttcccgccaagaaaccgttggggggcaaaagcgagcaccccggaaacccctg

SEQ ID NO: 544302 - DNA, 122 bp, Homo sapiens
ttcatagtaatacccatcatatcggaggctttggaactgactagttcccctaataatcggtgcccccgataaggcgtttccccgcaagtcaaaagaaattagagctgatcctctagagtcga

SEQ ID NO: 544303 - DNA, 260 bp, Homo sapiens
acattcaagcagtactctgcctcagcctcccgagtagcttggattacaggcgcccgccaacatgcgttgatcgttttttagtagagacagggtttcaccatcttggccaggctggtcttgaactcctaacctcgtgatccaaccgcttcagcctcccaaagtgctgggattacaggcgtgacccaccatgcccgggctaatcttctttttttttacagtctccctctgttgctctccatcacagctcaccatggcggacg

SEQ ID NO: 544304 - DNA, 350 bp, Homo sapiens
  misc_feature (194)..(194): n is a, c, g, or t
  misc_feature (342)..(342): n is a, c, g, or t
gggcacagtctgtcatattgggactgattacctcttctcccgatgccactaagcagtgatcacactgcagatggcactgatttggttggcaagagacatgccaggaagaatattaagggaccaggcccctatgattaggcctaatcatagcctgttgtttgaaaagggcatgagggacattcatccggcctggnactgtgccctagacctgctctccagggtagtggggccctccattgcaacagaggtgtgggtagacataggtaagtgtggcaagacatgcctcggaggttgtactttgccttcaagggctgtgtgacccttgataaactgccttctctnaatctctg

SEQ ID NO: 544305 - DNA, 213 bp, Homo sapiens
  misc_feature (73)..(73): n is a, c, g, or t
  misc_feature (85)..(85): n is a, c, g, or t
  misc_feature (191)..(191): n is a, c, g, or t
  misc_feature (200)..(200): n is a, c, g, or t
gatttgagtacagaggacaagatattcgtgtgatgatgcaggcggagactggagtgatgccaccgcatgccanggcaatgctggngccaccaggagctgggacaggcgggagggattctcccttatacccctcagagcaatcttggcccctctgacgtcttgactttagacttctggtccccagagcgganagatgaatnaaatctttccttg

SEQ ID NO: 544306 - DNA, 634 bp, Homo sapiens
  misc_feature (290)..(290): n is a, c, g, or t
acccacccgaggagagtctgagctcagacatgcccagcccctcccccacctgatggtccttccctttccaccctggtagtggaagacaaagagcatataatcttggaagttctagggccctgcctactgcgggtccctctccgcaatactacagctgatggtttctggaaagcgccacctcctggccaaccagcataaaaatagagcattaaaccaccaaagcttaggaccctcacggagtccattgcaccctccacctcctccaccagaccaggcactggtatgcatgngtgagagacccatagatggttcacatcgcaggactctgtgcagacaaccgccagtaccaaccaggatctgggtagactcgctgggtagctaagacccagaagagagacaacaatcactgcagttgtggctcacagaagccacatccataggaaaagggggagagtactacatcaagggagcaccccatgcgacaaaataatctgaacaacagccttcagccttagaccttcctctgacagagcctacccaagtgagaaggaccagaaaaccaacagtgctaatatgacaaaacagtcccttcaacattctgaaaaaaatcacactaggtcacagcaatgatccc

SEQ ID NO: 544307 - DNA, 439 bp, Homo sapiens
  misc_feature (75)..(75): n is a, c, g, or t
  misc_feature (106)..(106): n is a, c, g, or t
  misc_feature (225)..(225): n is a, c, g, or t
  misc_feature (420)..(420): n is a, c, g, or t
  misc_feature (427)..(427): n is a, c, g, or t
acagcccccaatgccgcttccagctccacctcggcgtcttgggccaagcgaatcaacttcccgggtgaggcttgnggggtcgccatcgaagagcgctgactgaggntggcctgccaggtctgggcgcgtccagaagaagaggagcagcagggcattccaggccacaaagaggatagcgccccacagcacaagccctgcagactgcttcttcagcatcctgtgccncaccggggagggcaggccaggggacggttcaaggctgccctgggcttgcccggctcccttgcccgcagtcctagggatgcctcctctggactatgggattaggaggcagccatgcaccaggtcctcccgacgtcctggccccgaacttggcctgctccggggcgcagggagcgagcccggtgcccaggcgcgtcnctcaagntgccgcggtcgc

SEQ ID NO: 544308 - DNA, 691 bp, Homo sapiens
  misc_feature (521)..(521): n is a, c, g, or t
  misc_feature (615)..(615): n is a, c, g, or t
ctcctcctttgccttttgccatgattgtggggcctccccagccatgtggaactgttagtcaattaaacctctttcctttataaattacccagtttcgggtatgtctttattagcagtgtgagaatggactaacacagggagcccgcctaaggacaaagctgacatggacaaggcagagcgggagctctgaactgaggcactggagtgtgctctgtttgcggacttcttgttactatgtccctctttattgttaatgccaacttgaatccagtttctgttacttgcagctgaaagcagcttactgatgaagcaaggctggggtggatagagagcatccaatcctcttaaggctctccagaatgcaggaaataccatctgccctttcttacattatatgttaatccccccaagcaatgtttactatatgaagtctttcatacttgaactgataaaggatcattttgaactagagattagtgcccgagattagtgccacctgtcacctacattcaagtctaagntctttggtttgtttttagagacagagtgtcactctggtgcccaggctagtctcgaacctctgggctcaagtgatcttcccaccctagccctccnaaagtgcttgggatacaggtgtgaccccactgtgccagcccaagtctaggttttgctcacattcaccgcttactcg

SEQ ID NO: 544309 - DNA, 740 bp, Homo sapiens
aagcggcctgaagcgtcgtaggagcgcgccgcataatatagaggtaatctatgagcgagcttcggactctgtcgcagcgtctgctgccatttcgagctgtctgcggcacccaaggagaagtctccggtgactgctctgcgagactgtctagctacctgctaaaagaccattgggaatccaatgtatatatcctctgcctggtatctcattgaaatgagcagtcacccgagcatgtgttcactacgaggtcagccgcatggtcttgctcgagagcgctgtggttatttgacatggagtgcactccgctgaccctgtgcacggcaaaatgggaggcttcaaaggattgggctcttactctggaccccattgcgtagaagagttagcgtccgtaggtcctatactcaccgcgatcaccatgtctactgaacaaaattgagatactcggggatcttccatcactggatatggactgtaatagtcagccaaggacattacaatacggcctatggtcgcgtacgacgtggaaagtccatagattctgataacttcaagaggtccagtaggctaacttagtgaaactttacttgaatcctggcattcccggaatcattttggacatctgaagcgaagattgcgaatcgacatcatgacggattcctaagacaagggagaacatggcggccagttctctacacgaaggcttgtaccttagctcttcatctgttgcacttgaatattga

SEQ ID NO: 544310 - DNA, 242 bp, Homo sapiens
taaaataaacataatccttacttcacatcatgtagtaaaattaatttcagacaattaaaagatataaaaataatactataaatagctttaaaacatataggtctaaattttttcaataagtagaatatttctatccttattgacggaaaagtgaactaagaaaaataattttaaaaacccacacacaagactggattgatggcattaaaattttgtaaatgtctgtatatacaaatgaatga

SEQ ID NO: 544311 - DNA, 324 bp, Homo sapiens
ttaaaggcccactgccccattttgaactggacatgggaaccctagccaaatggccttaatctttatgacctagcaggcagaacaggaaccaagcagcttctattttgtcaaactccttgggacaaatattcaacattcaacaccaggcttggtaaacctaacgctaaacaggtcatggcaggcaaactggattttcttaagaaatgaggaaaagtgcaggtgatctcagtactgtgggggaaaccaaaattaaaaccaaacaggttgcacttggccactggctgcctaaaccaatcacagcttcagtttggttttttgtcaggg

SEQ ID NO: 544312 - DNA, 114 bp, Homo sapiens
aggctcaagaaggtagaggggacatagagacagagtaccattctatcctactataactctaggaaacagagagtacaatagataccagtaggggacccaatactagtaggagcc

SEQ ID NO: 544313 - DNA, 610 bp, Homo sapiens
actcgatggcggaaaggagtctgtgaggagacgtctggagcttatgagatggagtcctatgcggaccacaccaactatgatgagcatgccattttcctgaccaagaaattcagccggcatcatggacccaccattactgccaagctatactggcgggcagccgtacctgagggaaactctcctgcaggacttcatagcggttgcccatagtgtgggcatccctgaggactccatcttcaccatggctgaacgaggtgaatgagttcctggggagcgagaaccagagccgatcttaattcggagagtgcggagggctgtgctccccccagaagaggaaggatcaggtggtgggctaccggatactgaagtcactaagagagaggattcttgtcacttggtctactcgatcgatccttgcatggaaatgaccaggatgtaattctatacagctacatccatggccagcgagactctccagtacggcggttggatgagcaacggcagcaacttcggaacagcggagagccctgctacctgccgctactgagggggcccgctactaccgtatttcggctccccagccgaccctcatgcacctctggcttttgtt

SEQ ID NO: 544314 - DNA, 220 bp, Homo sapiens
actagactacgacaagtggctttaacatatctgaacacacatagctaagaccaactggatagatacccactatgcttagcccctaaaacctcaacagttaatccaaaaccaaaaaaatcgttgcttccggccagaacactacgagccacagcttaaactcaaaggactggcgggcttcatatccctctagaggagcctgtttctgtatatcgactaaacc

SEQ ID NO: 544315 - DNA, 521 bp, Homo sapiens
tcgagtttgggactgaaaagcttactcattggaattctaaggacagctccagttaacatgaaagtaaaaataaaaacccagaaaaccttttggacagattacaacaaagaagaattctgatacctcttgtagattcattttccaccccaaagattaggtaacaaaggagatgtgggagagaaagaaacaaaatgggagagaaattgagataagagaggaccatgtgaaggaggtgaagtatttaaagtggaaaggaggaaaataacctgaactcttaactgctcttgaaagttcactctgtcttcactccagctctattgactgattacctgtagcccacttgctattcaacagtctttatcaaagacagatcacttggatacttttgtatgagtggtgtcacaaaaagacatcttgagccaccaaataaggtgcaatatacaaaccagaagtcccattcagcccagtatttgttctcaaatgtcataaatgctgtggacaagaaactaagaacaaccaaa

SEQ ID NO: 544316 - DNA, 191 bp, Homo sapiens
aagtttacgttgctgagaccagatggagaaatgatgggggcgcccctctcctcaaatggccccatgtggcccctcggcatgaaatgaaggctaggagagtagtccgtgggtcaggaaatggggggggggaccaggagttgacttaagtccatgggggcctgtgtttgtgccctgggctacccagctctggc

SEQ ID NO: 544317 - DNA, 390 bp, Homo sapiens
ttcagtgtcacccaagcaggaattgctggggttcaggaaatgcttgtcagtcacaccagtcataagatgcaagaaggcagccggggtagggcagcaagaatggagtgacactggacatgctgagttgggctcaaagtcaagttcaaaaaagtccaggtcaggtctctgccctctccagcttatagcaatgctggttatgtatgccagctgcttcctagaaaatcattcattcattcattcattcattcattcattcattcattcaatagttgcttaattgagcactgactacatgccaggttctgtcttatgtcttggggatagagcagtaaccaaagcaggtgttgcaatgactcctgtggagctcatgtactggtgggagacagacag

SEQ ID NO: 544318 - DNA, 85 bp, Homo sapiens
gcggccgcctactactactactgctcgaattcaagcttctaacgatgtacggggacatgtaataaagaattacttttccttttgc

SEQ ID NO: 544319 - DNA, 192 bp, Homo sapiens
aactcgacatcgctaggctctgctgtgctttatttaaaaagatctcatctggagcataatgagtcacagaccttttaaccgatcatctgtcctatattgaacattcattactgagacaagttcgggatcttatttagaacccctaaagggcagtaccactgtctcattacaagttcgtagaacattatagtt

SEQ ID NO: 544320 - DNA, 558 bp, Homo sapiens
  misc_feature (519)..(519): n is a, c, g, or t
ctttcagagcgcccagaccagggccatattcctcttgctaaggaggcgggagtcaataggctaaaagaccagaactggaagggatgatgtcgttaaaaccaccagacagcagagctggctcccaagcggctctggcaaatttcatcaactttttacttttcttatgatttgctaacatctccaccaacaggtacatcccttaaaataaacaagccacaacaaagcacttctacgaacaaatggatgtggcggctggagctcgcaggaggcaacacaggggggcgcccttccctcctcccggccactgccactgaggcaggaacgtgggaacgtggtctcagccggtgagaaactgcagagcctgaatccagaatttagaaacacagaggcaaacacttacacgtatgggaaaagaaaaaagcctccactgatggcctcataatatgagcatatttgcaaaataaacagttatcatcatttgcaaattattgtggctgtaaaaactgctctgccctcaanggaggttgatacaaacccaataaattctgcactttgtta

SEQ ID NO: 544321 - DNA, 213 bp, Homo sapiens
atagcagtgaggagctgagaatccaactgcggtgggccatggtgagtggagactttggccttgactctaagtgaagtgggagcggagggagtgttttgggcagaggaggggcccttctggctgctttgaggagcaaggacagtttctcttgcaaagccagtcggaaatattcctcccagggcaccgccatccttctggcagttgccccagctt

SEQ ID NO: 544322 - DNA, 391 bp, Homo sapiens
gtagctgggattacaggcgcccgccaccacactcgcttatttttttgtatttttagtagagatggggttttgccttgttggtcaggctgatctcaaactcctgacctcaaatgatccacccgcctcggcctcccaaagtgctgggattaaaggtgtgagccaccactcctggccataaaaatttttaaatgacattttttggctactgttaaaacaacaacaaaagcaggaactaagaagtatcgatgaggatgcggagaaactgcgccctgtgcatcgctggtgcagaatcaaatgggcagccgctgtggaaaccagtgtggtgggaggctcctcataacattaaacagacaattaccaaacccattgcaatcccgctcccggtatatgc

SEQ ID NO: 544323 - DNA, 186 bp, Homo sapiens
ccggaacagtagatttagaggttaaggagggtgatggtggctatgatggtggtgattatgcaggctattgctttttttcgtgaattcttcgacttatggcccaatttgggtcaaatacagccggcttagcggtgggctaggcctctctacgggcacgaggacgggtggcatgcgaatctcaagcgt

SEQ ID NO: 544324 - DNA, 789 bp, Homo sapiens
  misc_feature (20)..(20): n is a, c, g, or t
gctgaagacgagacatggtntcggagcatacagactaacgatagggcgactagcatgtgctgcaaacagctaaactgacagtattggtgtcttgtatatacagactattgcttcttttgtctaggatcataatggactctacagtctgatattaaaggcattggatctatcttggatatcatacatggtcaaagaagcctttaggatatttattagatcatgtatatgattggaacatcacatggattctaccgaagatgtagtatggactttaatgacacaatgatcagagataaaatggacattatacagggtcagtactgtaaaaagaatatgcgctaacaaagactcttaggaattattttaagcagtgcagatactagggataactgtagatattacaataacgttactctactaatgggaaaattaattctttaatgctgagaacagaaacagcggcaaatctaactataatggtacttaaatacccgggacacacaaacccagtaaaaagcgcagacaacaacacggaccaagatgatacccgcggtgtacgaaagtcgtaacagcccactacgcgatattaagagtaagataaaccgaaggcagagatggggtgtaggtatatgaagtaagccagagctgggcttcgaattctaccccaatcagccataactagatatctagatccaccgggagagacgtgaggtgcgggttacgacacgagattaagcgtcagcagcagagtacagagctgaggtaacgagagcacaacgggaccagacg

SEQ ID NO: 544325 - DNA, 268 bp, Homo sapiens
cgaatgtctaatagtatcttgaaatgagagtggccaatgctgcaaaccatcccctccacatacagtctcctcatcttaagagacagcacctccatctctctagcagcccaaagcaacactctagcagtcaccttggtgcctctctccctcttacatgtccatctatgactgaatggttttgacatttgtccctgccaaatctcatgttgaaatgtaatccccaacgttggaagtagggcctggtgggaggtgtttggatcacgggggg

SEQ ID NO: 544326 - DNA, 207 bp, Homo sapiens
ggactagcgctaactcaagtgggggggacatagtgattcctcaggtggtggacccaggctgagatgcttcaggtggcggaaagtgggcattcctcaagtggcggggacaaggagattcttcaaatggtggggacaggggcgatgcttcaagtggtggggatagaagcgtctcaagtgcaggaaatgggggtgactcttccgggtgga

SEQ ID NO: 544327 - DNA, 140 bp, Homo sapiens
catatctttaaaaatacaaaatacatataggatgtcagcatctagaaccatctttatagaaaaatatctgaccctcaaaaacatatccttattgaactatctgaaaagaatagttctaatctctacaggactcaggcaat

SEQ ID NO: 544328 - DNA, 696 bp, Homo sapiens
ggtggcctcgctatgctgatcacaatctgggcacggtgaagcccaagtgctagtcatgaattgctttagatttccaagagagggaatgatgtgccttccactttaagccacgcttcactgagaacaacaggagagtcattgtttgcatatacaaagctggatactaactggggaagggaagaacgacacgtcggtttgcccaatttgaaagtgggaaaccattcaaaatacaagtactgggttgaacctgtaccaacttcaagggttgcagtgaatgatgcgtcactgtggtagtcgatgtaagaagtcatcgggttgataaaacctcaatgaagatcaggcaaactgggaatttctggtgacatagacctcaccagtgcttcgtataccatgatataatctgaaaggggcagattatgagacccatagaatctagttccttgatgtgtaaaggtttcatgttcactgtgagtgaaaatttttacattcatcaatatccctcttgtaagtcatctacttaataaatattacagtgaaaaaaaacacacaacgaggcacaagaacaaaacgacaccaaaaaaaaaaaaaaaaccacacacaaaaggggggggcccaaaaatattcacccgggggcgccccaaatacgacaccacaagttttataacaaaggggtcgccaatagtaggggacgaaaca

SEQ ID NO: 544329 - DNA, 333 bp, Homo sapiens
ttttttttcttgagacagagtcttgctctgtcacccaggctggagtgcagtggtgtgatctcggctcactgcaacctccacctcttgggttcaaacgattctcctgcctcagcctcctgagtagctgggattacaggcacgcgccaccacgcccggctaattttcgtatttttagtagagatggggtttcaccatgttggccaggctggtcttgaactcctgacctcaggtgatccgcccgccctggcatcccaaagtgctgggattacaggtgtgagccactgtaccctgcctggtatgtagaattttctaacaaatagtttagtgcttctc

SEQ ID NO: 544330 - DNA, 500 bp, Homo sapiens
  misc_feature (22)..(22): n is a, c, g, or t
  misc_feature (32)..(32): n is a, c, g, or t
  misc_feature (68)..(68): n is a, c, g, or t
  misc_feature (88)..(90): n is a, c, g, or t
  misc_feature (96)..(97): n is a, c, g, or t
  misc_feature (171)..(171): n is a, c, g, or t
  misc_feature (190)..(190): n is a, c, g, or t
  misc_feature (219)..(219): n is a, c, g, or t
  misc_feature (311)..(311): n is a, c, g, or t
agaacgggctggcttctgtttncctgctcacnggctctagccagcccagggaccacatcaatgtgagnggaagcctccacctcaggtnnnaaactnnatactggagactggctgagaacttacggacaacatcctttctgtctgaaacaaacagtcacaagcacaggaagnggctgggggactagaaagnggccctgccctctagaaagctcagatctnggcttctgttactcatactcgggtgggctccttagtcagatgcctaaaacattttgcctaaagctcgatgggttctggaggacagtcggctngtcacaggcctagagtctgagggaggggagtgggagtcttagcaatctctttgtcttggcttcatgggaaccactggtcaccctttaacatgccctgtttatggcagaacttgggcctgggaaaggtggtggcagaaacttcaaactgagatgctgagagagaaactaataactcctgggcaggaacca

SEQ ID NO: 544331 - DNA, 717 bp, Homo sapiens
attctagaggccgaggcgggtggatcacttgaagtcaggagctcaagaccagcctgaccaacatggtgaaactacgtctctaccaaaaatacaaaaatcagttgggcgtggtggtgcacacctgcaatctcagctactcaggtggctgaggcatgtgaatcgcttgagccaggaggcagaggttgcagtgagctgaaatcgagccattgcactccagcctgggcaacagagtgagactctgtctcaaaaaaaaaaggaagaaagagaggccaggcacaggggctcacgcctgaatcccagcacttggggaggccgaggcgggtagatcatgaggtctgtagtccaagaccagcctggccaagatgatgaaacccggtctctactaaaaacacaaaaattagctgggcacagtggcagacgcctgtaatcccagctactcaagaggctgaggcaggaaaatcacttgtgaaccccgggcggcaagaaggttggcaagtgaagcccgaagaattcggcccccatttacaaactccccaggtcccgggggccgaccaggaagccagggaagttcccattatccccccccatccaaaaataatatacaacacaaccatacctcacaacatcacacactttgtttggcgggcctcttgggccttctcaagaaagcttcttttaaacaccacttctgtggggggcccagggggccccatatat

SEQ ID NO: 544332 - DNA, 174 bp, Homo sapiens
gattacaggcgtgacaccttgcacctggcccgtgtgttgttttgagcttctgtcttatgtaccacttcccttggctcaaggcgtcctttttatctgtcataccacttgactaaatgagatagtgtgggtcactctctacctcctcccatctgtcggtcctttcggagataggcg

SEQ ID NO: 544333 - DNA, 488 bp, Homo sapiens
tagctctgccccgggaaatctcctcgggagggacggagagtcctcgggtctaggctcatggcacgggatggcaggaattccttcgagcaaagttcatattccggcatgagggattagggcaaacccaatccccagtgggggggtctccacctctccctggaaagcctccaggacctctatatcctccagggcctcgcggcccacctccatttccacctcctctcatgaatgcaggtcttctaggggcaagggacacttgagggaggtggccagggaattcttttccatcaaaccagtcaagggctggccttagctggagggagggtcatcaaaggacagggtggccccccccgttgggcttgccgggtgtcctggtctggtataaaggatttatcgatggggtttcccgggtcttcttaaatgggtctgggatcaattccttattgggttacaaaggaactccccaaattgggatctggtagacaccc

SEQ ID NO: 544334 - DNA, 166 bp, Homo sapiens
acccactccaccttactaccagacaaccttagccaaaccatttacccaataaaggtttaggccgttagaatttgaaccctggcgcatagatattagtaccgcaaggaaagatgaaaatattaccagcatatatagcaggcttacccctataccttctgcatatgat

SEQ ID NO: 544335 - DNA, 1422 bp, Homo sapiens
ggagagaactagtctcgacgttatttaatataatattttttacaaaatgaggcaatttattaacccagcatggtatggttctaatgcttcttgttggcagtgccacctgtccgcggattctgtccaaatctctattgtccctgaggtgttcagtttagcggccgccatcttgagtcctatttgccaccattttacagcccctaccagggcttggaggacccggacagggccacactcttgtgacgcctcggctagaagtggctagggccatggacagccgtatctctgacgtcccccatagatcttggtcataggagccaaccccaagcgccacaccctggaggtacagtgtgcccgccgctgtggaagcagatcagcgtgtagaaccagttctcatcgtagcggagcaagctcttttgtgcttggcccagcttgaaggtatccacccattcagggggccttacaggttccccggactatttatgcaggaaacggcttgccagaagttctagaacagaatcctagctaggtatcaccgtccttttaccaagaaactcccagagcatccgtcgcaggctaacacttgaagcataggcactcctcttgcatccaaccacgcatgaccaacacgcgctgtggtatttaccaccaaaagaactgcgcgatgtgacaacaccccgtgaaagaccccccagcaagaagacactcagaaccacacatcaacgacgcgacaaacaaacacatcatccagcacccacggacacgaccagaggcgtagcagatacgacacgacacaccacatcacagcgagcaccggacagaacgacaaaacgacagcatacgacacggcgacaccacacacagaagttgaaagagatacagaacaagtccgccaagactaggcgagaggcgtaccaggggggacgaacaggacagccgtaaggtcacacgccagcgatccgaagatcgcacgccaggcagcacagactgatgacaaccaacagccaccgaccacacacgaacggagacatcggcaacaaccatgatgacacgcgtgcgcggcggcccgacagtacgtcgccacctgcaccacgagggagccgaaacacgcagagacaaaacaggacccaacgacaacagctacctgacaagcagaaccccctgacaaaaagcgagagaacgagctaacgaccgcggagaggacaccggactaaccgacagaaacaacggaccagcaggcacacgaagcaccaaccagacaacgaagacaggaggaagggagagacagaaagagacgtagagagtacaggcacagcagaggtcacagaaggtaggcgaccaacccagcgacgacaatagacactgcaaacgagagaagcgagaagagaccaaccgcaccaagcgctctaacagggcgaaaag

SEQ ID NO: 544336 - DNA, 1285 bp, Homo sapiens
gacgcggagcccggagcccgcgccgagcccctggcctcgcggtgccatgctgccccggcggcggcgctgaaggatggctgacgccgctgcctccgccctccccgcgagcacctgcggtctgctggcggctgctgctactaccgagcctcgtcctcggcgccgccctgcgtggagccgctcgtgcggccatgccggatgtatgccgacctgtctcctgggagtcctggactgtgccctggaagaggcgggcaaggtgtcctcctggatgcacatgacctgtgtggccctgccttcagcccttccaggaggaccaggcaagggctctgtgtgcccaggatgcgccggcctccaggcgggggccgggcccagcccaggactggaagatgagattgacttcctgtgcccaggatgcttgtcccggaaggagtctggacatctcaactccgcccctacccaaggaccgatcaggcggctcccgggagcctggcaccctgtggcttctcggcgacgggggcaggggctggagctgggcctcccctccactccatggaacccccagagcccacgcctcactaaatccgtcctctgtgggtccccgtgtgtcgatccggacaccggtgtcgagcaattgtcggcccatgtgagcccccgggggagggcaacggcgatggggcatcgcccgcgtcgatgctgaatccctggcgatcgtgcttgttggccgattggatccggttccgttctcgtaggcgtgccatcgtgtggggctgcgacgactgtaatgggtgaagattcaggatgagtcaagaagggcttgaacaacgtcacaatggtgatgggccctctgggtagagcctgtgtgtcccagggcataatcgcgctggggacctagcgggctggccacagagcgcgggacattttcacttagcagtacaagggcgaaccaatgtgaacaatggagacggctaaagagaccaaccaacagagactggaagacgaaccccccccggaaagaggacaacgtgggccgggaaactaacgtggaaacacagtgcacgggcgcgaaccgaaacaggtaaagagagtgtggcgaccacaagatgccaacgcacaggacaaggccacgagccccccaaaacccgcgcgctagaccagaggagaggaacaacggaccgacacccccgccggggggtgagacccaccaaacaacacgctgagaagcagagcgcgacaaacagcaacacgcacaccaccgagagcgcaaccacacacatgacgagcgaacacg

SEQ ID NO: 544337 - DNA, 734 bp, Homo sapiens
  misc_feature (159)..(159): n is a, c, g, or t
gagctgtgactgcctgcagggcttccagctgacccactcactgtggcgggggcacatggctctggaatgtggcactctccttatcagcacagtatccgagaagaataccctgtagtcggcactcatgcaataccttcaggtggtggtgccttcatcccnacagaggtggtcctcgcacaccgctgggtgcgagtccctgactagagtgtcctagcgcgctcttccggtgcccatccagattgggtgagcagacatactgcaatggaggaccttgactttggcgatttgcactaaacgaagtgcgccttcctatagatattcatggcgttgcgccgctacgtcatgcaaagcttgacgcacgacccaagcgcctacagggggatgcttgaaacccaaccctttgtcctccaagggcaacccagtagaagttggttgtcgaccaatcgcttgccctccccgtgtttccccttgtgcccgagcgtccacactgcgttggaaccctcccggcgggagctattgggcgagtacgaaaccgattgggtcccccccgtttctccccgactgggttgttcgcaagctatttccatatataaatgccccgtggggcgttttgtgtcccccctgtgctccacccaaggcgcgccgggggaaagtgcccacgccagcttattcgcagggcctcgtgtcaccagatgtcccggggaaacttcgctcccagggacgggcgccgttcg

SEQ ID NO: 544338 - DNA, 490 bp, Homo sapiens
  misc_feature (479)..(479): n is a, c, g, or t
acctgccatttactccatggccaggcacacagcagccctacacggatggtgtgaggatggaggagattgtggagggctgcaccggagcactgcacatcctcgcccgggaccccatgaaccgcatggagatcttccggctcaacaccattcccctgtttgtgcagctcctgtactcgtcggtggagaacatccagcgcgtggctgccggggtgctgtgtgagctggcccaggacaaggaggcggccgacgccattgatgcagagggggcctcggccccactcatggagttgctgcactcccgcaacgagggcactgccacctacgctgctgccgtcctgttccgcatctccgaggacaagaacccagactaccggaagcgcgtgtccgtggagctcaccaactccctcttcaagcatgacccggctgcctgggaggctgcccagagcatgattcccatcaatgaccatggataaatgcangtaccgagctt

SEQ ID NO: 544339 - DNA, 343 bp, Homo sapiens
gcatgatccactcttcttggctcaatctccttggcctctgccctccggcccccgggcaccaggagaccttctgcatcaaggagccttgtgcctctccctcagggtgtgagtccccacaccgcccctcactgtcttccctctgttctctctcctgccatccaacagcctcttcttccaacagcgtccacttttctagaagccccccagcctccaccatggctcccatcccctctgccctcgctgtttgggagcccgctggatccagcccacagctgtcctctgcgcctgcagattcctcgttcctttacccgccctccctaaggtcctccctccctggactcaa

SEQ ID NO: 544340 - DNA, 263 bp, Homo sapiens
aggattacacatacgcaccacgataagctattcttagacaaaatttaacattacagagttcgtggtaatacaatccagactttttttggaaatatcatattgtctttcggaacaaacatttcttatagtgtgtctggctacaatggctcatgtctgtaatcccagcactttgggaggcagaggtgggtggatcacagggtcgggagtttgagaccagcctggccaaaatggtgaaaccctgttctctactataaatacaaaaa

SEQ ID NO: 544341 - DNA, 301 bp, Homo sapiens
  misc_feature (9)..(9): n is a, c, g, or t
ctcgattangtaccatcgaaaggcgatggggcaagacagaaaagtgcctgagctggggaagccggggtgtaacttcctgctgcaccctgcgcctccagaggtcctccgtagggtctttcttgggatagtgttctgctcctgcttttctgtcctgggcatgggtccagggcctgacaccccctccccgcccctgtggccctggccactaaagcttcagactcaagtacccattctgttttcccccagcaacgcccctccaaacctccagcacaagaagggatccgtctagagcaccacacac

SEQ ID NO: 544342 - DNA, 101 bp, Homo sapiens
gactgccacagactcctggcatatggagcagagcagactttctataagccagataggtatgactcgtggagtctagagtcagtgctgtaaggagtgtgtgt

SEQ ID NO: 544343 - DNA, 479 bp, Homo sapiens
tgtcctctgtgggtgtgtgtgtgaatggggaggtcagttgcaactgatgccaattccaagaacctgtgaagttcattcggctgtcatggggaggagttgtggccatgtccaaggcacctgtcccatgccccctgcctcctctcacacaggatggtgtgaggatggaggagattgtggagggctgcaccggagcactgcacatcctcgcccgggaccccatgaaccgcatggagatcttccggctcaacaccattcccctgtttgtgcaggtgagtctggggcaggtgggcaggagaggtccccccaccactgcttaaagggcaaggttaggagtcccagatttgggaggcctggaccaggtatcaagaggtctttggaggagtttggaggaaagttgccactccagattgactacttagcaaccccctgcatgggcatggctttctaagcttcaaagcaaggaaagagatcacaaatgg

SEQ ID NO: 544344 - DNA, 379 bp, Homo sapiens
atctagaggatccctgcagcagacacagcatctggtgcaaaatcaatgtggactgaacataagtcacctgaatggaaggacttactactacgacactgaaaccaaacagtctacctgggtagaaaccagatgatctttaaagacctgctgagcaactcttatcttaatgcccctggaaggaatacaactcagattctggaaagccttactattatcattctcaaactaggagaatctcggctgggccaaaccttaagaacttgaggatcttgaaggatgccagaataccattgttgctggaagtcttattacgaatatcaacctgcatgctatgatcacagctgtagaaagcagtccgccagaagagtgcaccataaca

SEQ ID NO: 544345 - DNA, 3216 bp, Homo sapiens
aagctggtacggccggagatttaaggatcagagtcggagcagccgccgccgaccgcgccgagctcagttcgctgtccgcgccggctcccaccccggcccgaccccgacccggcccggtcaggccccatactcagtagccacgatggaggtgatgaacctgatggagcagcctatcaaggtgactgagtggcagcagacatacacctacgactcgggtatccactcgggcgccaacacctgcgtgccctccgtcagcagcaagggcatcatggaggaggatgaggcctgcgggcgccagtacacgctcaagaaaaccaccacttacacccagggggtgccccccagccaaggtgacctggagtaccagatgtccacaacagccagggccaaacgggtgcgggaggccatgtgccctggtgtgtcaggcgaggacagctcgcttctgctggccacccaggtggaggggcaggccaccaacctgcagcgactggccgagccgtcccagctgctcaagtcggccattgtgcatctcatcaactaccaggacgatgccgagctggccactcgcgccctgcccgagctcaccaaactgctcaacgacgaggacccggtggtggtgaccaaggcggccatgattgtgaaccagctgtcgaagaaggaggcgtcgcggcgggccctgatgggctcgccccagctggtggccgctgtcgtgcgtaccatgcagaataccagcgacctggacacagcccgctgcaccaccagcatcctgcacaacctctcccaccaccgggaggggctgctcgccatcttcaagtcgggtggcatccctgctctggtccgcatgctcagctcccctgtggagtcggtcctgttctatgccatcaccacgctgcacaacctgctcctgtaccaggagggcgccaagatggccgtgcgcctggccgacgggctgcaaaagatggtgcccctgctcaacaagaacaaccccaagttcctggccatcaccaccgactgcctgcagctcctggcctacggcaaccaggagagcaagctgatcatcctggccaatggtgggccccaggccctcgtgcagatcatgcgtaactacagttatgaaaagctgctctggaccaccagtcgtgtgctcaaggtgctatccgtgtgtcccagcaataagcctgccattgtggaggctggtgggatgcaggccctgggcaagcacctgaccagcaacagcccccgcctggtgcagaactgcctgtggaccctgcgcaacctctcagatgtggccaccaagcaggagggcctggagagtgtgctgaagattctggtgaatcagctgagtgtggatgacgtcaacgtcctcacctgtgccacgggcacactctccaacctgacatgcaacaacagcaagaacaagacgctggtgacacagaacagcggtgtggaggctctcatccatgccatcctgcgtgctggtgacaaggacgacatcacggagcctgccgtctgcgctctgcgccacctcactagccgccaccctgaggccgagatggcccagaactctgtgcgtctcaactatggcatcccagccatcgtgaagctgctcaaccagcccaaccagtggccactggtcaaggcaaccatcggcttgatcaggaatctggccctgtgcccagccaaccatgccccgctgcaggaggcagcggtcatcccccgcctcgtccaactgctggtgaaggcccaccaggatgcccagcgccacgtagctgcaggcacacagcagccctacacggatggtgtgaggatggaggagattgtggagggctgcaccggagcactgcacatcctcgcccgggaccccatgaaccgcatggagatcttccggctcaacaccattcccctgtttgtgcagctcctgtactcgtcggtggagaacatccagcgcgtggctgccggggtgctgtgtgagctggcccaggacaaggaggcggccgacgccattgatgcagagggggcctcggccccactcatggagttgctgcactcccgcaacgagggcactgccacctacgctgctgccgtcctgttccgcatctccgaggacaagaacccagactaccggaagcgcgtgtccgtggagctcaccaactccctcttcaagcatgacccggctgcctgggaggctgcccagagcatgattcccatcaatgagccctatggagatgacttggatgccacctaccgccccatgtactccagcgatgtgccccttgacccgctggagatgcacatggacatggatggagactaccccatcgacacctacagcgacggcctcaggcccccgtaccccactgcagaccacatgctggcctaggcggcctggccccagtgcggttcctcatctgagaggctctccgtgcaggcgatggggcaagacagaaaagtgcctgagctggggaagccggggtgtaacttcctgctgcaccctgcgcctccagaggtcctccgtagggtctttcttgggatagtgttctgctcctgcttttctgtcctgggcatgggtccagggcctgacaccccctccccgcccctgtggccctggccactaaagcttcagactcaagtacccattctgttttcccccagcaacgcccctccaaacctccagcctccctgtctccagctgcctgggcccggaagggctttggttccttctctgggtctgattttctcactgaactccaccgaccaactgccctaagcccccagggcctccagggcccaggttcgagacccaaacccccaaaatccaaaacttctcttgaaaagttcagggaccgtccaggggagatggggaggagatatggagtgagtcacctgctccagaagatgccagcttctctctccagggtgcttagttggctttgcccacccctcactccccagggagctctggggacagcttcctcacacccctgtcccacccacacagctgccctagctgaccccgagaagtgctcttggctgacccctctggtgtgtggtgaggggctttctcttccccttcctgtttcagacccccccatttcccgcacatggtgtggggggctgggggaggtccaagcagagtgttttattattatcgctttatgtttttggttattggtttttttgtatagaccaaagcaaagaaaataaaaataacacaga

SEQ ID NO: 544346 - DNA, 667 bp, Homo sapiens
caagcgcctgctggagggcgaggacccgaggctatatgaagccttggggctgtgaatgtctggtgtccaccagctcccgggcggggtcgttttcggggacctttgcgtgtcaggctcccggcccagtgactggccaatgtctgcagcgctccgtgccacgggaacctggcggtgagcccccggcctggtgtgcgccccttcggccacacttgtgagcacccaccctgcgcgagggggttccttcggcgtgggctcctgtggtatcacgctccctgggtgtggggtctttcggcacgcacgcttccggaaaatgtttatggcaccccccactccagtcccacggccccacggcgtctttcctggcctgccttgcttggcccactcccgtccacggcgcctggagccagtgctcagctacttctcctcccctttgaagacccctcccacctcctggcctcacatttctctgtgtgatcccccccttctgggctctgccacccccccgtgggaaaggcccccctagaaagaagtccgctggcacccataggaaggggcctcaggagccggaagggcccggaccagaaccttgcccccggcaactgccttcctgcctctccccttcctcctctgctcttgatctgtgtttcccataaattaatgtagccca

SEQ ID NO: 544347 - DNA, 3330 bp, Homo sapiens
aagctggtacggccggagatttaaggatcagagtcggagcagccgccgccgaccgcgccgagctcagttcgctgtccgcgccggctcccaccccggcccgaccccgaccctgtgccctgtgtcatggcctccattagctcactgtgtgctgtgtgctcatctgtgggcgcagtgtatctgttggtgtgacagaggggttggctgagctgtgcctgctgggtgcctggtcccagccgtccctgtggcagtagccacgatggaggtgatgaacctgatggagcagcctatcaaggtgactgagtggcagcagacatacacctacgactcgggtatccactcgggcgccaacacctgcgtgccctccgtcagcagcaagggcatcatggaggaggatgaggcctgcgggcgccagtacacgctcaagaaaaccaccacttacacccagggggtgccccccagccaaggtgacctggagtaccagatgtccacaacagccagggccaaacgggtgcgggaggccatgtgccctggtgtgtcaggcgaggacagctcgcttctgctggccacccaggtggaggggcaggccaccaacctgcagcgactggccgagccgtcccagctgctcaagtcggccattgtgcatctcatcaactaccaggacgatgccgagctggccactcgcgccctgcccgagctcaccaaactgctcaacgacgaggacccggtggtggtgaccaaggcggccatgattgtgaaccagctgtcgaagaaggaggcgtcgcggcgggccctgatgggctcgccccagctggtggccgctgtcgtgcgtaccatgcagaataccagcgacctggacacagcccgctgcaccaccagcatcctgcacaacctctcccaccaccgggaggggctgctcgccatcttcaagtcgggtggcatccctgctctggtccgcatgctcagctcccctgtggagtcggtcctgttctatgccatcaccacgctgcacaacctgctcctgtaccaggagggcgccaagatggccgtgcgcctggccgacgggctgcaaaagatggtgcccctgctcaacaagaacaaccccaagttcctggccatcaccaccgactgcctgcagctcctggcctacggcaaccaggagagcaagctgatcatcctggccaatggtgggccccaggccctcgtgcagatcatgcgtaactacagttatgaaaagctgctctggaccaccagtcgtgtgctcaaggtgctatccgtgtgtcccagcaataagcctgccattgtggaggctggtgggatgcaggccctgggcaagcacctgaccagcaacagcccccgcctggtgcagaactgcctgtggaccctgcgcaacctctcagatgtggccaccaagcaggagggcctggagagtgtgctgaagattctggtgaatcagctgagtgtggatgacgtcaacgtcctcacctgtgccacgggcacactctccaacctgacatgcaacaacagcaagaacaagacgctggtgacacagaacagcggtgtggaggctctcatccatgccatcctgcgtgctggtgacaaggacgacatcacggagcctgccgtctgcgctctgcgccacctcactagccgccaccctgaggccgagatggcccagaactctgtgcgtctcaactatggcatcccagccatcgtgaagctgctcaaccagcccaaccagtggccactggtcaaggcaaccatcggcttgatcaggaatctggccctgtgcccagccaaccatgccccgctgcaggaggcagcggtcatcccccgcctcgtccaactgctggtgaaggcccaccaggatgcccagcgccacgtagctgcaggcacacagcagccctacacggatggtgtgaggatggaggagattgtggagggctgcaccggagcactgcacatcctcgcccgggaccccatgaaccgcatggagatcttccggctcaacaccattcccctgtttgtgcagctcctgtactcgtcggtggagaacatccagcgcgtggctgccggggtgctgtgtgagctggcccaggacaaggaggcggccgacgccattgatgcagagggggcctcggccccactcatggagttgctgcactcccgcaacgagggcactgccacctacgctgctgccgtcctgttccgcatctccgaggacaagaacccagactaccggaagcgcgtgtccgtggagctcaccaactccctcttcaagcatgacccggctgcctgggaggctgcccagagcatgattcccatcaatgagccctatggagatgacttggatgccacctaccgccccatgtactccagcgatgtgccccttgacccgctggagatgcacatggacatggatggagactaccccatcgacacctacagcgacggcctcaggcccccgtaccccactgcagaccacatgctggcctaggcggcctggccccagtgcggttcctcatctgagaggctctccgtgcaggcgatggggcaagacagaaaagtgcctgagctggggaagccggggtgtaacttcctgctgcaccctgcgcctccagaggtcctccgtagggtctttcttgggatagtgttctgctcctgcttttctgtcctgggcatgggtccagggcctgacaccccctccccgcccctgtggccctggccactaaagcttcagactcaagtacccattctgttttcccccagcaacgcccctccaaacctccagcctccctgtctccagctgcctgggcccggaagggctttggttccttctctgggtctgattttctcactgaactccaccgaccaactgccctaagcccccagggcctccagggcccaggttcgagacccaaacccccaaaatccaaaacttctcttgaaaagttcagggaccgtccaggggagatggggaggagatatggagtgagtcacctgctccagaagatgccagcttctctctccagggtgcttagttggctttgcccacccctcactccccagggagctctggggacagcttcctcacacccctgtcccacccacacagctgccctagctgaccccgagaagtgctcttggctgacccctctggtgtgtggtgaggggctttctcttccccttcctgtttcagacccccccatttcccgcacatggtgtggggggctgggggaggtccaagcagagtgttttattattatcgctttatgtttttggttattggtttttttgtatagaccaaagcaaagaaaataaaaataacacaga

SEQ ID NO: 544348 - DNA, 424 bp, Homo sapiens
agcgttgtcaatgagcccatctccacacgcatccctgctgacgtcagatcaaccgcaatgccactatctttccagaagcgaacattgttggtcaccagtcggtcataaggtgcattgatgaacagttgatagctgatattgcgtttttgtgtatcgaaggtgctggtttcaaccgaacctacccgatagccacggaacagcaccggatctcctggcgagagtgcccggcttttttgctatcgagaatcacacggatacctttcgcatcaggcggggccaacggtggcgagtccagcaaatcgtatttatccattttgctgcctttcgcgcctggctgcagttcgatataaactccagacagcagcgttcccaggccgctaatcccttcgcgaccaatctgcggtttcaccacccaaaagacggt

SEQ ID NO: 544349 - DNA, 135 bp, Homo sapiens
cccccagccagcgcccgccgccaccaccgtagcagcagcagcagcagcagcagcagcaagagtaactctgacttaggaatagagacagccagagttactcttgctgctgctgctgctgctacggtggtggctggg

SEQ ID NO: 544350 - DNA, 3118 bp, Homo sapiens
gggactaactcacgatacgcccaacggagctgggaagggtgactcgacaacgcatcgacttggcatgacagcctatcaaggtgactgagtggcagcagacatacacctacgactcgggtatccactcgggcgccaacacctgcgtgccctccgtcagcagcaagggcatcatggaggaggatgaggcctgcgggcgccagtacacgctcaagaaaaccaccacttacacccagggggtgccccccagccaaggtgacctggagtaccagatgtccacaacagccagggccaaacgggtgcgggaggccatgtgccctggtgtgtcaggcgaggacagctcgcttctgctggccacccaggtggaggggcaggccaccaacctgcagcgactggccgagccgtcccagctgctcaagtcggccattgtgcatctcatcaactaccaggacgatgccgagctggccactcgcgccctgcccgagctcaccaaactgctcaacgacgaggacccggtggtggtgaccaaggcggccatgattgtgaaccagctgtcgaagaaggaggcgtcgcggcgggccctgatgggctcgccccagctggtggccgctgtcgtgcgtaccatgcagaataccagcgacctggacacagcccgctgcaccaccagcatcctgcacaacctctcccaccaccgggaggggctgctcgccatcttcaagtcgggtggcatccctgctctggtccgcatgctcagctcccctgtggagtcggtcctgttctatgccatcaccacgctgcacaacctgctcctgtaccaggagggcgccaagatggccgtgcgcctggccgacgggctgcaaaagatggtgcccctgctcaacaagaacaaccccaagttcctggccatcaccaccgactgcctgcagctcctggcctacggcaaccaggagagcaagctgatcatcctggccaatggtgggccccaggccctcgtgcagatcatgcgtaactacagttatgaaaagctgctctggaccaccagtcgtgtgctcaaggtgctatccgtgtgtcccagcaataagcctgccattgtggaggctggtgggatgcaggccctgggcaagcacctgaccagcaacagcccccgcctggtgcagaactgcctgtggaccctgcgcaacctctcagatgtggccaccaagcaggagggcctggagagtgtgctgaagattctggtgaatcagctgagtgtggatgacgtcaacgtcctcacctgtgccacgggcacactctccaacctgacatgcaacaacagcaagaacaagacgctggtgacacagaacagcggtgtggaggctctcatccatgccatcctgcgtgctggtgacaaggacgacatcacggagcctgccgtctgcgctctgcgccacctcactagccgccaccctgaggccgagatggcccagaactctgtgcgtctcaactatggcatcccagccatcgtgaagctgctcaaccagcccaaccagtggccactggtcaaggcaaccatcggcttgatcaggaatctggccctgtgcccagccaaccatgccccgctgcaggaggcagcggtcatcccccgcctcgtccaactgctggtgaaggcccaccaggatgcccagcgccacgtagctgcaggcacacagcagccctacacggatggtgtgaggatggaggagattgtggagggctgcaccggagcactgcacatcctcgcccgggaccccatgaaccgcatggagatcttccggctcaacaccattcccctgtttgtgcagctcctgtactcgtcggtggagaacatccagcgcgtggctgccggggtgctgtgtgagctggcccaggacaaggaggcggccgacgccattgatgcagagggggcctcggccccactcatggagttgctgcactcccgcaacgagggcactgccacctacgctgctgccgtcctgttccgcatctccgaggacaagaacccagactaccggaagcgcgtgtccgtggagctcaccaactccctcttcaagcatgacccggctgcctgggaggctgcccagagcatgattcccatcaatgagccctatggagatgacttggatgccacctaccgccccatgtactccagcgatgtgccccttgacccgctggagatgcacatggacatggatggagactaccccatcgacacctacagcgacggcctcaggcccccgtaccccactgcagaccacatgctggcctaggcggcctggccccagtgcggttcctcatctgagaggctctccgtgcaggcgatggggcaagacagaaaagtgcctgagctggggaagccggggtgtaacttcctgctgcaccctgcgcctccagaggtcctccgtagggtctttcttgggatagtgttctgctcctgcttttctgtcctgggcatgggtccagggcctgacaccccctccccgcccctgtggccctggccactaaagcttcagactcaagtacccattctgttttcccccagcaacgcccctccaaacctccagcctccctgtctccagctgcctgggcccggaagggctttggttccttctctgggtctgattttctcactgaactccaccgaccaactgccctaagcccccagggcctccagggcccaggttcgagacccaaacccccaaaatccaaaacttctcttgaaaagttcagggaccgtccaggggagatggggaggagatatggagtgagtcacctgctccagaagatgccagcttctctctccagggtgcttagttggctttgcccacccctcactccccagggagctctggggacagcttcctcacacccctgtcccacccacacagctgccctagctgaccccgagaagtgctcttggctgacccctctggtgtgtggtgaggggctttctcttccccttcctgtttcagacccccccatttcccgcacatggtgtggggggctgggggaggtccaagcagagtgttttattattatcgctttatgtttttggttattggtttttttgtatagaccaaagcaaagaaaataaaaataacacaga

SEQ ID NO: 544351 - DNA, 3513 bp, Homo sapiens
aagctggtacggccggagatttaaggatcagagtcggagcagccgccgccgaccgcgccgagctcagttcgctgtccgcgccggctcccaccccggcccgaccccgacccggcccggtcaggccccatactcagtagccacgatggaggtgatgaacctgatggagcagcctatcaaggtgactgagtggcagcagacatacacctacgactcgggtatccactcgggcgccaacacctgcgtgccctccgtcagcagcaagggcatcatggaggaggatgaggcctgcgggcgccagtacacgctcaagaaaaccaccacttacacccagggggtgccccccagccaaggtgacctggagtaccagatgtccacaacagccagggccaaacgggtgcgggaggccatgtgccctggtgtgtcaggcgaggacagctcgcttctgctggccacccaggtggaggggcaggccaccaacctgcagcgactggccgagccgtcccagctgctcaagtcggccattgtgcatctcatcaactaccaggacgatgccgagctggccactcgcgccctgcccgagctcaccaaactgctcaacgacgaggacccggtggtggtgaccaaggcggccatgattgtgaaccagctgtcgaagaaggaggcgtcgcggcgggccctgatgggctcgccccagctggtggccgctgtcgtgcgtaccatgcagaataccagcgacctggacacagcccgctgcaccaccagcatcctgcacaacctctcccaccaccgggaggggctgctcgccatcttcaagtcgggtggcatccctgctctggtccgcatgctcagctcccctgtggagtcggtcctgttctatgccatcaccacgctgcacaacctgctcctgtaccaggagggcgccaagatggccgtgcgcctggccgacgggctgcaaaagatggtgcccctgctcaacaagaacaaccccaagttcctggccatcaccaccgactgcctgcagctcctggcctacggcaaccaggagagcaagctgatcatcctggccaatggtgggccccaggccctcgtgcagatcatgcgtaactacagttatgaaaagctgctctggaccaccagtcgtgtgctcaaggtgctatccgtgtgtcccagcaataagcctgccattgtggaggctggtgggatgcaggccctgggcaagcacctgaccagcaacagcccccgcctggtgcagaactgcctgtggaccctgcgcaacctctcagatgtggccaccaagcaggagggcctggagagtgtgctgaagattctggtgaatcagctgagtgtggatgacgtcaacgtcctcacctgtgccacgggcacactctccaacctgacatgcaacaacagcaagaacaagacgctggtgacacagaacagcggtgtggaggctctcatccatgccatcctgcgtgctggtgacaaggacgacatcacggagcctgccgtctgcgctctgcgccacctcactagccgccaccctgaggccgagatggcccagaactctgtgcgtctcaactatggcatcccagccatcgtgaagctgctcaaccagcccaaccagtggccactggtcaaggcaaccatcggcttgatcaggaatctggccctgtgcccagccaaccatgccccgctgcaggaggcagcggtcatcccccgcctcgtccaactgctggtgaaggcccaccaggatgcccagcgccacgtagctgcaggcacacagcagccctacacggatggtgtgaggatggaggagattgtggagggctgcaccggagcactgcacatcctcgcccgggaccccatgaaccgcatggagatcttccggctcaacaccattcccctgtttgtgcagctcctgtactcgtcggtggagaacatccagcgcgtggctgccggggtgctgtgtgagctggcccaggacaaggaggcggccgacgccattgatgcagagggggcctcggccccactcatggagttgctgcactcccgcaacgagggcactgccacctacgctgctgccgtcctgttccgcatctccgaggacaagaacccagactaccggaagcgcgtgtccgtggagctcaccaactccctcttcaagcatgacccggctgcctgggaggctgcccagagcatgattcccatcaatgagccctatggagatgacttggatgccacctaccgccccatgtactccagcgatgtgccccttgacccgctggagatgcacatggacatggatggagactaccccatcgacacctacagcgacggcctcaggcccccgtaccccactgcagaccacatgctggcctaggcggcctggccccagtacggccccctctttgcaggcttttcctcctctctagaacctccttctgttggaggccctcccatctccccgctgaaacctgcgctccttttttggggggatcctttgctgctgagcttccccaagcacggtgtgccctggcctgccttcttcttgtgtctttggtggggatggggaggcctattcctgctggccccttctgggggtggcgggcaggtgacacggagtggcttgagcttctggggatgcaggtccaccgagcccctgacccctgtctgtccccgctcccctaacaggtgcggttcctcatctgagaggctctccgtgcaggcgatggggcaagacagaaaagtgcctgagctggggaagccggggtgtaacttcctgctgcaccctgcgcctccagaggtcctccgtagggtctttcttgggatagtgttctgctcctgcttttctgtcctgggcatgggtccagggcctgacaccccctccccgcccctgtggccctggccactaaagcttcagactcaagtacccattctgttttcccccagcaacgcccctccaaacctccagcctccctgtctccagctgcctgggcccggaagggctttggttccttctctgggtctgattttctcactgaactccaccgaccaactgccctaagcccccagggcctccagggcccaggttcgagacccaaacccccaaaatccaaaacttctcttgaaaagttcagggaccgtccaggggagatggggaggagatatggagtgagtcacctgctccagaagatgccagcttctctctccagggtgcttagttggctttgcccacccctcactccccagggagctctggggacagcttcctcacacccctgtcccacccacacagctgccctagctgaccccgagaagtgctcttggctgacccctctggtgtgtggtgaggggctttctcttccccttcctgtttcagacccccccatttcccgcacatggtgtggggggctgggggaggtccaagcagagtgttttattattatcgctttatgtttttggttattggtttttttgtatagaccaaagcaaagaaaataaaaataacacaga

SEQ ID NO: 544352 - DNA, 838 bp, Homo sapiens
ctgtgactagctgtggcctggcccgggcaggacagcggggcggcgggcggcgcgggcctggccccgggatggctatgttcctgcagcctggtggcctcgtgctcagcagcggcagccgccggccgggcctggcgggcggtgactgctggctggatgtgcaggcagtacacctgccccatctgcctggaggtctatcacctgtgcccgtggccatctgtgcagcttgcgtgcacactgttctgcggggagtgtctccagccctgcctgcaggtgccatcccctgctgtgcccactgtgccgcctgcccttctgacccaagaaggtggacaaggccacccacgtggaagaagcagctctcatcctacaaagcgccctgtcgaggctgcacaaaaaggtgaccctgtgcaaagatgaggagtgcacatttcgtcctgcctgaaggtccagggagcagattgggcaatgccccaagttcgtccccgtggtgcccacatcacagctatccccagaacatccccaaatggtccaccttcgcctgcccgtactgtggtgcccgcaactggacaagcaggagggcttggtgaaggcactgttgttgaaaagcccaccggatggaccccaaacccgctgtggtgttgccccatcttgctcggcatgccctgggtgtgacccagttacaagaagcgccaacttcctgcagcacttgttcacgacacaagtttccttcgacacctttgtgactcacagattgagaggggcgcttccggttgctgcctggcttcttggaactaaggaggcacacgctggtctgggtaggagcccgcctgtcactgcttta

SEQ ID NO: 544353 - DNA, 609 bp, Homo sapiens
  misc_feature (137)..(137): n is a, c, g, or t
  misc_feature (148)..(148): n is a, c, g, or t
gccttgccatcatgcaaggggaagggcgactgtgacagccactgccacagaggatggcagttggctgtgtccctttgtgagggtcttcaaatccttttccttctgcagggccttgggcctgtaaatatcctcatctntctattctttnttttttttagttgccccctcacctaatttccacctcagttttgaacaaatcgttctcttcctgaatagatcaaaacactgatgtgaagataaagcctgaagcaccattgccctaaacataatcctgccttgatcgcctgagcaatgccaatacggtttgtgtgtcataaaacaacgttctgaatctttgggcggagtttcgttgcttttttttctaaaaaaaaaactgccccttttaatggcgtttccctttcctttttgtaaatgctttaagagcaagcccttcaaatttgttggttcccttaaaaagggggccttccccaaagggccctaaccttgaaggtaggaacccatccttggcttttttcaatggcggggcctggtttcaaaagggttttttgcaaaccgttttggaaccatccaaaagggtttttctttttttcccaaatttttcgggggaaa

SEQ ID NO: 544354 - DNA, 3280 bp, Homo sapiens
aagctggtacggccggagatttaaggatcagagtcggagcagccgccgccgaccgcgccgagctcagttcgctgtccgcgccggctcccaccccggcccgaccccgacccggcccggtcaggccccatactcagtagccacgatggaggtgatgaacctgatggagcagcctatcaaggtgactgagtggcagcagacatacacctacgactcgggtatccactcgggcgccaacacctgcgtgccctccgtcagcagcaagggcatcatggaggaggatgaggcctgcgggcgccagtacacgctcaagaaaaccaccacttacacccagggggtgccccccagccaaggtgacctggagtaccagatgtccacaacagccagggccaaacgggtgcgggaggccatgtgccctggtgtgtcaggcgaggacagctcgcttctgctggccacccaggtggaggggcaggccaccaacctgcagcgactggccgagccgtcccagctgctcaagtcggccattgtgcatctcatcaactaccaggacgatgccgagctggccactcgcgccctgcccgagctcaccaaactgctcaacgacgaggacccggtggtggtgaccaaggcggccatgattgtgaaccagctgtcgaagaaggaggcgtcgcggcgggccctgatgggctcgccccagctggtggccgctgtcgtgcgtaccatgcagaataccagcgacctggacacagcccgctgcaccaccagcatcctgcacaacctctcccaccaccgggaggggctgctcgccatcttcaagtcgggtggcatccctgctctggtccgcatgctcagctcccctgtggagtcggtcctgttctatgccatcaccacgctgcacaacctgctcctgtaccaggagggcgccaagatggccgtgcgcctggccgacgggctgcaaaagatggtgcccctgctcaacaagaacaaccccaagttcctggccatcaccaccgactgcctgcagctcctggcctacggcaaccaggagagcaagctgatcatcctggccaatggtgggccccaggccctcgtgcagatcatgcgtaactacagttatgaaaagctgctctggaccaccagtcgtgtgctcaaggtgctatccgtgtgtcccagcaataagcctgccattgtggaggctggtgggatgcaggccctgggcaagcacctgaccagcaacagcccccgcctggtgcagaactgcctgtggaccctgcgcaacctctcagatgtggccaccaagcaggagggcctggagagtgtgctgaagattctggtgaatcagctgagtgtggatgacgtcaacgtcctcacctgtgccacgggcacactctccaacctgacatgcaacaacagcaagaacaagacgctggtgacacagaacagcggtgtggaggctctcatccatgccatcctgcgtgctggtgacaaggacgacatcacggagcctgccgtctgcgctctgcgccacctcactagccgccaccctgaggccgagatggcccagaactctgtgcgtctcaactatggcatcccagccatcgtgaagctgctcaaccagcccaaccagtggccactggtcaaggcaaccatcggcttgatcaggaatctggccctgtgcccagccaaccatgccccgctgcaggaggcagcggtcatcccccgcctcgtccaactgctggtgaaggcccaccaggatgcccagcgccacgtagctgcaggcacacagcagccctacacggatggtgtgaggatggaggagattgtggagggctgcaccggagcactgcacatcctcgcccgggaccccatgaaccgcatggagatcttccggctcaacaccattcccctgtttgtgcagctcctgtactcgtcggtggagaacatccagcgcgtggctgccggggtgctgtgtgagctggcccaggacaaggaggcggccgacgccattgatgcagagggggcctcggccccactcatggagttgctgcactcccgcaacgagggcactgccacctacgctgctgccgtcctgttccgcatctccgaggacaagaacccagactaccggaagcgcgtgtccgtggagctcaccaactccctcttcaagcatgacccggctgcctgggaggctgcccagagcatgattcccatcaatgagccctatggagatgacttggatgccacctaccgccccatgtactccagcgatgtgccccttgacccgctggagatgcacatggacatggatggagactaccccatcgacacctacagcgacggcctcaggcccccgtaccccactgcagaccacatgctggcctaggcggcctggccccagtgcggttcctcatctgagaggctctccgtgcaggcgatggggcaagacagaaaagtgcctgagctggggaagccggggtgtaacttcctgctgcaccctgcgcctccagaggtcctccgtagggtctttcttgggatagtgttctgctcctgcttttctgtcctgggcatgggtccagggcctgacaccccctccccgcccctgtggccctggccactaaagcttcagactcaagtacccattctgttttcccccagcaacgcccctccaaacctccagcctccctgtctccagctgcctgggcccggaagggctttggttccttctctgggtctgattttctcactgaactccaccgaccaactgccctaagcccccagggcctccagggcccaggttcgagacccaaacccccaaaatccaaaacttctcttgaaaagttcagggaccgtccaggggagatggggaggagatatggagtgagtcacctgctccagaagatgccagcttctctctccagggtgcttagttggctttgcccacccctcactccccagggagctctggggacagcttcctcacacccctgtcccacccacacagctgccctagctgaccccgagaagtgctcttggctgacccctctggtgtgtggtgaggggctttctcttccccttcctgtttcagacccccccatttcccgcacatggtgtggggggctgggggaggtccaagcagagtgttttattattatcgctttatgtttttggttattggtttttttgtatagaccaaagcaaagaaaataaaaataacacagaaaaaaaaaaaaaaatatttgtggggggggcccggcccttaattcccttaagttggtcgttttac

SEQ ID NO: 544355 - DNA, 760 bp, Homo sapiens
tatatttggcaatgtttttttccataatatttaagttttcgatgttaaatattttcttcggtgaagcacaagtttctttacatggtccctgatcaattttaaacagtgggaacaccgggggcactgttaactggctttctggggcagcctctttagctgggggggctggtagtacagctacagcttcatcaaccttaagaacggagtgactctggagactcgagcatatgaaagaagttctgaatatatcaatctccaacaacatgccagtgattttaccagcaagagtagggtgcatggcttgaataagaggaaacagccgttcacccaacattggctttggctctggaggaggggcagatgccaacagggaagcagtcaaaggttcctgacctggtacatgaacagcaggctgtggcatggtaactgggggcggtgcataagatgtgctgaggatggcaaactccgtgcagcatatcatacggtggaacggtgcggacagcaggagtagctgcagcggctgacagctgacacggacgtggaccccatggtctgtgatagaatgtgtttagcaacacgctgtgttgcacatgactcggtggaactcggtgaaaaacgctggtccacatagctactaacagggggggtctaggagcacatggggcaggcaagcacggggcatattcggaatggatagaggtctggacccctgagcagtccaagcaggacatgggctcacctgaacaatgggcaagaggca

SEQ ID NO: 544356 - DNA, 2320 bp, Homo sapiens
aatcatgcggccccctcaacaattgcctcctggtctcgaggcctcccttggccaccgtactttggcctgaggagggttctgcctgggtctgagggccccagggaaaggctgatgagttggagggaagagatgtggggcttagagccaagcctgggttcagatccagccactagctgtgtgtctgtgggcaagttccccaacctctctgagcctcattgcctcacttgcaccacaggatagtaacgccctctcacagggtgtggcgggtcatagggatgaaagttcccgggcacacacaggcagggctgacccctttaggtcatcccactccccttggacatattcgagaaggctccctggagttggctgctccctgactcccccgtcccttccttgccctccaggagggcctggagagtgtgctgaagattctggtgaatcagctgagtgtggatgacgtcaacgtcctcacctgtgccacgggcacactctccaacctgacatgcaacaacagcaagaacaagacgctggtgacacagaacagcggtgtggaggctctcatccatgccatcctgcgtgctggtgacaaggacgacatcacggagcctgccgtctgcgctctgcgccacctcactagccgccaccctgaggccgagatggcccagaactctgtgcgtctcaactatggcatcccagccatcgtgaagctgctcaaccagcccaaccagtggccactggtcaaggcaaccatcggcttgatcaggaatctggccctgtgcccagccaaccatgccccgctgcaggaggcagcggtcatcccccgcctcgtccaactgctggtgaaggcccaccaggatgcccagcgccacgtagctgcaggcacacagcagccctacacggatggtgtgaggatggaggagattgtggagggctgcaccggagcactgcacatcctcgcccgggaccccatgaaccgcatggagatcttccggctcaacaccattcccctgtttgtgcagctcctgtactcgtcggtggagaacatccagcgcgtggctgccggggtgctgtgtgagctggcccaggacaaggaggcggccgacgccattgatgcagagggggcctcggccccactcatggagttgctgcactcccgcaacgagggcactgccacctacgctgctgccgtcctgttccgcatctccgaggacaagaacccagactaccggaagcgcgtgtccgtggagctcaccaactccctcttcaagcatgacccggctgcctgggaggctgcccagagcatgattcccatcaatgagccctatggagatgacttggatgccacctaccgccccatgtactccagcgatgtgccccttgacccgctggagatgcacatggacatggatggagactaccccatcgacacctacagcgacggcctcaggcccccgtaccccactgcagaccacatgctggcctaggcggcctggccccagtgcggttcctcatctgagaggctctccgtgcaggcgatggggcaagacagaaaagtgcctgagctggggaagccggggtgtaacttcctgctgcaccctgcgcctccagaggtcctccgtagggtctttcttgggatagtgttctgctcctgcttttctgtcctgggcatgggtccagggcctgacaccccctccccgcccctgtggccctggccactaaagcttcagactcaagtacccattctgttttcccccagcaacgcccctccaaacctccagcctccctgtctccagctgcctgggcccggaagggctttggttccttctctgggtctgattttctcactgaactccaccgaccaactgccctaagcccccagggcctccagggcccaggttcgagacccaaacccccaaaatccaaaacttctcttgaaaagttcagggaccgtccaggggagatggggaggagatatggagtgagtcacctgctccagaagatgccagcttctctctccagggtgcttagttggctttgcccacccctcactccccagggagctctggggacagcttcctcacacccctgtcccacccacacagctgccctagctgaccccgagaagtgctcttggctgacccctctggtgtgtggtgaggggctttctcttccccttcctgtttcagacccccccatttcccgcacatggtgtggggggctgggggaggtccaagcagagtgttttattattatcgctttatgtttttggttattggtttttttgtatagaccaaagcaaagaaaataaaaataacacaga

SEQ ID NO: 544357 - DNA, 3466 bp, Homo sapiens
aagctggtacggccggagatttaaggatcagagtcggagcagccgccgccgaccgcgccgagctcagttcgctgtccgcgccggctcccaccccggcccgaccccgacccggcccggtcaggccccatactcagtagccacgatggaggtgatgaacctgatggagcagcctatcaaggtgactgagtggcagcagacatacacctacgactcgggtatccactcgggcgccaacacctgcgtgccctccgtcagcagcaagggcatcatggaggaggatgaggcctgcgggcgccagtacacgctcaagaaaaccaccacttacacccagggggtgccccccagccaaggtgacctggagtaccagatgtccacaacagccagggccaaacgggtgcgggaggccatgtgccctggtgtgtcaggcgaggacagctcgcttctgctggccacccaggtggaggggcaggccaccaacctgcagcgactggccgagccgtcccagctgctcaagtcggccattgtgcatctcatcaactaccaggacgatgccgagctggccactcgcgccctgcccgagctcaccaaactgctcaacgacgaggacccggtggtggtgaccaaggcggccatgattgtgaaccagctgtcgaagaaggaggcgtcgcggcgggccctgatgggctcgccccagctggtggccgctgtcgtgcgtaccatgcagaataccagcgacctggacacagcccgctgcaccaccagcatcctgcacaacctctcccaccaccgggaggggctgctcgccatcttcaagtcgggtggcatccctgctctggtccgcatgctcagctcccctgtggagtcggtcctgttctatgccatcaccacgctgcacaacctgctcctgtaccaggagggcgccaagatggccgtgcgcctggccgacgggctgcaaaagatggtgcccctgctcaacaagaacaaccccaagttcctggccatcaccaccgactgcctgcagctcctggcctacggcaaccaggagagcaagctgatcatcctggccaatggtgggccccaggccctcgtgcagatcatgcgtaactacagttatgaaaagctgctctggaccaccagtcgtgtgctcaaggtgctatccgtgtgtcccagcaataagcctgccattgtggaggctggtgggatgcaggccctgggcaagcacctgaccagcaacagcccccgcctggtgcagaactgcctgtggaccctgcgcaacctctcagatgtggccaccaagcaggagggcctggagagtgtgctgaagattctggtgaatcagctgagtgtggatgacgtcaacgtcctcacctgtgccacgggcacactctccaacctgacatgcaacaacagcaagaacaagacgctggtgacacagaacagcggtgtggaggctctcatccatgccatcctgcgtgctggtgacaaggacgacatcacggagcctgccgtctgcgctctgcgccacctcactagccgccaccctgaggccgagatggcccagaactctgtgcgtctcaactatggcatcccagccatcgtgaagctgctcaaccagcccaaccagtggccactggtcaaggcaaccatcggcttgatcaggaatctggccctgtgcccagccaaccatgccccgctgcaggaggcagcggtcatcccccgcctcgtccaactgctggtgaaggcccaccaggatgcccagcgccacgtagctgcaggcacacagcagccctacacggatggtgtgaggatggaggagattgtggagggctgcaccggagcactgcacatcctcgcccgggaccccatgaaccgcatggagatcttccggctcaacaccattcccctgtttgtgcagctcctgtactcgtcggtggagaacatccagcgcgtggctgccggggtgctgtgtgagctggcccaggacaaggaggcggccgacgccattgatgcagagggggcctcggccccactcatggagttgctgcactcccgcaacgagggcactgccacctacgctgctgccgtcctgttccgcatctccgaggacaagaacccagactaccggaagcgcgtgtccgtggagctcaccaactccctcttcaagcatgacccggctgcctgggaggctgcccagagcatgattcccatcaatgagccctatggagatgacttggatgccacctaccgccccatgtactccagcgatgtgccccttgacccgctggagatgcacatggacatggatggagactaccccatcgacacctacagcgacggcctcaggcccccgtaccccactgcagaccacatgctggcctaggcggcctggccccagtgcggttcctcatctgagaggctctccgtgcaggcgatggggcaagacagaaaagtgcctgagctggggaagccggggtgtaacttcctgctgcaccctgcgcctccagaggtcctccgtagggtctttcttgggatagtgttctgctcctgcttttctgtcctgggcatgggtccagggcctgacaccccctccccgcccctgtggccctggccactaaagcttcagactcaagtacccattctgttttcccccagcaacgcccctccaaacctccagcctccctgtctccagctgcctgggcccggaagggctttggttccttctctgggtctgattttctcactgaactccaccgaccaactgccctaagcccccagggcctccagggcccaggttcgagacccaaacccccaaaatccaaaacttctcttgaaaagttcagggaccgtccaggggagatggggaggagatatggagtgagtcacctgctccagaagatgccagcttctctctccagggtgcttagttggctttgcccacccctcactccccagggagctctggggacagcttcctcacacccctgtcccacccacacagctgccctagctgaccccgagaagtgctcttggctgacccctctggtgtgtggtgaggggctttctcttccccttcctgtttcagacccccccatttcccgcacatggtgtggggggctgggggaggtccaagcagagtgttttattattatcgctttatgtttttggttattggtttttttgtatagaccaaagcaaagaaaataaaaataacacagatggaccacactgacacaaacaacccgagggccctacgcccggcggggcgaacaccgggcaatcgatggccatgggctacggggtcccgaccagttttggccacgtgcgcactgccggcgcccaaaggagcggctaatcgagacaggtccctgtgcagacacgcgaaccgcacaacgccccccacagcaaacaccaataccaccgcgaacgcgcttcacacgacctactaacacaaacaaccccccgacaa

SEQ ID NO: 544358 - DNA, 158 bp, Homo sapiens
actacatacttccgggggcacactattccactgtcacactattccgctgtcacactgccacactattccgatcacactattccccggcacactattcctgtcccactattccactgtcacactattcccaacacttcaagcactgcggaggaatgaag

SEQ ID NO: 544359 - DNA, 976 bp, Homo sapiens
  misc_feature (466)..(466): n is a, c, g, or t
  misc_feature (491)..(491): n is a, c, g, or t
agcggagtggtgggagagagggcccacatcccacgggaaaataccgaaggagatactctgtatatggggatcgcgtaaaccagtcctatatctgggcagagggagactgggtagtgagtatctctacgatactggaatagccacgaatatgggataacacgggtccgcgacatgggggcgcgttaataggcacgttgactccgttggaccctcatgggggaatatcatcactcaagacttcgaagggcacgtgagcggcgaagatgggacctaacaaaagttgctaagggtagcgatcggtgaatacttatatagcttaggtagagacagttgaatcagtcttatatgagggggagtgagcaaaaggagtttgtaaaggagtatagtcgtctattcctgtggtacatatgagacacaaatttgtggctatacaaggctcatcgctgctagagaatagagtaggagntcctcgctcatgggcgttggtcgtntcgtggatggaggctagggtgctagaagcaagagaagtcttgatccaatgtgaaaatggttcgagggtgatcttagtgggctcttgcgagaggtgaaagagcgtgaaatgtaaggggatggggagcttttaggcagtggggttaatcataatgcgcccttttgttgaaactcaatccgcgcttttccaatttgtcctatcgtgggaggcatgggtgtgtacgtattgggggtagacccatgggaaatgtgcaagtaaatctgttagctacagaatatactatggtgagcccatcagttgccccccactttctcccagggagagagcagccttgagtgtgggaggggctgatccatgattgctcccatgcgtcacacattgtgttcccttgggaggggcggctagggataatgggccccagcactgtgccagtcgaaattggtggcttgaccacaggaggcttaaatggggtaagcaagacgccag

SEQ ID NO: 544360 - DNA, 106 bp, Homo sapiens
catagctctccgctccgggcaacgtgtgcactaaatgctagttataccttagtaaaataagagtgtaggcaatataaaatgttacccatagagtaaattaaatagt

SEQ ID NO: 544361 - DNA, 363 bp, Homo sapiens
  misc_feature (53)..(53): n is a, c, g, or t
tctgtttattctttgcagtatctcccactgccctagatagcatctgcacatancgcacacttcagacacatttgtcgaagaggtcaggcgcggtggttcgcgccttgtaatccggcactttgggaggccaaggcgggtggatcaccttaggttaggagttcgagaccagcctggccaacatggtgaaaccatgtctctactaaaaatacaaaaagtagttgggcatggtggcatgtgcctgtaatcccagctacttgggaggctgtggcaggagagtcacttgaatctgggaggtggaggttgcagtgagccaagattgtgccactccactccagcctgggcaacagagtaagactctggctc

SEQ ID NO: 544362 - DNA, 296 bp, Homo sapiens
  misc_feature (27)..(27): n is a, c, g, or t
  misc_feature (32)..(32): n is a, c, g, or t
  misc_feature (37)..(37): n is a, c, g, or t
  misc_feature (102)..(102): n is a, c, g, or t
  misc_feature (185)..(185): n is a, c, g, or t
  misc_feature (194)..(194): n is a, c, g, or t
  misc_feature (210)..(210): n is a, c, g, or t
  misc_feature (216)..(218): n is a, c, g, or t
  misc_feature (220)..(220): n is a, c, g, or t
  misc_feature (231)..(231): n is a, c, g, or t
  misc_feature (241)..(241): n is a, c, g, or t
  misc_feature (248)..(248): n is a, c, g, or t
  misc_feature (260)..(260): n is a, c, g, or t
  misc_feature (267)..(267): n is a, c, g, or t
  misc_feature (270)..(270): n is a, c, g, or t
  misc_feature (273)..(273): n is a, c, g, or t
acaacatggcaaatctttttataaggnaaatngtganccctcctgctctatctcagtcgtcacacggtgaagcctcgagccctctccacatttctatttggntccattcgaggtgcagcccccgtggctgtggaacccggggcagcagtgcgctcacttctctcacccggcctcctgccccatcntgctgcctnctgctggggttcaaanacaagnnntntccttaagaangcgcctgcanggactgnttacctggtgangaggcgngantcngtggatacgtcctactgtaaaac

SEQ ID NO: 544363 - DNA, 158 bp, Homo sapiens
cgctggccacacattgactcaccctacacaactcacaacgggcctcacgcttgcggacgatgccaacgggtaaggaatagtcaaattgcgccagagcgatatctcagctcatgctatgtggtatctcaaactcgtctaactgaagagcaaaaaggtat

SEQ ID NO: 544364 - DNA, 190 bp, Homo sapiens
gtgctgttatttgtcagtcagtgttttaatctgacgcagcttatgcggaggagaatgtttcatgtacttatactaacattaggttctttctattagggtggatagatatggtcccaaattggggttgtgagggagtccagttatatgtttgggattttccaggtaggtgggtattgaaccggatagcttg

SEQ ID NO: 544365 - DNA, 883 bp, Homo sapiens
cacagtgcacatctgtaatcccagcactttggaggcagaggtgggtggatcacctgaggtcaggagttcgtgatcagtctggccaacatggggaaaccccgtctctattcaaaatacaaaacttagcggggcgtggtggcgggtgccctgtaatcccagctactgaggcaggctaaggcagaagaaccatttgaatcagagaggcggaggttgcagtgagccgagattgtgcaacgactccaagccttgcgtgacgagagtaacgatcctgtttcaaacaaccggaaatggtcacagtggttccttaaaaaatagagccagtaatatgctatctatttgtaaaaactcactttacaaagacagacacaggttagacgtcaaaggtatgggaaaaacataccatgccaaaataatcaaaagaacagtagagtagctatgtaatctacagacaaagcagtttcaaaataaggaaacataaaaaccatttcagacacaaggctcagagttgcatacacaaaatattgttgaggcaaaaatggagtccaagagtacagacaaatcagtattataatgggagactcacacctcttataggtagctgacacaccccagtcagtagcaatccaatgagcattagtcgagctgacaggcatcaacatccagtggttcgcgcttatagtatttttcctccagaggcggcaaaactatcctctcaattcaaaggacttccaaggagacatactgggctaaataaccgctaaattacggcagacacacagttggctcccacgagtcgtttcagcacgagacggtgacccatggggaaaccccaatcagcggcccagtctgccgagccctcttcgccccgttgtcggcaataccc

SEQ ID NO: 544366 - DNA, 192 bp, Homo sapiens
gaggctcagtctaggcttcactatacttacagtatctccccactcttcaacccaagtacagtgctgaaattcttggtcctggttacatgcctcatgtctttgggttgattgtttttccttggttcacaaaaaattaaaatcagggaacatctcttgtattggcctaggttccctcagtgtccatggtcactt

SEQ ID NO: 544367 - DNA, 258 bp, Homo sapiens
ttcccaaatgaaggaagtaattagaaaaaattcctccagttttatgtgatggccagtaaaggaagagagaccccagaaaagatagaacgggaagggcaaatgggaaggaaggagagtatgccccagagatgatgacgcaaaaaaagagagtgaagaaaagatgaacatggacccatccccccccacacacacattttgattttatggaaaacctgctttgtaaaattaaagtttgtcttttgttgtttttcccctgta

SEQ ID NO: 544368 - DNA, 299 bp, Homo sapiens
aggaccaagaaaccacctgcccaacccagggtgggaaatccacttaaagttgttcctgaactacaaacaataacatgagcgacctgtgccttaaggacatgttcctgctgcagataactagccagagcccatccctttgtttcagcccatcgctttgtttcctgttttagttaatctatgatctatagaaacaatgcttatcactggcttgctgtcaataaatatgtgggcaaaactctgtttgaggttcacagctccgaaggctgtgagtcccctgatttcccactccacacactaaa

SEQ ID NO: 544369 - DNA, 111 bp, Homo sapiens
ttcaagaggagccggggcaacatagagagaccgggtctccacaaaaggtaaaaaaaattacccaggcaggcgggcacacatctctaattccagtggcgggtcccgcggggg

SEQ ID NO: 544370 - DNA, 342 bp, Homo sapiens
caggctacgtttatccatatggtgtgaaaaattcatactcatctttctttaaccgaaagtgtctagatctcaatgtggctcaggttcacatcattctcctcaaataagcgcaatcctttgggattccagttgtctccaatatagcttgtttcctgtccaaagtcagaaagtttcctgcccaagcttgggttttccaggaccccagtgcacatgctggctccccggaagtgaggtctggcgctttttaggcgcctcaggtacaggcaggtttgcacacagcacgtgggtctaaaggttttaacctcgctctagagaggagaagagagtcacagagtgtgtctc

SEQ ID NO: 544371 - DNA, 209 bp, Homo sapiens
tgtcttaaggttataaaagtataaatccagactaaagacacaattatctttatttgtataactttttaatgactaagactaacactgttagtttaatcaaaattgctgtatcttctgtgttatcagcaaaatacccctatatttaagtttctcaggtgaaaacctgatactcataggctatacaaatgggggaaaagggaaataacttg

SEQ ID NO: 544372 - DNA, 272 bp, Homo sapiens
cccccccccccccttgggtggggggggtgggtttttggggggtggggtcgggggaataagggctgcggtttgttttcctgggggggccccccccccttttggagatttttggcccccccccctggggggggatgggcccattttttaaagggaaataatcccgctttggggggggggggggtcccggggggccccccctttttttccggggggggtttttttaaaagcccgggggggggcccccccttttttttaaggggtttgggtccgga

SEQ ID NO: 544373 - DNA, 102 bp, Homo sapiens
cacatatgcttttgaccaggaggtgctcacggtactacagttcaagcacaaggccagcagggcacgcgcatggagccccatgcagtctggacactgacgtgg

SEQ ID NO: 544374 - DNA, 297 bp, Homo sapiens
tgggcgggtataatatagataatagttgtgatgaaattgatgagacccaaaaccctaattacgtaataacatgtactgctgttagtcttccccatagatgtcattcttcttgcgcttcatttctttatgttcttcccttgtgttttgatgatcttctttagcagtatgtctgtgttcccttctttttggtttttgtaatttgtggtgaccacggacttcatacatgttgacctctatgaacatgccttaagctggttcaaacacattctaaaagagctctattttttgctcccctcc

SEQ ID NO: 544375 - DNA, 956 bp, Homo sapiens
  misc_feature (1)..(1): n is a, c, g, or t
  misc_feature (342)..(342): n is a, c, g, or t
ncacccatgtcgtagcgccaaagttgccgccccgcaaaaaaaacgtcgtgggtaagagaaacaccgtttgcgtttagtgggccccccccgtgaggtgtccgcttcccgctgtgacagcatcttaagccctctcgtgggacgctccccgttcctccccagagggggccgccccctttgcaagactctcaggaagaggcggtttataagagctaagagccatataataccgctggtacatgaacagaatttacataaccccggtgcaaagctgcctcacgttttcagcccccccaaacaaaaacccactcccctctggttttgcaattcacagactcacactgncccctattataaccccaacggtcattaccattgatcactagaggtcccccacgctattcaagaattcttagggccccgcgactgggttgccaccacttctccagaattcaatggtccccccttactgttacaaagtgattttatttatagacacaatttggtaacagagccaactatcattcagtgggtatacattttgtgtatgaagtataaaaacgatgtttcttccgcccgctcttccacacctttttccacagatttattatccagagccacacacatcagctttttaaatattgaccaccacttacatgcccactctctgcaaatatctccacacacagtgtacccctcctcacacattattaatcaaggtgtttccttttaaaccccccctccttacagaacaccacacagcgggtacaatgcagccgtgtacttcttcatttgcgagaggagacccacttttagcaaccacacattcacagtagtttatacatgaccgcggcgaataatacacccacacacactgttcaaattataaaatcatcggttactcacccgcacatcaaaataacctttaaaaaacaaccccccaaccaaacaaacaaaac

SEQ ID NO: 544376 - DNA, 158 bp, Homo sapiens
cccccgggggggcccccctttaatttcccggcccttgggtttttaccccgggcccccctgttggggggctttgggggcccaaacccccatttggggggggggccccccccgggtaggttttttgccggtttttgggcctttttccccgttttagaaga

SEQ ID NO: 544377 - DNA, 572 bp, Homo sapiens
tgctctcaaataaaagacatcacagcaactggtacttagatttgagttaataaatggtgtagttgagatacacatctgtaatgatttcagtaatataatgatggtgatagcaacttttatgtaaccacaagtaatatatcaaagctccattctgattggaacagaccagcagattatgcatccaaaggactgactcttacagtcttactttcgccacttagtacgaccgagatgaaccatacaatgagaatggtaatacacgcttctactcagtgtctataaatgatgaagacctaacatactgcttatactggaacatcattctgacactcctaactggaacgcactgtcacaggacatacagcttgagaatcccccttcaacacaatatacaatactacatgtttgcccacgcgtgctaccaataaccacaacattttacaaaagtcactacacacaagctacaactttctgggtcaaaacgtcacattcttcattacacatcaagcattcgccttcacagttcgacgccaaaggctaactgtgccattccaacactagcgggtcgccac

SEQ ID NO: 544378 - DNA, 117 bp, Homo sapiens
atccatacggaaagtcttctgctggtgggtgctcttcttcccctggatgtaaatgtttactttgtaaccaaacaactgtgaggcaatctagagagttagcgagcctcactttagttt

SEQ ID NO: 544379 - DNA, 117 bp, Homo sapiens
  misc_feature (11)..(12): n is a, c, g, or t
ggccaggcacnnggtcctattttgctcactgttgctgtgtgggaaagagctagtacagcagactgtcgcaagcttggctcttggctgcatctgggaacttggaatttaggcggccgc

SEQ ID NO: 544380 - DNA, 247 bp, Homo sapiens
gtctatagccattgctgcgtgacgcctatggaagcttttcatgcctcagcagagagaaaagtcaacaagtggtctgcccatggtgaggaaaggaagttacaataacaagttcaacgacagaggagagacaggaaaaaagcaacaaaccacagattctgaattgttggtctacaaaataaaagtctaatttctccatcagtcccaggtaaataccaacttagctgctattgaaacttctaaaactagg

SEQ ID NO: 544381 - DNA, 427 bp, Homo sapiens
caccgggtcaggagggatgtgtagtgatgcatcttgtgtcatgcaagctccgcctacccaggtcaagtgattctcccacctcagagctcctgagtagtcaggagtataagcatatacaccacgaaagggtaatttgtccatttttagtagagatggaggtctcgcctgtgttgcccaggttggtctcaaactcctgagctcaagcaatcctctggtcccgtcctcccaaagtgctgggatgacggatatgcgttactgagccaggccgaaacgatttctagatgatttgtatgatgcttttatcggattagagtacaacgatacggttgggttttgaaatagactttattttgtgagagctattttaggtttacagcaaaatcgagcggtaagaacagaaagttcccatacacctccctgcaagcca

SEQ ID NO: 544382 - DNA, 989 bp, Homo sapiens
  misc_feature (989)..(989): n is a, c, g, or t
tgagtgaccccttcaagtaactacgttttgttctgccctttgtttgtttttgagatggagtctcgctctttcgcccaggccggagtgcaatggcgcgatctcggctcactgcagcctccatctcccaggttcaagcgattctcctgcctcggcctccccagtagttgggattacaggcgcccaccaccacgccctgctaattttgtatttttagtagagacggggtttcgccatgttggccaggctagtctcgaactcctgtatctgcctgttctgtattcatcttgtgttgttgtttccctgcatgcatttgtggtctcattcattgatgacttctattcgcaatgcccggtcaaaggctacgcgatacagatcccaacaacggacagcttactgtttaaaagtgtaagtccgaagtgagaaagtcagaccactcagaatccttgacaccaccattaggggcacaatgtgacttttgaacaagtcagctattcatagcttcttcgccgcctccgtccgcttcatttgtaaagtgaggtacacacatcgcgcccgactcactgacatatgtctgtgacacgttgctgtggcagaacgcccatacatatcactcctcactctgcgcacgaagtcggccgcactaccgtcgggacgggccccggggaacgatgcatgccaacacatggtaggacgtcgacgcgaaagccgccgaagcaaagcgcacgagactaacccgggcaccagaacagcggacacacgctgagtgcaggacacggccgtcacgcggaccgaaggcgcccaaccaacgaccaaggagcgcgcttcaacgaccacgaggtaaccaacggaagggacagctccccacacacacagcgacacaggagcagaagagccaaaagcccgacgacggaacgagagacacgaacaagagacgcaccgaagaacaggagacaaacaacacgaccgagaagccgctcgacccgcatccn

SEQ ID NO: 544383 - DNA, 147 bp, Homo sapiens
gagtcgtaccgtctgagcagctgggaagtcacagtatcagatcccgtggacgtggacaggcgggcaggcagagccacaggaaatagcagccacccgggtagcccgagggcaggtgctgcgtcagacagtttgtcctatgcaactctg

SEQ ID NO: 544384 - DNA, 293 bp, Homo sapiens
gcatgttagaagttaatagacggaatgcttgatggcttcttatagtatttagtgagaagtctatagtttgttcgggggagttaggtattataggtactatgtgtgagtgtgagtgtgtttgtgtgtactcgattttaaaactatttcttgagttctttagaccataagaacatagtgtataatagtaaagacttatttcaatttatttgaactttttccaaaagtgacatagattggccaggtgcagtgggtcacacctgtagtcccacactttgaaccggcggtgcggcgtg

SEQ ID NO: 544385 - DNA, 795 bp, Homo sapiens
tggatggagtctcgctctgtcaccaggctggagtgcagtagcacaatcacggctcactgcaatctctgcctcccggtttcaagtgattctgctgtctcagcctcccaagtagctgggactacaggcatgcgccaccacgcccagctaattttggtattttaagtagagacggggtttcaccatgtgggtcaggatggtctccatctcttgactttgtggatccacctggcctcgggcctcccaaagtggctggggattacagggcttgagccattggcacccagccttgaattttaaatttaatctctggatatacttcattaagtggtcgggagaacctaattatcctaaaagaatcatacatttttctacctatgaatttggcgtgcatacagaaaaggtgccctttcctcaggaagtttgcgtggtgttccatttcttgggatggactcttatctagaatacttagcagttctgcaaagaaacggtttttaaaaatggggaacttctactttggaaaagtccccatttttggtggccaactatgattagtggagaggaagaaatcttattctagggcatatgtttggacagggtgtaaagattctttggaaaggtttattcactttgtcgaaccagaaatgacttttttacagtattttttgggtaaagcaaactatttggtggccttgaaatggggcatatgggtactagtgaaactattgtcaagggtgaacttctacctctgatatctaaagtgtataccaatccacttgtaagtgctataaactattg

SEQ ID NO: 544386 - DNA, 257 bp, Homo sapiens
tagaggatccggtgttccctttgtctctactaaaaatacaaaaattagttgggcgtggccaggcacggtggctcacgcctgtactcccagcactttgggagatgaaggcgaatggatcacctaaggtcaggagttcaagaccagcctggccaacatgatgaaatctcgtctctactaaaaatacaaaaattagtcaggcgtggtggcgtgtgacttagacccgagctaaagggacactgaggaaaggaagctgaggc

SEQ ID NO: 544387 - DNA, 597 bp, Homo sapiens
gcacgagatatcacggcatgtccttagcgctgagcaggtatgacttcacaagcacatttgcttgtgccctcccctcccttaatgatcttattcgtttctgtaattttatattttttttacatacattcattaatcatccgtagcatacatacccgcacaatgtcgttattgtttcaaattttgctttatcctcccttcaacagaacgtgaagggggaatttctatggctttggaaaccgttcctattcttgcctatcccttccagcgcctgtcaaaccccgcctaaacagtactacctctttgggtaatggaaaggatatttcaccttgcaatggccaggtagggaaaaaaagaaaaaaaaaaacctttcttcttcttggtattttgactaggaggccatcatgaaatagtcacagaaacaacaaatttattgtcttggcttgcgatccacattgataattactttctcggcacttgcggcgcacacatgcagccggacggcagcaagattttcaaaacccaagcaaccgatactcaacacaatggagcccaacaaattggagtaatgaccttattgggtaatcaatattcccaaaa

SEQ ID NO: 544388 - DNA, 198 bp, Homo sapiens
tttattacactcattgcgtacaattgatcatagtattgtctgactttttattttctactatggttcctttagcagaacacgtaacttttgtgcatatattgaagtggtttttcagctatgaattctttatggtagaaatttatttagcaaatgtgaattcttttgagaatgtctgacgtttggctgaaattgactgtg

SEQ ID NO: 544389 - DNA, 158 bp, Homo sapiens
  misc_feature (130)..(131): n is a, c, g, or t
gggttatgttgtcatgtgtggtgagtgagcccattgtgttgtggtaatatgtagaggagtatagggctgtgactagtatgttgagccctgtaagtagggagagtgatatttgatcagggagaacgtgctnnactagcacatgagagttctcctaagta

SEQ ID NO: 544390 - DNA, 573 bp, Homo sapiens
  misc_feature (292)..(292): n is a, c, g, or t
caggggcaaaagccggagtggacgtgtctttgggaaactgctgctctttcacttctcaggcggtcaccgagagctcagcaccccaggctggaaactcttgtaccattgggcaacgactgggaagctggatgcatctgtgtgaccatgtttttcccaaaagtcctggggaggcaatcagctggccttttccagaaactttaccccaaaaatcgttggtgttgtggcgcacacggaacacccacttttgtgggactttccgtgggaacacaatctcccaaaaaaaacacgctgnggacttcaacgacttgcgcacttgcaaggcgatagaccttggggaaaccgcctttaaagacgcacacacagagacctccaagggccaacttaaagggaaaaaggcttccaaaccaggtcaatgaaaaaccaaggaaatgggcttttcttacacgaggacctatgtgtgcgaaataacatgaaggaaaattccccctagctggaacaaggaagaacctttttttccaaggaacgttcaacggacgaggtgcaacacactgttggtttgggcccaattttcta

SEQ ID NO: 544391 - DNA, 333 bp, Homo sapiens
acatctagcagcacttcagagacgacatcgcacaaggtggctcgaacgattctggtggaagaacgtgaagattattgtccttatctgcgtgattgtatttatcatcatcctcttcattgtgctcttagccactggtgcctatctcttacgtaacagggaacctctcccacctgcccttctacttcagggacaaccctccatcaatgtgtgccacgagggtctcctttcctgtcttcctactactgagaatgctgctacggacctcctacccctaattacccgaggccctgctgccatattgtaagccccgatagggggaccctctcagagtcg

SEQ ID NO: 544392 - DNA, 355 bp, Homo sapiens
aactatactaggcacctccaggtatctatcatagagactctgaactgtaaaccaggtataaagccaattaactttattcatttcaatttgaatctaagtaccttcattgtatataatactaacacttaagagaaaatgacaaaaaaataaatgtgccagggcaactgactacttcctatcataatatatgtttttacctttagagagattaaaataagacaaaaaaatgatgagagaagtagctactatccatttttatcatcatgttccacttggcaaggcattaataaaaaattatttcacaaggcccacaactatctggtatttgaggcctgatagaaaactaaattatatt

SEQ ID NO: 544393 - DNA, 198 bp, Homo sapiens
gctagctcctcgatatttgccacatcacttcccttgccttcattcgggaccggcccttctgcttctctggcttgtatcgttgtgtgcacgtcatcaaacagcttctgattcatttgcataaacaagttcaggccattatagatcagtccatggattgtcttgttccagtggactcttggcgtccgtgtagagatgcag

SEQ ID NO: 544394 - DNA, 105 bp, Homo sapiens
  misc_feature (6)..(6): n is a, c, g, or t
  misc_feature (81)..(81): n is a, c, g, or t
gcccanacccactccaccttaccaccagacaaccttagccagaccatttacccgtattcagtataggcgatagagattganacctggcgcaatagatatagtacc

SEQ ID NO: 544395 - DNA, 136 bp, Homo sapiens
tacatgtaatctgacactaaaatatgaacttagtctaacataagttactgttatagctgtaaaatttcaggcagagccatacacattagtacagcagtgtcgcacttgatactgaaacctaagcctgtaaaatcct

SEQ ID NO: 544396 - DNA, 104 bp, Homo sapiens
  misc_feature (86)..(86): n is a, c, g, or t
tctgactcagtggttacgaatactactaggaacatgaggttgtgggtcagtccctggcttgctcagagggtaaggatccagcattncatgagctgtggtgtagg

SEQ ID NO: 544397 - DNA, 201 bp, Homo sapiens
aaaacccttacgggaaagaccatcaccctcgaggatgaaccctcggatacgatagaaatgtaaggccaagatccaggataaggaaggattcctcctgatcagcagagacttatcttttgctggcaagcagcttgaagatggacgtactttgtctgactacaatattcaaagagtctactcttcatctgtgttgagacttcg

SEQ ID NO: 544398 - DNA, 813 bp, Homo sapiens
gcacattcaaagctgccctggaccacaggttggacaagcttgggctagagccagaggccatgggagacaggatgcagggcagggagtagggcctctgccagaactccttaagccaggtgccatgctcacctgtaatcccagcactttgggtaggccaaggggtgggaggatcacctgaggctaggagttccagaacttgtctgtttagttagtctctattgcccaggctggaatgcctctcaggttcaagcaattctcatgcctcagcctcccaggcagctgtggttacaggcatgcgccaccacacccagctaatttttgcatttttcatagagacgggtttcgccatgttggccaggctggtctcgaactcctggcctcaagtaatccaccctcctcggccttttaaagtgttgggattacaggcgtgagccaccctgcctggtcagaagaccccgtctcaacaaaaatgtgaaaaaattggctggatgtagagcacacctgtagtcatagctgctcacgaggctgaggtgggaggatcgcttgggcccgggacttcgaggctgcagtgaggcgtgatggcactgctatactctagcctgggcaacagagtgagaccctgtctcataaagagaaaagacaaatttgctcctcttttagctcagccaagagatgctgtttatctagaagcttccccttggttgtctccattcttcctgggtgaattctccctctctgtttcagcagcactgtagtgatgattcctcctgtcccattctttccagcctcatggcactatttaggtaaccagag

SEQ ID NO: 544399 - DNA, 117 bp, Homo sapiens
cgggaagtagtccaaaaaaaaaagaacctggaatctcacttttaattatatccatatatcttgcagatgaatatggccttgagtcaacgctacgatctatagctagaacacttactg

SEQ ID NO: 544400 - DNA, 589 bp, Homo sapiens
gtgagaattaaactgaatcccatcagtgttaagtgagcaagatcggtgacgtcagcgatgggttgtggttggtggggatgggcagagactcagctccactgttgcaggcctagagcctagagcagaaagaagggcaatgggaatgggacaaagaagaaatgggagagacgttgttaagctttggatatatttatttacaaaaaccttgaatttaaaaactttgttgctttatttcaaaagtatttcttttaacacaaaagaaatgtgttcattccagacaaattacaaaataaatgaggcaaataaaaaaagatcagcacaatctcatcacccagagagagccatcatcttccagaggttttctctgcatattcaagtagtccacaaacgttttataaattagggaacatattcttctccaagctactagttactatttttttattctaacaagctgttccagctgtctttctgtgtaaaaaaaaggctatattttcaccccaattctaaaaggttgcatattatatcaccatgtggtcgggccactctatttgaattctgcattgaaaggcaggataatgaacatgga

SEQ ID NO: 544401 - DNA, 159 bp, Homo sapiens
ggctataccgtttgcagtagacgggcaggtaatgaagagagtgtaaatagccaatctgcataaacaggccttgtcccaggtgcatgattcgcaggtcagcctatttccaggtgaagtgcttacttgctataaggagagctacttggggcaatcaagagg

SEQ ID NO: 544402 - DNA, 107 bp, Homo sapiens
gggaaactacattacagaacgggtcctttactacactggcagacttgcaaagatgcatgaggtgaaggtaaagatggggttggtgctgtcatgggttccatgggact

SEQ ID NO: 544403 - DNA, 324 bp, Homo sapiens
ggtgtacgactgcacacaagtagagctttatcaaaaacaacgatactatttttatctccatctgtctgactcctgcatctgccactcaactagctctgaactcaggtagaaattaaggagaataagtcaattccaatattacataaaactgagtaccatttttacacattttcagttattttatccaccaaaactttaggttatggtaaaaaatcgtatcaagttcccttacctgctgttgatcttgtaatgcattttgagctgtgtccaaatgattttgaagatctgctctttgagcagtttttgctgcttctgctgatagtc

SEQ ID NO: 544404 - DNA, 298 bp, Homo sapiens
cccccgtttttttcccaaccccctttccttttgccgggggcccccagatttttccctttaacccagaacccggctttttcccccccccccttttccgggggcccttggttccctccccccccccccccccgggcccccggtttgaaaaatggggggggggaaggggaaagggtggggccccccccccccccccccttaaagggccccccctttttgggccccccccctaaaggggggccgggctggggggggcccccactttttttttctttgggccaaaaaaccgtttttgccccga

SEQ ID NO: 544405 - DNA, 351 bp, Homo sapiens
aggcaatgatctctaagctcttccaagtataacggatcgcgcctaccgatgaaaatcagcggtagatttaacacgacatccagtgcattgtcttctcaaattcatctgaacagccgccggagctagaataacccgaaacacttcgaaaaagaaaataggaggcctcatcagtgtaccgtgataacaaagcttatgatatagctatagtaatccagacaatatattatcagctgggggacatacacagatcaatgaaataggagtagaaaatgcaaaaacagatgaacagatatgtccaagtgatttttgagagaggtgcaaaaaaaattcatggagaaaaaataggcttct

SEQ ID NO: 544406 - DNA, 213 bp, Homo sapiens
atactatcagatatccagtgtgtccattctggcagtggttttgagtaacttcatggaacttggacatataccacctggtcctacatgggtatgcataaacttgttgagaacatctgctacacctaaattgtgactgataatcaggatgctgcgatgtcactgagactaatctagtacggtgtttctcagacccagcctatgctcctcacctgg

SEQ ID NO: 544407 - DNA, 826 bp, Homo sapiens
aaaagaagttgtttttattttaattcaagagggttggaaacttaaaaacagtacatttctccttgcagaaaattaccccatttaaattactattgggtacagagattatttattacactgcatttaggcaatttctaacattaagtgacaagttatactttggatttttttttccacttgggagctattcatgattggccactctaataataccaaagctactgaactcaccaatttttttcttagtatttaaaaaaaagcacacagaaattattataactacaattagattaacttttatcaaaagtaactctttcagaccaaaattccagtaaaaccacccacctcccttcagattataagcaaattaattcttgcctcttttctaacaaggtgcagattattcctctgtatccctttaatttctcaaactgagtccccgaagtgaagcaaacctttcttctccattttttccccttcagagatttgggtgaaggcaggtttctcttaccacccatggtggaaaggtctccaccaccttgaatttccttgactgagcaaatcttctgcgaaagaaaccaaagtagcccagggtgtagccaattatttggcactggcggaattgttgacatttatccccctctcgggggcatatttgttccccggatgttgttttgggactctattttaaagtcccctttatacaacccctttgtgttcttaaaagaaagagatgtagtccaaaatcgtgtatacatgttcaacgctaaagatagagctattgataaggggggatgtaaaaattatcccccttaaaagaagtctc

SEQ ID NO: 544408 - DNA, 517 bp, Homo sapiens
ggcagttaaaataaatgtttgtgcactgttggtggcattgtaaaatggtgcatactttctgggaaacagtatgatggttcctcaaaaaaataaaaatagaactatcatatgatccagcaaccccacttctgagtatacattgaaaaaaattgaaagcagaaactcaaacaaatatttgtacatccatgttcattaacagcacaattcacaatagccaagaggtaggtggaagcaacctaaatgtccattgacagatgaatgaataaaccaaatgtatatacatatagtggaatattatgcacccttaaaaaagggaaaacaggaaagaaatcctgtcatatgccacaacggggctgaagcttgatgacattatgttacctgaaataagccaatcacaaacaaaaatacaaatcaacatatatgtatgattccacatatatggagtacctaaagtagtcaaatccatagaaacacaaagtagaattctgattaccagagcttgggggcagagggaaaa

SEQ ID NO: 544409 - DNA, 248 bp, Homo sapiens
  misc_feature (134)..(134): n is a, c, g, or t
  misc_feature (142)..(142): n is a, c, g, or t
ctacccattggggtcagaggacgagcataaagcctgcaaattgaccctccttggatttccactaaataggagaatgcttggaaaggggagacaaaatagagatatatttccagccaaggaatactctttcttgnggttaagnaattatggcaattatgctaggatgtggagcaggatgcaccattggggaatagcatttccagtgattccaaagacatatacagattccacctatccctttccccaag

SEQ ID NO: 544410 - DNA, 306 bp, Homo sapiens
  misc_feature (74)..(74): n is a, c, g, or t
  misc_feature (76)..(76): n is a, c, g, or t
aaggttttagaaaaatccagcaaggctgggtgcagtgacttcccccttttggaagccgaggcgggtggatccananaggtaggagttcaagacccagctggccaacatgggtaaaccccctttctactaaaaatataaaaattagccgggtgtggtggggtgtgcctgtaatcccagctacttaggaggctgaagcaggagaatcgcttgaacccaggaggcagaggttgcagtgagccaagattgtgccactgcactccacactccagcctggcgacaaagtgagactgtctcaaaaaaaaaaaa

SEQ ID NO: 544411 - DNA, 570 bp, Homo sapiens
ggcgcatctggccatcaccgcgcggcctgctgcagcgggacaccgtgctgtacctggcctgctggcgcccggccaccggggcggaccgctggaaccctgatggccatgtcccatgaaaagatgttcatttgtgttgtcgttggggacaacatatccttccctcccaagccctggatatcctgtgggtgggccccaggccaacccattgccccaccttagtgctcagcctcccatacccttggtgggccccgttacccacaggcaccgcgcttattccagaggccctcgccccacagaacaggggaccatgccacacgggagaatacccgcgcacaagagcgacgcagagaggccgcgcgaaagcccacacaaagagggggagaataacgccgcagcaggtgaactcagccacaacgcgcaacaaaggggagccaaccaagcgaccccaacaaggcgaacccacacaaaacacccgacagcggcaagaggggcaagagcgcccaacaaggggagcccacgaaagaacggcccacaaaaggagggcggcgcgtcaaccgcacaaaggcgaga

SEQ ID NO: 544412 - DNA, 767 bp, Homo sapiens
tacagataaacattttaatggattaaatatattactttcaagaatcttttggaaatccccctgtggcgggactaatcaacagccaagggcaataaaaaagttaaaaccaaaaatattctgacttgaacacttgacagggaaccggctggctatgtaaagtaacatacagtgggtcccaaagaacaagggatatttttaaggaagataattcatcttaacattggtgcaagggacacatttggtaatacaagggctgggaaagaaatatatataaacgtggccggcttttaaaaagtttatttcacatttcaaatacagtatttttctcataaaaaaaaatatccagggaatgggcctaaaccccagtgggtgttctaataccattatggtcactatggaaacgactggacaagagacgcttggacaaatggtgcctgggatggttcaaccagttatggaacacttatatcgaagctggggactcacttgctggaaatcaaaacatttctacaaaacacaaaacaacacaacacccacacaacaacacagacaaccaaccaacaaaccacaccacgcggcggccgcgacgcacacaacaaagaaacgacaaccccgaacgaagaggggcccccaccacatagacgccaacgataccaccgcagactccgatcgacaacacagagggccggcccaaaagggagagaacgcgaaaaataaaacaccaggaacgacagcggtgagcaacaaggcgccggcgtgtgacaaac

SEQ ID NO: 544413 - DNA, 250 bp, Homo sapiens
  misc_feature (35)..(35): n is a, c, g, or t
atcgtttattcttttttcttttgggaagacagggnttgttgctcaggcgggagtgtgcggtgatgtgatcatagctcacggtagctgcaatctcccgggcacaagcaatccctccgcctcagcctcctgagtagctgggactacaggtgtgtgccaccatgtccaactaattttttttatttttagtagaggtaaggtctctctatgtggcccaggcggatctggtgctatggaaacttctaaaactagg

SEQ ID NO: 544414 - DNA, 295 bp, Homo sapiens
tcgatacgacagtttcatattattttttatgttatatgagacagcatcttgctctgtcgcataggctggagtgtagtgctcacggcagccttcctccagggcttaagtgatcctcttccctaagcttcctgagtagctgggaccacagccgtgcaccaccatgccctgctaattttttgtagatacgagattttgctgtgttacccaggctggtctcgaactcctgagctcaagcaatcctccctcctcagcctcccaaagtgctgggattacaggtgtgagccaccgcccttgg

SEQ ID NO: 544415 - DNA, 187 bp, Homo sapiens
tgacttagaggatcccaagctccaacaagagtactacaatcttcccatgcacagatgattaatacagatcttagcagaatcttgaaaggcccagagatcaaagagcctttgagcacacgcaagaagatcatcgcagagtcctaaagaagaaccactgaaaatacttgagaatctttgttgggagctt

SEQ ID NO: 544416 - DNA, 405 bp, Homo sapiens
cctagactgcatctatagcacagtctacgcggaggtgagtgtatcggtgtgtctaccctgtggaaatatcgcaacatggctcgacaacacctagcgggatcaacactcactgaggacaaatgcatccacaacccgagtatctcgctgagaggcctgacattgaatacaggcagtatacgactgagctcatgagctagggactctgtgtcgcggagcgtcaaggcatggagaatgaatctgtagtgatgcactacggatgtagagagatgtcaaggaagcagactggagtaagacgactgagtcagcattacgcgagacgttactcagtatcacggaacgcatgaggtgtctgagcgatgattgagacactggcgtaaatgctgcgctattcaatgctcacggcgg

SEQ ID NO: 544417 - DNA, 772 bp, Homo sapiens
  misc_feature (37)..(37): n is a, c, g, or t
  misc_feature (61)..(61): n is a, c, g, or t
  misc_feature (80)..(80): n is a, c, g, or t
  misc_feature (140)..(140): n is a, c, g, or t
  misc_feature (161)..(161): n is a, c, g, or t
  misc_feature (219)..(219): n is a, c, g, or t
  misc_feature (223)..(223): n is a, c, g, or t
  misc_feature (225)..(225): n is a, c, g, or t
  misc_feature (229)..(229): n is a, c, g, or t
  misc_feature (231)..(231): n is a, c, g, or t
  misc_feature (234)..(234): n is a, c, g, or t
  misc_feature (253)..(253): n is a, c, g, or t
  misc_feature (259)..(259): n is a, c, g, or t
  misc_feature (261)..(261): n is a, c, g, or t
  misc_feature (270)..(270): n is a, c, g, or t
  misc_feature (280)..(280): n is a, c, g, or t
  misc_feature (286)..(286): n is a, c, g, or t
  misc_feature (306)..(306): n is a, c, g, or t
  misc_feature (310)..(310): n is a, c, g, or t
  misc_feature (318)..(318): n is a, c, g, or t
  misc_feature (337)..(337): n is a, c, g, or t
  misc_feature (342)..(342): n is a, c, g, or t
  misc_feature (349)..(349): n is a, c, g, or t
  misc_feature (382)..(382): n is a, c, g, or t
  misc_feature (384)..(384): n is a, c, g, or t
  misc_feature (398)..(398): n is a, c, g, or t
  misc_feature (421)..(421): n is a, c, g, or t
  misc_feature (423)..(423): n is a, c, g, or t
  misc_feature (434)..(434): n is a, c, g, or t
  misc_feature (439)..(439): n is a, c, g, or t
  misc_feature (441)..(441): n is a, c, g, or t
  misc_feature (452)..(452): n is a, c, g, or t
  misc_feature (462)..(462): n is a, c, g, or t
  misc_feature (467)..(467): n is a, c, g, or t
  misc_feature (474)..(474): n is a, c, g, or t
  misc_feature (478)..(478): n is a, c, g, or t
  misc_feature (484)..(484): n is a, c, g, or t
  misc_feature (488)..(488): n is a, c, g, or t
  misc_feature (515)..(515): n is a, c, g, or t
  misc_feature (557)..(557): n is a, c, g, or t
  misc_feature (561)..(561): n is a, c, g, or t
  misc_feature (563)..(563): n is a, c, g, or t
  misc_feature (581)..(581): n is a, c, g, or t
  misc_feature (595)..(595): n is a, c, g, or t
  misc_feature (605)..(605): n is a, c, g, or t
  misc_feature (615)..(615): n is a, c, g, or t
  misc_feature (678)..(678): n is a, c, g, or t
  misc_feature (751)..(751): n is a, c, g, or t
agttggcgggagccacggtcgctgggcggtgtctttnagggagggggcggacacgtctctngacatcctgagcccaagtnccccacactcagtgcagttatgagtgcggaagttaaggtgacagggcagaaccaggagcnatttctgctcctagccaagtnggccaagggggcagcgctggccacactcatccatcaggtgctggaggcccctggtgtntacntntttngnganctgctggacatgcccaatnttagananctggctganagttactttncctctnccttccggctgctcacagtntttncttattgnacatacgctgactacttanctgangcccggnatcttcctccactaacagaggctcagaagaatnancttcgacacctctnagttgttaccctggctgctaaantnaagtgtattcnatatncngttttgctggnggctcttgcnctgcnttatgtncggnactggnagancttgttatttatgctgtttattctgangtgctttgtggctccctggaccagcgcaaccagcggctcgangttnantacagcatcgggcggganatccagcgccaggncctcagttcnatttctcganccctgcaggaatggtgtgtgggctgtgaggtcgtgctgtcaggcattgaggagcaggtgagcngtgccaaccaacacaaggagcagcagctgggcctgaagcagcagattgagagttaggttgccaaccttaaaanaaccattaaagttacgacggc

SEQ ID NO: 544418 - DNA, 248 bp, Homo sapiens
cccaatggaatcccccaaatggaatctacccagaggataacaatctccaaatgtgattatgaaacctgtttctggtaatggagctcagaggactaggtggaacgaacagagccctcagaaataatgccacatatctacaactatctgatctttgacaaacctgacaaaaacaagaaatagggaaaggattccctatttaataaatggtgctgagaaaactggctagccatatatagaaagctgaaact

SEQ ID NO: 544419 - DNA, 562 bp, Homo sapiens
tgtgacagagtaatcgtgatgtggatatacatggtaactctcagatgtggaagatgatgggtcaaaaatcattgtcgatggaacaggaacgaaaaacctgcagagcaacgtcaggtgtatccacttctgtacctacaaagccatcagaaaatatctcatagggcctcttcatgtaccccagtgcctgtgagcatgacagataactccatgtcttccaaagcctgtgaatacttctctttccccttccccaggcattggttttgccagatctggctaatgtggatctggcatagatcagttccatccttagcagtataacatcagtcttgaatagatactggactgtcatctttacttcatgagtgatactgggaatcccagttccagccagtgaagctgactcagagtagcacttcagcctcccctggcaacatcacagtctctagcatatagggaagaaatctgccctccagtggccaaccttttattcccaaaagcttcaaatattctcctaagtcatcactttgtgaggtctcttcaacttcagccagcaagggctcaa

SEQ ID NO: 544420 - DNA, 410 bp, Homo sapiens
gctaccaagattcggagcattatgggtaacgctgccataaacacctgggtgcagagttagtgtagacctaagtttacaattctgttgtgtaactactaagtggtctatatggtaacagtatgtctagtttcgtaagaatgccaaaactgccttctgaagtggctgtactattttccatatccaacagcaatgaatgaacagtcctgttcctattgcatccacttctcaccagcattgggtgttgacagagttctggattttggccatgctcacaggtgtgtagtagtgtctcactgttataattcacatttctctgatgacattacactgtgtcaaccatcttttcacatacttacaatcatgccctctgtatctccttctttggtgagatgtctgtcacaggtctatgc

SEQ ID NO: 544421 - DNA, 255 bp, Homo sapiens
tctttccgtctcaggtcgccgctgctaattggagccgccgccatgtctgcgctctgcacatgattgtcgtgcggaactgctccagtttcctaactcacgatggaataaggcagacctactgcactgagcccaataacttgaaggcccgcaattccttccgctacaatggactgattcaccgcaagactgttggcgtggagcctgcagccgacgtccaaggtgtcgtggtgttcattaaccgtgagatccggccag

SEQ ID NO: 544422 - DNA, 397 bp, Homo sapiens
ttttcccccgggccccccccccccctttgggggtttcccttgggggtttttggggcccttcttttgaatagcccccccgggggttgggccctttttggggaaaattaaccccgggggtgggggggcgtttttttttaaacccccttaaggcccgtcctttccccctgggggggggggggggaaggggttttttttttttccggggggtttttggggccctttggggttttttaaaaattgttttgggggggggtttggccccccccctgtttttttccgggcccccttatttttgggggggtttcccaaaggaaaaaatatgtgaaatgtaaaaccgagacaaatggtggcgaagtgtggaaggtaactatgagcaccagatgacagtgtatgacag

SEQ ID NO: 544423 - DNA, 1421 bp, Homo sapiens
gctccgatctcagatcatcctgaatgcttcgtgccatacactatcgggagctgtgccacgcagcgagagggcatagagcctccacgggagtcttctcaaacgcgcatggaatgcgtggagcgactcacggtggtagaccaaggatcgtgagcccctgtagacccaggcaattggtgaaaccagtcgatgattatcttcgcaatgtatgtcgctgcacacatcgaatgaaacgaagattgctactcatgagtttattctccgtaatcattgttctgcgggagcgaagccattcgtggcctgctctttatattatagcggacggaccgcacatgtggctgggtctcattcgaggtctcatggaagtgcactacccctgcacaagtatgtgaaaggtggttcgaaatggaatgttgtgatagaacatctctgtttatgctgcgcttgctgcgaaaagagacctagttcacgggctctcgatggagagggaactaagcatgggattcggtgctgggaaggctggtctgcctgaagtgcagcgagtggatccgcgcatgttcgtcgcgacccgacaaggtcgaggaatcatctcgtataggagacatggggcattcatggcatgtacatagactcttatgaccaaattagtacctcgtggtagtatatcgttctaaaacgggacatcccggagaagaaagacaacctttgacccattccggttcagaggacaaaagaagcgattcgtcaggaaggaagcgtgggatgggcccccatgtagggttgggagcccccagacctcatggttgtaccttgctaaccccaaggttccgggtgtgggcatagttgtcttgcaaaccgtgccagtgcccacagctgttgggagaaattggcacaattgggaggaaaccagaaccggggtcgtgcaatacccgggttaataatgggacgaaaggctgggaccacaaggggtccaagcgcccggaaaagttaaacttttcagacaaaggcttggttgggcttcccttttaacacgggctagccaagcgtggcattgagatggactccttggcctattagaaaaaggggtacataggccccagcgggcatagggaggtctttctagcagaagggtcaccagcactgaactgttcaggaagctggaggaccttcctaacgaaggggggaacggggcatagaagggaatcggctgagctgtggcaagtgtcatatggaggcccataccagacggacacaatagggagcgcacaggcgaataccatatgacataggaactgaaccccacaaggggggacacttccgcgccaggaacagagtcatgagcgttacacagacaacaaacaagaaaatatgggagacccgagcggggacccgggctaagacagtaggacacacgcagatgtggc

SEQ ID NO: 544424 - DNA, 223 bp, Homo sapiens
tctacttcggcctcccaaagggctgggattacaggaatgaaacatcgggcccagccggtaattggcctatggattatagcatttcaaggggtggtttcggcttttcttttatactattctgtggatttttttttctataataattatgtttcatcttaaggatcaggagaaataaaataagccgatggaaaaggcaagagaaaataataggaagggaaaccat

SEQ ID NO: 544425 - DNA, 881 bp, Homo sapiens
  misc_feature (9)..(9): n is a, c, g, or t
  misc_feature (67)..(67): n is a, c, g, or t
  misc_feature (77)..(77): n is a, c, g, or t
  misc_feature (151)..(151): n is a, c, g, or t
  misc_feature (157)..(157): n is a, c, g, or t
  misc_feature (270)..(270): n is a, c, g, or t
  misc_feature (272)..(274): n is a, c, g, or t
  misc_feature (277)..(277): n is a, c, g, or t
  misc_feature (286)..(286): n is a, c, g, or t
  misc_feature (288)..(288): n is a, c, g, or t
  misc_feature (297)..(297): n is a, c, g, or t
  misc_feature (301)..(302): n is a, c, g, or t
  misc_feature (310)..(310): n is a, c, g, or t
  misc_feature (323)..(323): n is a, c, g, or t
  misc_feature (327)..(327): n is a, c, g, or t
  misc_feature (335)..(335): n is a, c, g, or t
  misc_feature (340)..(341): n is a, c, g, or t
  misc_feature (346)..(346): n is a, c, g, or t
  misc_feature (353)..(355): n is a, c, g, or t
  misc_feature (358)..(358): n is a, c, g, or t
  misc_feature (363)..(363): n is a, c, g, or t
  misc_feature (370)..(371): n is a, c, g, or t
  misc_feature (373)..(373): n is a, c, g, or t
  misc_feature (375)..(375): n is a, c, g, or t
  misc_feature (384)..(384): n is a, c, g, or t
  misc_feature (394)..(397): n is a, c, g, or t
  misc_feature (399)..(399): n is a, c, g, or t
  misc_feature (404)..(404): n is a, c, g, or t
  misc_feature (411)..(413): n is a, c, g, or t
  misc_feature (415)..(416): n is a, c, g, or t
  misc_feature (438)..(438): n is a, c, g, or t
  misc_feature (448)..(448): n is a, c, g, or t
  misc_feature (452)..(452): n is a, c, g, or t
  misc_feature (457)..(457): n is a, c, g, or t
  misc_feature (461)..(461): n is a, c, g, or t
  misc_feature (463)..(464): n is a, c, g, or t
  misc_feature (472)..(472): n is a, c, g, or t
  misc_feature (475)..(475): n is a, c, g, or t
  misc_feature (484)..(484): n is a, c, g, or t
  misc_feature (490)..(490): n is a, c, g, or t
  misc_feature (504)..(504): n is a, c, g, or t
  misc_feature (507)..(508): n is a, c, g, or t
  misc_feature (515)..(515): n is a, c, g, or t
  misc_feature (529)..(529): n is a, c, g, or t
  misc_feature (531)..(531): n is a, c, g, or t
  misc_feature (535)..(535): n is a, c, g, or t
  misc_feature (542)..(543): n is a, c, g, or t
  misc_feature (553)..(553): n is a, c, g, or t
  misc_feature (557)..(558): n is a, c, g, or t
  misc_feature (562)..(562): n is a, c, g, or t
  misc_feature (570)..(570): n is a, c, g, or t
  misc_feature (572)..(572): n is a, c, g, or t
  misc_feature (691)..(691): n is a, c, g, or t
  misc_feature (718)..(718): n is a, c, g, or t
  misc_feature (721)..(727): n is a, c, g, or t
  misc_feature (730)..(730): n is a, c, g, or t
  misc_feature (733)..(734): n is a, c, g, or t
  misc_feature (752)..(752): n is a, c, g, or t
cgacagcgncaaaaccaatgggtccaaagttgatgtaatccaagttcgtcctttgtaggaatgaagnatggcaacgnaagatggggccttaaattggatgccacttttggactttcatcataagaagtgtctggaatacccgttctatgtnatatcnacagaaccttgtggtccagcaggaaatccgaattgcccatatgctcttgggcctcaggaagaggttgaacaaaaacaaattcttttaattcaacgggtgctttacataatganannnccncttgtggcncncgatgggcntctnncatcatcntcttctaatgtgntggngattttcntttcnnatatnttttttnnnttnctctnttttccnnancncgtaatgcntttttctcgnnnntnccttnctgtcannntnnctgtcgcgtacacatgtgtgangtagctagancatnctgcntttntnngtactgtnggnctctattcngtgtcntgtcctatatctgntcnngttatcnaggcgataattctngnatgncacagannatcctcttgntggnnacancagccgtntnatatgtgcagtatgacaaagaggagtttcagagacaactttgaatccttgtcagcctggagaccagcaccagaggaatctacaaggcaaactcccatatatttgcttcccccaaattgntgcccctacagactcaaagctcttttnctnnnnnnngtngtnnctctaaaaatttactgtnctttgtcgatgctatataagccagggagttctaagacgccagctctttgagatttgctcattcccctgtatttcccacatatatattacatatacccgctaataaatttatgtttgtttttctcttgtc

SEQ ID NO: 544426 - DNA, 1831 bp, Homo sapiens
tggctgagcaagggggtcccaagacctgacatgcaccctggacgatgtccccctcatcagcaagtgtggctcctatcccccacgaaacgctgcctccttcagcccctcacttggcaacactggcgtgcctttcactggcttggcccatgcactcctgccctccctgacgacctacaggcgccacgccctcccctgagcaagccacgcacgctcagcgacacactcatctgcgcgctctcaacacacaccgcgcccacctcactcaaccagcgcctgccacacacaccgcctgaccgcgcgccccctccttgcgcctgcggcctttgcgccaaccctctctcacgcgcttgcgcacctccactggcaccacggtggctcctccctgccccacctcaccgcctccgcgcaacccccctgcgcccgcctgccgccccctcttcaccacctgcccgacgcgcgtccctggcccttccttctgcagcctcccctcgccccacattgacacacccctcgcctggccccttcccttcacttcccccctaccccccaaaacgccgcgccggcccactaaccccctgccccccgccaccggcccattcgcggcacacacccctcgctccgcccatgcgctcgcgccccccctcaccctccgctggcccccccaccacccctcgcctgacccttgcgcccctcgcctcccaactccccacaccattctcctacctccacgcccccctgcagcctccgcacttccaaccccattcccgcccccccccccacgccgccttgccgcacgccctccctctcccctcccccgccctccccccacctcccccacccaagcgctctccccttccaacggcccctgtgaccaccaccccaacctgtgcgccgcgtcccaacgccccccccttgcatctgctctcccaagccttgccccccttgcctcgcctgcgcttccacatcccgcaaactcaacttccccccttcccaccttcactccaccccttaacctacgcgaacccaaccaccctctaccccaaccccccattaaacccgcaaaccgccatacaaccgcacccgccgcaccaaacacatcccctcccacacatcacaacgcaaacccaacgccgcagccctttgggcgcgactggccggacccatttgaccacaacacccatgtgcccacacagccgcccccctcttaaagacccccccacctatatgtgggccccccctgtgcgcgcgcccccccattgcgccccacacacgcgcgcctccgccctttcccccccgtccgaggcaaaagcccccctatgccgccaaaccacccccaaacccaccactaaccaccacaaacccacccacacagcacccacactttacccaacaacaacccacttcggcctttcaaccacacacacgccaccaccgcaaaaacacacaaacccacccaacttaccctcacacattcaactttgcgcaaacttcccctcttcacacaccacccccgctcacaccccatcgcgcgccccctcccacccgcacgaggacaccttgagccgcagcccatacagagacaaccagacccaacaggcagagacgaccagccccactcaacgaccacacaaccaagaagacaccatcaacagaccacgcaccacaacaaagacgccgacgcccgcccaagcaacgactgccaccatccgcagcataagtcaacagctaaaacagacaaccagccaaaacatgtcgacagctaaaagatattcaagagatcacacggaagcagtatagacaacagaaaagatgcgacacaaaaaaaacaaaa

SEQ ID NO: 544427 - DNA, 155 bp, Homo sapiens
aggaacaggtcttatttcttaaaagtgacgtcagtagatggattactcacatcagttgcattttccattgtattcatgctttcaaaaacagtgaagtattcaattatatttcccctttttggttttttttggcttaactttactattctccggaa

SEQ ID NO: 544428 - DNA, 248 bp, Homo sapiens
ttacaacagcttgggattatgggtgtgagccactgtgtcctgcctaaagaccatactcttaaaggaaaaaaaaaaagaggaaaacgaaaatttttttcattggggaaaaatctgcatgacatgaaatttaccattttaaccattttaagtatacagttctggggcataaactatatgggcagggggcaactattaccataatccatttttttttttttttggagaagaagcctaattttgtgcccaag

SEQ ID NO: 544429 - DNA, 154 bp, Homo sapiens
gtggcgtggtggccttgaccttccggaaacagaccattgacttcctgaacgacaacattcgaagagtaattgagaactactatgatgatctggacttcacaaacatcatggacttagttcagaaaaagtcaagtgctggtggcggggaggacta

SEQ ID NO: 544430 - DNA, 220 bp, Homo sapiens
ccttcatcatacctacctggtggttagtgccttcccctactctcttctcatcttcgtatatgacgaacgtaaggaaaagctcatcactcaggcgacgccctggcgggctgggtggagaaggaaacctagtattagccccccgtcctgcacgctgtgaagcatcaggccacacactctgcatccgacacccaccccctcttggtgtacttcagtcttggag

SEQ ID NO: 544431 - DNA, 357 bp, Homo sapiens
aaaacacttacgtcaacatagataatgggggaagagagagaggcagtgcttagggaagatgtaggatggatttttatttattccatgccactaccaaaaactataaatctacacacacactcacacgcacatacatgtacattaataagaaagcttatcctccctgtgactccaggaacccagcatcccgcctccctcaggctgagagccgatgcctattaacggcaccgctctcgcctatcaacatactctagaaggctcctgtgttgtctcacaagctgagagggcagggcaaagcagtgaacactcatggaggacttgctttttgtcttaaatccaatctaatcagtaacactt

SEQ ID NO: 544432 - DNA, 470 bp, Homo sapiens
ctaccccccccccatgaaaggtgttgcggattttcaccgggtcccccacagcagggaggtagtttctcattgctggaaaagtgaggaatggctcttgcacatcactaccggcaagtttcgtggctccttggaacagcgttagcttagctcagcgccggggcttcaccaagacctacactgttgggtgtggggaatgcacagtgtttccctgtttatccatcccctgcaaattgcagagtggccctcattgtttgtgggcggaccagctcctccaaggctttgaaaagggcttccagtcccgtccccttgcctgcctgcctcgggagccaggggtgtgcacctggcagtcccttcggtcccagatagccttaattctgcccggagtggaagatgaagcctgcccagtgtcccccctgttcccgctcccatcttttttgcgggcaatgaaataaagagtttcccccccgcta

SEQ ID NO: 544433 - DNA, 1106 bp, Homo sapiens
tcagctggggtccgtcaccgaccttggggaactgggctacggggaccacaagcccaagtcttccactgcagcgccacgggaggtaaagactctggcatggcattgttctcagagcaggtcgccatgggctactcacactccttggtgatagcaagagatgaaagtgagactgagaaagagaagatcaagaaactgccgagaagtacaagcccgcgaaccctctgatgctcccggagactcctccgattccacagctctctgcggcagctgtcatttccatgtgcactgggacgggaagtcaaagcgaggaacttgaagagatagagcaacaagttgagccgtaacggtgcactttgcgttgtagactccctgaggttccgtggtttacagcgatgatccaagcgtgaactaccttttgttgtctgtatggctttccaaagtccttgttatgaccctgtaagtgtgtgaactgaaagatagcttgctcataggttgattgtaccattgtcgtacaacaggagggcagaaacgtttgagcgaagtctagggtgttcatccctagttctatgaagggttgcttcacgtatagcttaccattctcgcggaatgcaactcgcccgaaagatacacccgtttcccaggttacacatttagccatcggggaactccaaggcaggatgcgcaggatgggcaggagcgaagtcgcgcaatgtccatgtgtcaggacaaaatctttggtcccgctttgaacaggggaaaccggggtgagctacgacataagggcacgtgcaaccgggcaccgccttacctatcccaaaaaatacagggctacgacggtgctgtcgggaaaggcgagttcccgggggtccaccgtcgcaatttcgtgccagggcgtttataatgctttggcgaggatgtgggcgcccataagagcgcaagggtgatcacggaggaacaaggggtagatgcgcggcccttggtgctccggggccatgggacatgcgcccaacgatggctctctcttgggctcgcgagcacggtttctatacacattctggcgccgcgggtatcccccccctgggtgggggagaaataggggggaggcc

SEQ ID NO: 544434 - DNA, 114 bp, Homo sapiens
cggatccccccccgagaagctgaccactatgaggtccccaacaacgatgaccacatgatacccacgagagtgctgattaccactagaccactgactactatcagagtgcaggat

SEQ ID NO: 544435 - DNA, 735 bp, Homo sapiens
ccctcaggctcgtgccagttttcagagctatccgctaggcgaaagcactcgcgtgcaatgagaccagcgtggctaacaaggactcactgactcccgtaatcatgtgactctagcagcctcaagcctcatgaggatcctagaactccgaacgcagcggacattcgccgagttttcatagacttgtcgcagagagaaggatttgtaccagtgcagtctaggcttacaattgatcgcctatcctgatgtgatcctccttgcctcagtgaccgagacggcctggtattacagaacggtgcaggccgaagcatacagacctcgagggcgacttggaccacttgaagtgcccgtggttctagcgtgacattgcttcgcaactatcgcctaccataggacacacttgacgattacctgcagcacacaacagtcaagtgctgatccatcacttttatgcaatgcgcaggtttagagaagatttaacggcaaacgctaaccatgcctaaggctgcctcatggtggaaaccgaaaaagagcccaatcccttaagatcaccgcacggatttaatgacgaccctttcgaagcacacaaggcctagaggactatggagcctccttaacatcttctgaaacaggcccgcgtactgtcacttaatcggcacgacttaacaatgccactatacgttagaccacctctttctaacacgcaccttcaccaggtagcttatttccgggggcccg

SEQ ID NO: 544436 - DNA, 209 bp, Homo sapiens
aaaataaatcagccaggctaagagagaatatacaaattaatacagagatgagagcacgggcattatgatagatcctatgaacattaaaaggataataaaggagtataatgagcaactctgtgcctaacgcttagtaactgaggtcagatggaccagctcattgaaagacacaatagcccaaaatcatacagggagactaggcatctgat

SEQ ID NO: 544437 - DNA, 788 bp, Homo sapiens
aagctggtggactacgcgcgcaggttgcacgaggagttttgagcgcccggcgcgccccggccgcccccacgcaccaccggggcggcctcgggggtgactccgggctccgtggctgtcccggaccccacctcttccctgccgccccggccaaccggcgggacgaccgcggttgccccagtttgatgagcggcggttgtccccctctgcagcgcgcaaccccggcggggggctttggggctgtgaacgcggtcgggggcgccggggggctggggcttgttggcccccggggggcgccggcctttccttcccttggttcccccttcgaaaattctgctgggcaattccttcacctttccctgaggaaacgcggaaatcgtcggctttccaggttccaactttccttgcccggaaggggccgcctagacgcggcgcattccggcggggcccggagaaaccccttcttgggggaccccggggcccccctttccccgagtggccgccccggcttccgcggtggcggcaccaaaacaaacagcagaggcgtcttccccttcccaatttttccccttttggaaaaaccttgggacgcggaatttttacttcaaacccgacttttagggattttaaaacctttttccgggcttggcgcaccatttagcagggttacgcccagggggaaaggtttccacgggggcgagaacgagcgtggccggggggctcccctttccccccggggggccccgttgggcgtgtttgtttcggggacgcccacccccgaagggcggtcc

SEQ ID NO: 544438 - DNA, 919 bp, Homo sapiens
gcggaaacaaaaggcgaccgccgccgagaagcgcgcccgggtaagaaggccgccgtcgtgcgacagaggccccggcaggagggcgtgaacccgagagcgagagggcgtgcccccccgtgaaacctagaggggcggccacaccggctgataaaatttatcggcggcaccaaggcccacgcccacgcaagtgtccctccgcgccccgaccgcgcccggtatatcatgttccccccgcgaaggcacccctattcctggtgggccgccccagctaaccggttcttgttcgccgcagcggctgctctatcactctcgaccgcgcgagaccccccccccaccttgcgcgattgttccgcccttcattttccaccccgaacgggttgcccccccccgaatttgagaggaagtcgcacaacaatttacgccccccattcttcaccaaaagagtggttgagccgccgatgagagctcggttcgcgaggacacactcaactcgcggcgggtggcattcccctctcacgaaggtacacttcttgctgggaaggtgtaagagctccctcgctgaccagagaaagtactgtcaccgcccctttgtctactaaggcacgggagctgccactcatcgtgtagtcgccccgacgagagggtccacacgcgcgccacctacaccggggagtgttaaacttctaatagagggtgacaaaagagggtttcccctgtggccatttgtccaacatcagcccgcagccccatgtcttctcttatgctacacaaaacgctgggcataggctcataacaccgcattataggggacattatcttgacatagagaagcacgtagaccgggctgcgctgaaaactcacgccggcctccccctcacctattcttgttcaaactttctaacagacccacatatacaaa

SEQ ID NO: 544439 - DNA, 869 bp, Homo sapiens
ttgagggatctaaaaaagtcaaactcatacaagcatagtgtggttgccatgatccaatgtgggggtggggcaatgaggagatgttggtgaaagggtacaaagtttcagttagacagggtaaataagagtgtactcttatacagcatggtgactacatttaataacaatatattgtatactttaaagttgctaagagattacatcttacatgttcttacaacaaccgaggtatgtgaggtcttggatatatcactcagctggatttaactatttcacaatgtatattatatcaaaacatcacgttatataccatatatgtacaatttttatgtggcatttatatgttaataaaatattatcccgcgtgtttttgactctttaagaaataaagtaaatttttctttatgggatacgtttgccgtgtttccacaaaagatatgacgcatgcgcaaccttttatttatctcttggatattttttttttcattatcactagattgtaattcaatggtttatggtaacccattttccatgggcggttccttctcctttctcgggaacgcttggtatacgtctttccccgcaataggcatgtggcggtgcgtagttggttgtgggtatgcacctttttgagtttttctcttgatacgctgcttttttgtgatccattgtggcgcttgtgtttgatgatatcgccatagtgatctctcgtgtatgtgggtgttttggcttagtttttcacataccatacgtttctcttgtgcccatttcgacttgagtagtatagatactggatggggcgttaagcgtggcgccccggtttgcggtagtttttgctggatttcgtctgctcggattgacgggcggtt

SEQ ID NO: 544440 - DNA, 994 bp, Homo sapiens
gctctgttcttccgccgctccgcgtctcgttgctctggtccgggtcgctaactggaagaagagatcgcgcgcgtctggtcattgagccagttggctccgtgcttgtgctggatgctggttcttgctgggtgacgacgctctcctcggagccgttgttgccttccattcgtcgtggccgccccagaagacgagggccgtcatggtgagtacttaatggtgccaaaaggacttccatacggtggtcgcgacgagtggctcagaatgcaaggtcggtggcaatccgtgtaccccgtgtaagtacgcaccacttgcagactatgggcatctgcaactacgcaaactggagtagcagacagtgtgagaaggatctgaaaacgcacacgccttcgtaacaaatcgaaagctgcgtctgtggccccggatggagcacccatgtgctgtgtgacctgaggacccccgtgaacccaaggccaacagagagaagatgagtcagatggatgttgtgagacccttcgaacaccccggcatgtacgtggccatccaggccgtgctgtccctctacgcctctgggcgcaccactggcattgtcatggactctggagacgggtcacccacacggtgccatctacgagggctacgccctcccccacgccatcctgcgtctggacctggctggctgggaactgaccgaactacctcatgaagatcctcacttgaccgaggctacatggttcacccaccacggcgagcggggaaaatcgtgcgccgacatccaagggagaagcttgtgctaccgtttggcctggacttcgagcaggagatgggcaccgcggattctcctcttctctggagaagagtagaagcttgccgatggcaggtccttcacattggcaatgggcggttccggtgtcccgagggcctgttccagcttcctcctgggattggattgggggtccgaacccttactcttctgaagggcggggctccgaaactg

SEQ ID NO: 544441 - DNA, 978 bp, Homo sapiens
gaataatggcctgaagaagacctttgcttcttaccgctgaggagtcaagcacaaatctatgtatagcgcagattgagtgaatggcttctgtgatcaagtaccttagggcacattgacatgtagatgtatccatctaccagatgagtggtgagcgcattggcattgatgtcggcgtctccaagccgattcctagaattgccaaggcgctcatgtttgttaatgtgcccttgatggattggcatccataaagtgtgggtaagtaaacaactacataatagcatgaccgaagaagtaagcatataggtgtccccttatctataatgacgtggggtgtgcccatgaaaacaacctatactggcttaagggactgttttagactaactataagcgtgtaatgagtaccctcaaacgcgcggatattatatatacaatcagagtgggcctgtcgatttgtgatttgcccagacggtgacgtccaggaagtccccagcatgggacccctatgtgtacgtgttgatggtgctatagaatttgtagagcaatcttgagttacagagatgatccccgtaaggtgcttcagtgaggctttcatactcgcatggctcggagctgagtaagtgtcataaaatgagcctcatttctacgcatcacttgaaaatgcagaggaaatctggtgccgatctatgcgtagaggtcaggatgcacttcataattgtgtgaagcatctaccttagacttcgtgaaagtccgtccgcagagggttcggaccggtatgagctccctggcccccgctttgggaaggctattaaccaactaagtcacttcattcacaattctccatttgcccggtggaccgggaatccactttgtaccccaatatgcaggggccactcgaaaactggcgcttaaacacgcaccaacgtttatggcttaacaatccaacgcggaattcttcacaacaacattcgcccctcttaa

SEQ ID NO: 544442 - DNA, 844 bp, Homo sapiens
taattctgggatggtgagaattcgggatagggttcctaatgggacaaaagccagagataaaacgtccttcacgtgctccctaaccgggttctttctggaccagaaccacaagggccgaattgggatcctaatggtccggtctgggtcagaggcctatctttatggtggttcggtaaacttttaacaatgagaattaattctggctctggacattgtcatttggatgctccccacacaccaatcctttcctggtgacaacagagagctacaactcttcttgggctcctctggtgactcccaactccctccttgggaagcttgggctcaggacgtctggggatagaccgggcaggaattctggtgggttccggttgtgttcctaatattaatggtgtggatgggacttggaactaaaacagtgggaaatggctggagcaatcaacattctgacatggtcaacccattttaccttcttacagggatatcttttctgtacaaagagtggctaatctttaagaaggaatccttctttagaaaagctattggcattttcagccatatcctttgtggttgaatccggcgctcaaataagttctgggctcacattttccctggtccggatcttgtacccactagggatggccgtgtagggcaggggtttcagaacctcggtttcggttaacctttgaattggaagggcctgggttaggcctttgcctgaagtttcccccaatgggtcgaacccgagacaccgggcacggttagggtactcgaggagaggttgtgtgtttagatctcatttatatacatacggtcgtgacgagtggagtgcagacgaggcgcc

SEQ ID NO: 544443 - DNA, 310 bp, Homo sapiens
  misc_feature (88)..(88): n is a, c, g, or t
  misc_feature (132)..(132): n is a, c, g, or t
aataaagtcagataatattaagtgttggtaaggatatggacaaatcagacctctcagaccctcctggtaggaatgtaaaatggcgcantgcctttggataatagtggggcagttattcatatagtaccaccngacccaacagttacatttctaggtatatctccagaggatggaaacatattgcacaaagcttgtaacgaagttcatatcacattattcatataggttaaagtggaatacccggagctcatcataggtaatggtaataacccctatatccctaaatgggggtatgggccaaggatgggct

SEQ ID NO: 544444 - DNA, 360 bp, Homo sapiens
gcgacctgcgggatcagtccgcacgcacgcggaacgttcgacgccaacgacccgagcatctgagtcaaggcccgcgcggcacgttcgaccccaagcagctgctgatcacgctgaacgaaaacgccgacctctcgaccttcctgcacgagagcgggcacttcttcctcgaggtgatggccgacttggcaagccagcccaacgccccgcagcagatcgtcgacgacatggcgacgatcctgaagtggtttggcatcaagggtgacgagcaggtgggtggcagcgacagcggtgcgccgctggcgcaacaggatgcggaagcggtgtccgaagccatctacaaagaaatggccgctgacgatg

SEQ ID NO: 544445 - DNA, 417 bp, Homo sapiens
gtgaccatatctggaaatcctgctctcaaaacaatcaacaatataatctatcacaggtgttttactcaggttctaatttgtataagaaaatttgtatctgcatattatgcatcaaatatttatgtgtaaaatgtatgttttacctccttaaaagtgcctaaaagttcagttaatagtgtacttgggtttaagctatacacaatgattaagtgcaatgtaagtatggtaatttaatgaaaagcattccttgcccaaggatgtataaatttttgaagagaataagcgagaattatataaatatgaaatgctatgtaaagatttgtctatgtatagaaatattatgtagtaatactgattaaagagtatcccatgctttgatcgaggtggtacatcaatagaaatttcctaccaacagta

SEQ ID NO: 544446 - DNA, 956 bp, Homo sapiens
  misc_feature (288)..(288): n is a, c, g, or t
ccccgctcagatcacccgcagtaagcgtgcagtttccccggactctccgtcgcgttgccggcggaaggtcgagctgccgttaatgtgctgttcttggcgtcaggagaccctacctgacccatcagcaaaaggtgttgcggatttataagcgggcgctacgccacctctagtcgtggtgcgtccagagagacaaataccgatcacttctgcttgctattgagtgaggagcccggctttgacatcaatcagtacagaatgagagacaggatagtggcgtaaggcgcgagncacagctgcgtgataacggagcgccgaggcaagaagttctggctaccggtcaacatccacaggcagtacatcgttcctctgactcttccatgggaggcacctcctactggaggagataccgattgctagaatcggtcccagaactggtgcttacgatgactggcttcctttcttgcagaagggcgaatgtatcctagattactttgccaagatagaacacgtggaagaagactgcgtgagggaaacgctagggaagcgagaggttcaagtcaggctgcatgaggaaagcgccagctggtggtcctttagactgaagtcttttgccccctggccgcaaagggaccggtgatttgccccccaacctgtggtggtatattgtgaccagacccccgggagcggcccgatggtagaaaggagatgagagctctatctttccatgcttgctagggtgatcatatgttcacagatacatgccacttgctccgtagattgagaccaattcgagtgaaacatggtctaacaaccattgcaacagagcagctggagcagtgcttcctgtaggcaataaggcaccgatgatggccaaggtcgggtggaccgacatggtttcacttcagcgcgaatcccctgtacgcgttgaccggtatgaccaagctagggatcccaat

SEQ ID NO: 544447 - DNA, 350 bp, Homo sapiens
ccagctgactgcttcttccctaaatagttatcgcatagtttggagctgtgatttgggtcattgtcctgtagaaggaaattggctccaattaagcgctgtccacagggtatggcatggcatagcaaaatggagtgatagccttccttcttcaagatccctttagccctgtacaaatctcctactttaccaccaccaaatcacccttagaccatcacattgcctccaccatgcttgacagatgtcgtcaagcactcctccagcatcttttcattttttctgtgtctcacgaatgttcgtctttgtgatccgaacacctcaaacttagatttgcctgtccataatgtcgacgc

SEQ ID NO: 544448 - DNA, 474 bp, Homo sapiens
tcgaagcatctgtgagaatcacatgatgtgaacgctactgcggagaggacgtactccaggagggagatcattaactcaagtccgggcgagagaataggctgtgaccaggctttccaagccacgcagcttcagcttccatcaagcccatcctcaacgcacaacgcaacacaaggcacaggcacaacacagcgaaaacataatcaaagcatcagagagaacacagaacagcactgtggcattctgctggctcttttgtttctttcataagaaaaggtgcccatgaggggagcggcaacaggtgtatgctctcacttagtataaatggactagaacatgggctctcaaaggggcacaagtccctcaaggggtacacagcctgcccaggatgtgcaaagccatgaaatcagcatggcacatcttcctggagtagcaggatgattaatcagtttccaagggagaattaattaaatagtg

SEQ ID NO: 544449 - DNA, 339 bp, Homo sapiens
tcccccccctacctcaagactggactgagaggtccccacatccagctaatttttaaagtttttcatggaacggactactatgtgccaagctggtctgactcctgggttaagccatcctccacctacctccaaatgctgggattacaggcatgaccactgacccagccaaaattgtttcttttttaaggaattcacaattctggagtggctctttgcatgaacactgtgcaagggttggagaaatcaaagctgaccaaaacatggccccaccttttggactacagtctgtctgggaacagagattagccaagtcaagaaacactggatgcagctagatta

SEQ ID NO: 544450 - DNA, 146 bp, Homo sapiens
cgtctggatcgacggttccttctccgatcgttgccctgggaacaacacgcaacatccacatccatggcgtgcactcccagcaatcaagcgcatagcgcgtgccaccactcattttccaaccgtcaaggccccaagctctcaaattc

SEQ ID NO: 544451 - DNA, 171 bp, Homo sapiens
ctagacgtctctgatagagggcaggaaggggagatagtgaacttgcggaacaggtggtcttccctgggcaggaagactgtctctgacagtcctgtggtagacaggttttccatattcggaagaccacgatagacattgaccaactggtaggagatcgccctatgtcgtcgc

SEQ ID NO: 544452 - DNA, 879 bp, Homo sapiens
ccgccctgtgtgtcagcggctcggctcccgcgcacgctccggcctgtcgcgcatgcctcggcacctgcaggtctgtgctgtccgacggctggcgccccgtgatctccgtcccggccaggagggccagtgatttccctccctggggcccctggtgaccatacttgctgcggtttttgttcctggggctgagtgcctcgtcgcgctcccctcgcgtggccctagcgtgcatctgcacttgtcctgtcaaccggttgcaggctggtggagggaggggaacgtggtgcttccagcgtggtacaccttgcacggggaggtgtcttcatcccatgccatgggaggtgccctttgtgatgtggttcttcaaacagaaagaacaggaggatcaggtgttgtccgtagctatcaagtggggtcacaaacaaagcaaatcgctggatgtatccttggtctagctccatgccctcccggtaatcctgtccctgcgtgctggagggtctccaggatgaagagactctgtgaccccttacagtctgctccgtgaatgtgcatagacaaacaaggcaaatctaggggccacaggcatcaaaaccttaggaactacaatgtactggttcctccagctacttccatcctgcagtctccagggttgtgccccatgtgggggcaaactgttaaccgtgagacttgccagtctccaagggagtaaagcccgcctgtaccaataccagtgtgattcggcagcttgccatcctttcaagactttactttgcagcaggcattagatgtcatccggggggtctttaagccctcatcaaccttactgacttccatggctggcatctatgtcctgcaggcacacaatgaggatgtgcactgcct

SEQ ID NO: 544453 - DNA, 211 bp, Homo sapiens
acatacactgagtaatccagatttgaccaggatgcgtatatcatcgtgtaatcataatcctgaaaatacgtcattgatcttgatactcagattactgataaaccagcattataaactctatcctgatatcttcccactctatgtaatacttctttctgttatagaatatctcagtatcccccaagtattaggggaaaacttcttgtaaccc

SEQ ID NO: 544454 - DNA, 536 bp, Homo sapiens
agccactgacccgcccaaatcctgaaatttctgaaacaactatatctttaggtaacttactagcttttgaagagttcaggtttgccttttattacaattattgcattgatactagtagtattttatagactttcttgtgtgaaatgaaaagctccttgtgactattaatttttcttattccagttattgaattgctattgtcaccatataatttaattttatttatttatttatttttgagatggagttttgctcttgttgtccaggcgggagtgcaatggcatgatcttggctcactgcaacctccacctcctgggttcaagtggttctccttcctcagcttccctagtagctgggattacaggtgggccaccaccatgcccggttaatttttttgtattttttagtagagactggccatgttgctaggctggtcttgaactcctgacctcagctgattcacctggcctttggcctcccaaggtgctgggattacagggtggtgagccacccccgcccaggccaattttaataat

SEQ ID NO: 544455 - DNA, 511 bp, Homo sapiens
  misc_feature (182)..(182): n is a, c, g, or t
  misc_feature (289)..(289): n is a, c, g, or t
  misc_feature (330)..(330): n is a, c, g, or t
  misc_feature (379)..(379): n is a, c, g, or t
ctcctgagtagctgggattacagtcgcctgccaagagatggggtttcgccatgttgaccaggctggtcttgaacacctggcctcaaatgatccactcgccttggtctcccaaagtggtaggatgacaggcgtgagccaccgcgcccagcctcttctattcttttagagacagggtctcactntgttgcccaggctggagtgcattgatgtgatgtgtgatcatagctcattgcagccctgaccatccgagctcaagcaatccttctgcctcagcctcctgagtagctgnggccgcagatgtgcaccactgcacctggctaatttttaacntttttgtggagccagagtctgtataaaataaagtgtaaatagtaccatnaataaagaatacatagtaccattttatagtagtataaaacggacattagaaactctgaacttaaaggttaaaaaaatacacaaaagtagttctcaagttctagagacttggagaatccaggaatcaacaatg

SEQ ID NO: 544456 - DNA, 148 bp, Homo sapiens
gacagactctaggaggatccccattccaagacagaccccgaaaatcccctaaaagtgggacaccaacagtataccctaggttgcttaaagggattacactatctatataaagtcaatacaaaatgaagtacgttgtatatattgcaac

SEQ ID NO: 544457 - DNA, 419 bp, Homo sapiens
  misc_feature (258)..(258): n is a, c, g, or t
gacacaagtcatgtattcaatacccaacaagcacgattggctcacgcaaccttgtctcaacaacagggtttccaaccaggtctctcagccaacttcagttcagcagattccaatccctaatttatgcaccactgcaagggcagcatcaagcccaactgagttggggggctggccctgcttgttccccaaggcttcaggaatggttcagctccttcactttcaaccatatagatctcagccagctttttatgcaaagcnggtttatccccagccatctgtggctcctttcgtggtactgctaattcagcaactttccaacgtgtccaacacccagagaacttgccaagggcacaactccgggtcttgccttttcagccaaaccatcagacgacgaggcttgcagggtaccagagctcgaa

SEQ ID NO: 544458 - DNA, 1085 bp, Homo sapiens
gtgtcttatcgtgcggccctcttggtgtgttattccctccctcttcttctttctccactgtcccctcctgcatggcctccatgtccccctgaccgctttcccctcgcccctcgtccgtcttggggtgctctatccacgcgtttcgtccccccgttcgtggtgctctccccctgggtcccccgctccctttggtttcgctctcttcgtggtgattcttgtggatcgtccggggccacgtcagactgtcgcggtcctccgttttattgtgtgtgccttgggcctctgccttgttcctttttctatgctatgcttctcttctctctcttcgttgcgtttcctcttcatgttttggcttttggccctttgtgctgggtacgtcccagtgtatccgagcgtgccatacacctggatgcggggttatctatggtctctcgcgtgcctgggggcctccattctccctggagcggtcctcggcggttcatgggctttctcggctctcttcgcttcgcctcctctagctctactcagatgtcactcttccccttcgtcgctataactctctacgtcccctttgctgttgggactgtgccattggtcgacgtcacgttcgtggggccctcgtgtcttgtctgtccctcctcccctctacgcgtttctttgtctcacttgtggatcacaggtgtcaatgcacaatggagtgtggctccatggcaccttgggatcgccgcccaatctctccgatggatctccactcatggccgccgcttcccctgctgctttgcaggggcggtcagggcaagcaatggacttcctcttctgggctccccgtagtgtgggcgatcacctcgtctccagcccatgcaatctctccagtgacacatagacgcgtgcatctcccagtaggatggggcccattgacctcatcaggacagtgtcggtggctgctcatggcatcttcagggacaccaccacgctgaccgccagaccctggtctcatggcgcatctcttcccatcttgtcccgaagatatgcgccgtactagtgccttttgatggggttcccatcatccatgcctgatattgtat

SEQ ID NO: 544459 - DNA, 1312 bp, Homo sapiens
tctgttggtgtttgtgactgttgctgatatcttctatatcatgtttgtacttggtctgtttagtcttcgttgttttttattaccgtttggttgttggctctgttgtacgtattctttcgttctattcgtagtctttgatcttttctcattgttgaaagctcgaattagcgtccttcctaagtcactgcgttaccacatatggtgattgtcgcttgtctcgtgtgtcgtgtgctctttgtctcatgtcttgtctttcacttcttttgttgttcttgtggttgttctttgggtcctcttgttgttgttcttctttggtttgttattttttctttctttttgtttctgtctgtgtgtcctctttttgtcttttgcctttttggtttgtcttttttgtcttctttttgtgctttttcttctctttttttgttttctgtttattccttgttcgtttttattttgttctcttggtgttgtcttttccttcttttgttttggttccgctttttcgtgtgttttattgtgtagtttgtttttgcttcttttttggttttctgtgttggtatgccttctaccctggttttttggtatttcttcttgtgtttcttgtgtgcttgttgttgcccttgtctttgtggagtactttttttttgttgattgcctatctttctttctgttcttttttgcgttttttttgtcggtttgtgtgtgtttttgctgcatctctctcttcatgttgttgtcccttttttggttctctctctcttgtcctctatgtctcttgtgacctttacatagtgtgtctgttgcttttttctgggtactctcctctaggccctttagttactacttagcctggatatatgtacctcctggtggtatactagcctattggcttataggataggtacaagttaagtttggtcaaagtattcccatacgccaggaccctacatccctttggtattgatttcactagtctagctgctcaacggaatggcctctcctacatccagggatccttagcaccctaccggtctgcctttaattttaccacaggtataggactcactattggggcgaatgtaccaagtttcgccatgctggtatgatgaaatggattcccatctccaaagtctgagtatggattgcatatactagtgtgcagtctccagagccatccataaattctagccatatgtcacaacaaccaacagcaagaaaacgtgttctatatatagagtgtgcccaatctgtgtttagtacacaagcatagcatatacacccatacaaattacctgcgtgggggcagtta

SEQ ID NO: 544460 - DNA, 576 bp, Homo sapiens
acagctccatctcaaaaagcaaaagaaagtcaagggatggaaaaaatcaagaggcacagaccctaatactctttatgcatcaaacacacaaccccagctttatacatggcaagaaaatatccacaattcaccacacttacaaggagcagatacacctgccttctatggataatactgatatatatagagcacacaaattcctgcaagtctttgcatgcaggcaaatgtcaaattcatcaatttccaacaattcaaatcatgtgcatcatgcacaacagcaacagtgtcaggtccagtcattgcatatgcacttcagttaccccaatccttccaaacaaatgtgactgcagtcgccaaaaagttcatttgactcatgtgttagcatttgctttaaagtaatatggagggaggaagtagcatggtgcatagccatggaacaagatggattgtgaattaataatcgttgaagctgggtgatgggtacatgaggatttattatgtaataggatctcactactatcatatgtaaaaaatttttagcatcttaagactttaagtctgtcatactcacgtatg

SEQ ID NO: 544461 - DNA, 174 bp, Homo sapiens
ggaaggttgagctccaccgcccttgactacggctccggggacgaggacagcaagagcgagaagaggaagaacaaggacccgctctacgccaagatggaggagcgcttctaccgctacggcatcaagcccgagtggatgatggtccatcggatcctgaaccacaggtgcgtgccc

SEQ ID NO: 544462 - DNA, 351 bp, Homo sapiens
ctaaatgaagtccacatgaccgactgaccgacctggggaacatagcaagaccccatctctacaaaaatgtaaaaaataaaaattagccgggtgtagtggtacatgcctgtaatcctagatactcgggaggctaaggcagaaggatcacttgagcccaggagttcgaggctacaatgagctgtgatcgtgccactgcactccatcctgggtggcagagtgaggccctgtctcaaaataaataatccagtcccccccaagaaaggaatgaagttctataatgagaaaaatcctagtaactaacatatagtagacagtggagagtggttctctttcgttttcttaggggcagac

SEQ ID NO: 544463 - DNA, 917 bp, Homo sapiens
  misc_feature (170)..(170): n is a, c, g, or t
  misc_feature (234)..(234): n is a, c, g, or t
  misc_feature (248)..(248): n is a, c, g, or t
  misc_feature (255)..(255): n is a, c, g, or t
  misc_feature (267)..(267): n is a, c, g, or t
  misc_feature (269)..(269): n is a, c, g, or t
  misc_feature (282)..(282): n is a, c, g, or t
  misc_feature (284)..(284): n is a, c, g, or t
  misc_feature (287)..(287): n is a, c, g, or t
  misc_feature (290)..(290): n is a, c, g, or t
  misc_feature (292)..(292): n is a, c, g, or t
  misc_feature (309)..(309): n is a, c, g, or t
  misc_feature (314)..(314): n is a, c, g, or t
  misc_feature (318)..(318): n is a, c, g, or t
  misc_feature (329)..(329): n is a, c, g, or t
  misc_feature (354)..(354): n is a, c, g, or t
  misc_feature (372)..(372): n is a, c, g, or t
  misc_feature (384)..(384): n is a, c, g, or t
  misc_feature (390)..(390): n is a, c, g, or t
  misc_feature (399)..(399): n is a, c, g, or t
  misc_feature (441)..(441): n is a, c, g, or t
  misc_feature (485)..(485): n is a, c, g, or t
  misc_feature (495)..(495): n is a, c, g, or t
  misc_feature (513)..(513): n is a, c, g, or t
  misc_feature (518)..(519): n is a, c, g, or t
  misc_feature (521)..(521): n is a, c, g, or t
  misc_feature (531)..(531): n is a, c, g, or t
  misc_feature (537)..(537): n is a, c, g, or t
  misc_feature (540)..(540): n is a, c, g, or t
  misc_feature (547)..(547): n is a, c, g, or t
  misc_feature (699)..(699): n is a, c, g, or t
  misc_feature (713)..(713): n is a, c, g, or t
  misc_feature (768)..(768): n is a, c, g, or t
  misc_feature (815)..(815): n is a, c, g, or t
  misc_feature (826)..(826): n is a, c, g, or t
  misc_feature (840)..(840): n is a, c, g, or t
  misc_feature (902)..(902): n is a, c, g, or t
cattcagaatggacattaatatcttgaatagagaagaaagcttttagaaatgtatcatttgtcaaaattgcatgccttttaaaaaatgataaagagagatgctgagtgttttgtatgttagcatcgactctttctttttatttctgttcagactcaagtttttagaagcnagaatatagatccctttaagaaaaaaaaaggaagaaagaagaatttgctggttagtcgacctcngtttaagaagtgcntcacccnccccctccaccncnccgtggtgtttcncngcngcncnctgtaggttagggttcngtgcngccnggcagaaagcncatgtgttagcagaatagaaatcancgacagacatagaccacnaaaggttaacantatccnatgtgaatnccaaaaatgccatccaaagagtcttggtcagggaggaaaacnaaaagggctgcagttcacaaatcaaaacaagagggccgtcagcnagatttattnatagcagccttgggaatnaaacnngngtctccaaantcgtcngtnacaatcnggcaacctctgaaactctttgcttattcgcagttgacatcacttgttagaagagcaactctgaaagaaaacgagcaaattccaaaatatgaaaagattcacaatttcaaggtgcatacattcagagggccacactggtgtgaatactgtgcnactttatgtggggnctcattgctcagggagtgaaatgtgcagattgtggtttgaatgttcataagcagntgttccaagatggtcccaaatgactgtagccagacttgaagcatgtnaaaaaggtgtncagctgtgaccttncgacgctcgtgaaagcacataccactaagcggccaatgggtggtagacatgtgcatcagggngattgagtttagagg

SEQ ID NO: 544464 - DNA, 176 bp, Homo sapiens
ctcggctagcatgtgatttacttcactcataacgttctcatactaggctactaacaacacactaccatataccactgatgcgcgatgtacagagaagcacataccagggcacacacacacctgtcaaaaggcctcgatacgggatatcctattatacctagagttttttctcgaga

SEQ ID NO: 544465 - DNA, 269 bp, Homo sapiens
cactaaagccaaggtctgtaagcacgctgctcttccgagacttccattccttctgattgcgacacgtgcagctcatgacaatctgtaggataacaatcagtgtggatttccactcttttcagtcccttcatgttaaagatttagaccacccaccataccaacctgggtaaaggaccggttttcctttggaaggaagttttaactatatgtaaacattgtataatgatatggaataaaatgcacattttaggacattttctaaaaaaaaa

SEQ ID NO: 544466 - DNA, 328 bp, Homo sapiens
aatgtcactagagagagggctgcgagagaggtctaaaaaagatacaaaacaagaaaactggaagaaaaccctaaagtactggctttatttgataacattcatggcttcatgaactttggaaaagtgaaattgttacttgttatgagttgatgacagtggttgttttgagaattttcaggtggcacaagattgactagcagccatttaaaatatgtccttatgggaagagaagctaattgctgcaaatcagctaacaagtagttggggtagtttggggtcctttcttgacctattggatttgtctacgcactcaagaatctcctcgatc

SEQ ID NO: 544467 - DNA, 145 bp, Homo sapiens
gagtgtgttgcttgggaatgcagcgagagcgggtggtagactctatctaaggttaaatagcggacgagtaccgatagtcaagaagtaccgtatgggtatgttgataagaactttgaagagagagttcaggagagcgatctacagg

SEQ ID NO: 544468 - DNA, 400 bp, Homo sapiens
  misc_feature (60)..(60): n is a, c, g, or t
ggcacgagcggcacgagacttgatgtgattccgtttgttgatttttgctttggttacctntgcttgtggggtactgctcaataaatttttgtccagaccaatgtcctggagagtttccctgatgttttcctataatggttttatagtttgaggtcttagatttaagcctttcatccattttgatttgatttttgtgtatggtaagagatagtggtctagtttcattcttctgcatatgagtatccagttttcccagcaccatttattgaagagattgtcctttccccaatgtatgttcttgggcacctttgtcaaatatgagttcactgtggggtgtgtgaatctgtttctggggttcccagttctgttccattgggtctatgtgtctgtttttatggcc

SEQ ID NO: 544469 - DNA, 109 bp, Homo sapiens
agatcctaatgaggttctagagtgttcagattgaacagtagatatgatggtgccaggatgtttgaatggactgttctatagtttgggtgcaaaatattctgggcaaaaa

SEQ ID NO: 544470 - DNA, 486 bp, Homo sapiens
  misc_feature (52)..(52): n is a, c, g, or t
ctctccagtctcgtctcagccacctcacccagatgacacccacgcggccctntggcggaaaaatatccgcaactcgaagcagggaaggaggatatcagccgcgagaccttcacaagacgaagggctgaaccgggaggcgaagtttctcaggaggtcccggagtcagaggaggggtaggagtggggtgacggccccaggcgaggaggaacaaagctactagaagagcggggcgcatccctccccggtgctccaagtcccctctccggccgcccgggccttagcagggttgtggactgaaagtccgggagaatacccccttccctctccaaagcgcaacccggtccgggtggctcgggggatcccagcccgggacacgcagccctgggacgaaggaggtcccgggccaagaacaaagggtggggcgcccggcccagccccgccgcccctcacgcccgccctctgaatgggaccccggccggcggccgc

SEQ ID NO: 544471 - DNA, 225 bp, Homo sapiens
agtgttctgatatatgagtgtgagtaggagtagggaagaaggaggagcacgggcaggaaaaggtcaggcatgagaagctcggtgtctcagtcccatctcccacttcgtgaatctaacaccacacataccaatgccatgtctgatagtcctgccccaactcatgttcaggccccagcaccctctttattttctttgcactcatgaagccctacccacaaacacctg

SEQ ID NO: 544472 - DNA, 473 bp, Homo sapiens
gctggtatttcctatcacataagagtgtgctataaatgtgaatataatcttgtgtccacttgtgtttacgcttgtgacacatctctgtggccacatatctcttctcccacatatacatcacacgctctatatgcccacgcagtctcctgtggaaaaagtatagagccctacaaagttatagatctcagatacacatgtgcgcaccgatgttatgcgcacagtgagagtaaccatatatatttagatatgcaacactcctataacgccttggtgtgaacgcactctctcacctctctccaatcacaaaggggcgcttgtgtccttccacagccatatgctgtgcttgcgcatttatatctctgtgcccttgtgtgcacatttttctttggaaatctgtgttaagagtctctctgtgatttaagagcgcctcactcctcgcgtgaaatactcgcacagcgcgggatacccactag

SEQ ID NO: 544473 - DNA, 106 bp, Homo sapiens
tcgaggattctaggttcttagggagatatgctggctgttaagaagggactggacccatacaatgtactggccccaaagggagcttcaggcaccagagaagcaccta

SEQ ID NO: 544474 - DNA, 197 bp, Homo sapiens
ggggcaggcaatagggggcctttcccttcctttcctttttcaggccttgctcccccaggatgacccccttttaggggggtggtggcatttggacaaattcccccccagcaggtggggtggcaaaactacctggaatggatttgtgtgctgatttttaaggattattacaaataattaaacagaacggtcagccttca

SEQ ID NO: 544475 - DNA, 436 bp, Homo sapiens
  misc_feature (118)..(118): n is a, c, g, or t
  misc_feature (149)..(149): n is a, c, g, or t
  misc_feature (332)..(332): n is a, c, g, or t
  misc_feature (391)..(391): n is a, c, g, or t
cccacgcgtcgggagctgctgcgacagtccactacctttttcgagagtgactcccgtgtcccaaggcttcccagagtcgacacctgtgcggctgcaggcaccggcgcgtcgagtttcncggcgtcgcggaaggaccgtagctcttctcngcggatccaggtgttccgtgttccagcgccccaagtctcacgagccgacgccgacagagagcagggaaccggcatggccaaagccgcggcgtaatcgagcatccgaaccgtgtggcaccgacctacgtcctgtcgtgggggtgtccaacacggaaggtggagatcatcgccaatcgaccaggngcaagcgcaccagccccagctacgtggccttcacgtgacaccgagcgtgctcatcgggngatgcggcctaagaagccccaggtggcgcctgaacccgcagagac

SEQ ID NO: 544476 - DNA, 178 bp, Homo sapiens
tttagcaagtagcgcaattacccacgctaaagacgttaggtcaaggtgtaacccgatgaggtggcggcgaaatgggctacattttctaccccgagaaaactacgatagcccttatgaaacttaagggtcgaaggtggatttagcagtacactgagtgtagaacttgaacgggtaccga

SEQ ID NO: 544477 - DNA, 292 bp, Homo sapiens
gcatgtgtacgacattgcagatttggtcgttatgaatacatattattagagaaagtgtgcatcatcattgtcgcaatgggccgcatcagcatagctggggctatctgtccaggagcgctaggttctacacgaatactttatagagtcctgtgtgtgcaagttttctcctgaaatgatcgtcaaagtgcccgcaggttgtttgtgattagctgtctctaacaattgttcatacaataattgttcattattgttctcaacttggggctctccccaacctggggacccttcctta

SEQ ID NO: 544478 - DNA, 1691 bp, Homo sapiens
  misc_feature (534)..(534): n is a, c, g, or t
  misc_feature (618)..(618): n is a, c, g, or t
  misc_feature (705)..(705): n is a, c, g, or t
atttggtcgcccccgcaggaggtctctcttgctgtgggagggcagctctctctgagtgtggtttcccccccgcgctcgtggtggttttttggtggtatactacacaacctctgtgattggggggtgctactagcgccccccaccaccccttcattatatggcctttgtgggacatatgcgtttttgtgcgcggcgggcggacaaactattaatcagttggtggtgtgtgttgtgttcctccgtcaaccggtcgagctaatggtcctttccccatccttgttggtagtagagattttgtgttcttagtgttcgtccgcggcgggggtgctaggtccttcttgtgtgggccacccatattttggcgggggggacccctaccccacattgtgttgctcgcctccgtcccccgggggtatcaccgtctgtgttgttgtagtgacccgcactgtgtggggagccaccgccgccaataaggaggcccttctttattatgaggggggcgcccgctgccagcaacccaagaggaggctgttnttttccccccacaccacctttggtcgtagtataagttgctgtgtccggtagtgtttacgtaggccccccactcagggttcaccnccctctgtgttattagtaagtcatctctcttcggttgtttcaccacctgccacccccagcaggttgtttcaccccagctttggtggngtgctgttgagaacacacttcctctccagtaggggagtagccccccatcactggtgttgcggcctttgtctgttcttcccagcccctccccctcagaacttcccgcgaggccccccccgcagcggtttgtctaaaagagcgatatgagtagatggcgtcacaactgtggtctgtcctcctctcacagagacgtcacacgccgcgcaataggagagagagcggggacgagagggtcctctgcgagagagttctctctcgggagagatgtcgcggtgtttttgtgggctgagtatctctatcacttctgggtgctactctcaaatagcgaggagcacaacacacagctgtggtatgtgttatagcttttgtggttttggtttttctggttgtttatatatcctccttgtctttctcttctctcttcgtaagaattcgtcgcggaggagacagcatctcatcagcgtcatctcgtcgtaccgccactcgtcgtttggtctatagggcgcacagcgctcatgttgtcttgtatcccagcgcagcacggcgcacatcgtagagattgttatcaagcaggttatagcgagaagcgggtgcgcgggtggtctcacagcggagttcacactctcgggagattctctgtagacacacactgtgagtaaacatttacacaccctcggccacacgctcgcgctcttaaagacctctgtccccacactctcgcgggtgaatctcgccacgagagcttgagagcttggcccacgggagaggggctatagagaagggttgggggcctcggaacacccctcccaccgcggagaggagagttccacattctcgggttcttccacttctatagaacctcgtttacaacatgaaaaatataaaatatactcccctgtttcatgaaaaccccttgatgttcccagtattaagacctaatgccatattttttaccttttctaataaaccaggtttgtttaaaccca

SEQ ID NO: 544479 - DNA, 82 bp, Homo sapiens
  misc_feature (9)..(9): n is a, c, g, or t
  misc_feature (32)..(32): n is a, c, g, or t
catggattntgctggtgcaggtacaactaggncttaatagggacccctattaagcctagtagaaccttccaaaaaaaaaaaa

SEQ ID NO: 544480 - DNA, 997 bp, Homo sapiens
ggttcgcagcccctgaatcctatgaggaacgtgagatctctgttgttagtgaagatcgatggatagagcagcttttggtggtggcagagaattcagaagtgcaaccacccgagtctcgcagcaaggaatacagaaggcgaaatattaggaagaagactgctttggcttatcttgttggaagtacgtcggcgatttggctacagatgacccaccagaccgtcacaggtcacttgatagagttggttgtgcacgttatatcatcgtttgcctagatgttttcctgaatctgcaagtgacgctatcaaatttgttctccgagatgcgatgcatgagatggaagacaagtgattgagaccaaaggccgggcggcactcgccagggttggatgtgctcagttgtagtttgaagacatcacatgtggctgcgtatttccagaccttcgcgacttctggcacccagtggtgacccctgccctcgtgtgcctcagtcagttgctcaccagagtgccccatcctgtccctccaggacgtggtgaaggggcctagttcgtgtgctgcctgtttcctggatgtatgtggctttgtccccagaggtttactacctgagctatattcaattttcttcttgggattcgttgtagcatagacaacgtccaaatgaaacgctgagccgaaggtttccacgtctggtgcaccctttcagagcgcttgggaagaactcggaactgctcgtggtgtcctgcgtagagaggatgtcgggcacgtgggcagcatgaggacgcctctccctccggtgtgcgagtcagactgagggccccaaattcgacaagagggcaaatcacattccgacttgtcctgcctgggtgtgggcctggccctgctgaaggcgcttggtgctcactgtacgggtccctgccatccttccaaagccattcatgggggctctcgaacccttcctccaggatcacctggcggattgcagcaccgaaggaattcca

SEQ ID NO: 544481 - DNA, 159 bp, Homo sapiens
tcagggtgcaggtgttcagagctgcaagcaggcgggggatctaagcccagtggggacatgcgaacgtaaacagtgcgccaaagggaccgtgttgctgtctttgcccccagagcgagtgagtaacaccatcctgcaacattgtttgtgcggggcccaaga

SEQ ID NO: 544482 - DNA, 362 bp, Homo sapiens
ttttttttttttaccaagttcataattttattatactctgaatagagatgatatttaaggagcagagaaaaatgctaaaacaaagaatttaaagaaaatccattaacaaacgggaaaaatccttaacagaaccaaaaaagtaaaaatttgccttaccagggcggagaggcgttaccagggaattggtgctgagaataaatgcccaggggcttttaacatggccatagcttaacactggaggaatacaacaatacgttcttttactgagtagttagtaggaccctggctaaaacatgcgttgggcacagttcgtgaactctccgcatttactccccagggcagtacggtgctgtccagcggga

SEQ ID NO: 544483 - DNA, 1117 bp, Homo sapiens
gatgttacgttgttatgagcggtatagtaggtgagtgtttagggaatgttgggtggatgttgggtatatctagtgtaagggtggatgcttaggggtgataagggttaaatgttggtgagaggtatgactagggatatgatggatgaaaaacttttagggcgagttgtgtcgtgtatggattgtgataggtgatgtgttgatgggtgattgggggaattgttaaagggggtatcgataggggcaaggaatctgggggtgaggttttggtggaggtagtctgggccaatgtgtgtgtcgtgtgaaggagtgggtaagatggtggtgaagcgcgcgtcagtttatagggggaactgtgtgaggttaatcttacttgtgaagtaagggtaggagagtgtacacagtgaggtgaatctggtagagggagagatccgatgagctgaattcgaggtggtagcagaagaattgctggcaatgtgcggcttatcgtgagaggtgagtagtgtagcagtctggtcgcatagtcaacaaagaagcggaaggatcccacttttggagaattttgttgagttagctggtagtcgaccctacattggtatctacctgggaactacttgactggaatcaacacgttcgtgctagcgtcagtgacaggctggtgagttgctttaaagtgcatgatgcgaagtaggtcacaatcgtacttggtgacctagtacatcggatggtctgccagaagcagagttagaccgaatacaataaacagtgcacagtttgctactttcgatactttagccacggtccagtggattgcttctcaaagcagacgtcttcgtggcaagcacctcactgtgctctctgaaagagcctgaggccgggctgtggtggctcagcgcctgtaatcccatgcactgttggcgaggccaacggctgcggcagatcatggatggtcacggagactcgagaccattctggccaacatagtgaaaccccatctctactaaaaatacaaaaaattagccgggcgtggtggcgtgtgccctgtagtcccagctagcttgggagggctgaggtcaggagaactcgcttgaacctgagaagttaaggtagcagtgagctg

SEQ ID NO: 544484 - DNA, 796 bp, Homo sapiens
gtgatagagcaaagcatcaaagaatctttaaggaaggttttaaaaaaaaaaaaaaaaaaaaaaatgggttgcctctgccttggggaccctgagtccagaatgggtccacaatggtgatttctatgggtggatgtcatctcacctagacaaccagaggctgggctttggagggctaacctccaacacagcggcttctccagatgcctcagtaaggcatccagtatgtcactctggtgttccctttaaagagcaatcctgggaaaaagcaggacgggagggttggcttggctggtcggttggggacattggcaattcttagaccgggcagcaggcggctcgcttgacaagtttgggagggaaactttgaagatctggggtttttcaaattgggaatcggtctacagtgggggtaagaaaacgctgggtctgggagttcgctgaatgttggcttaaatgggtgccctggtggacctggggctcgactggacatctaacaattttggaaacccctggataggaacaacaccacaacacacaccaaacaccacaacaccaccagccacccagcactaccacaaccagcgaacaaaaaactgacaaacagaaacaaacacacagttggtgggcggcgccgcggcgccccccaaggaaagaagtcttccaaaacacacccgagagggggggacggggccccccaagtgaggttaccagagccaggctcgacaacgaggcctccagcagaaaaaaactgcggccgcaaacagccggggggggggcctccccacaaaggaaaagg

SEQ ID NO: 544485 - DNA, 386 bp, Homo sapiens
gggggcccacccaattaatttgggttggccccccctttgggcccccccgggtttcccctttttgcttccgggttgttttttggggggaattggggggggatacccttttcccccggggaaccggtttgccatgtttgggatttttttcgccccccctttagggattttggccccccgggccaaaattttggcccggggggggagggtgggggccctgttggtttaattttttgggggtgttcccccaggggggggggggcccccccctgccccccccccttggtttttttcccctttttttatttttttttttttccgccccggttttgggccccttccttctttttggcccccggggcaaatttaagggggcggtttaattccta

SEQ ID NO: 544486 - DNA, 102 bp, Homo sapiens
tgtgaggtattcatcagaatcaatatcttcccaatcgtctccatccaggtcctcttcctccttaccgctgtcatcctcctcatctgaacccacatcttcgat

SEQ ID NO: 544487 - DNA, 106 bp, Homo sapiens
gatgcatataattcatatcttgaagattatgctttgattttaaaatattttgcttcaaataagggattcgacagtagtgaagatgcaaaacaatataatcttgata

SEQ ID NO: 544488 - DNA, 191 bp, Homo sapiens
ggtatcaagtggtagtcaagaatgttacaataggatgaatctgtacgtatacccgcgaatggtatagggcgaaagtggctcgtatcaaagaactactccccgactgtggtatcagtgacagagtatcatcggcagtgtataggtacgtgagcacagaggaagatcatccaagagacactcaggcatcatgc

SEQ ID NO: 544489 - DNA, 442 bp, Homo sapiens
  misc_feature (71)..(71): n is a, c, g, or t
  misc_feature (207)..(207): n is a, c, g, or t
agtcggcccagaaagggttccagcaaagacgacagaagctgctccagccaaaatgattttcccaaaagganaactgagtctcaacctgacagagcttccagatccagctaccgattctgaacacaccaggacggagggtactaagagctttagtttgggaagatggaaagttctggagatggatggtggtggtgatcgcacaacccnatgaatgcgctaatgccgctgaactgtgcacttaaagatggttaccgtggtcaactgtattagttacgtgtattttatcacaatttaaaaaaaaaaactttaaaagaagtagtgcaagcaaagccagaccaagaaactgtagctgagcccaggcctctccaacgtgagcctcgggaggaaactggagagggggagtttgggggagagagtggcgaagaagctgagggcggccgct

SEQ ID NO: 544490 - DNA, 473 bp, Homo sapiens
  misc_feature (78)..(78): n is a, c, g, or t
  misc_feature (195)..(195): n is a, c, g, or t
ggaggatgctggtagcagatgagttgggagtggattgcatggtgcaaccagagagccagatatatggagtgatcactnatttcagactgatccagatttgccgcctggctggaaaagagtcagtgacattgccgggacctattattggcacatcccaacaggaacgactcagtgggaacggcccgtctccatccnagcagatctccagggttctaggaaagggtcacttagttctgtaacgccatctcccaccccagagaacgaggatttgcatgcagccactgttaacccggaccccagtttaaaagagtttgaaggagcaaccctacgctatgcatctttgaaactcagaaatgccccacaccctgatgatgatgattcttgtagtatcaacagtgacccagaagccaagtgttttgctgtgcgttctctgggatgggtagagatggcagaagaggacctcacccccaaaa

SEQ ID NO: 544491 - DNA, 1725 bp, Homo sapiens
  misc_feature (213)..(213): n is a, c, g, or t
  misc_feature (319)..(319): n is a, c, g, or t
  misc_feature (346)..(346): n is a, c, g, or t
  misc_feature (756)..(756): n is a, c, g, or t
tatactaacagcacttacttacgtattcatacacacacggggacagactacggtacggacgtacgcggtggtaccacgggccactagacgtgtggggacggacacgtgggggtgggttgtgtggtatgtgttccacacaccgtggccactttctactttttaaccggtgtggttacacacataccgtggggacgatacggtggtgacatggangggtggaggatacacacatctacgggcgtatacgggtaccacacgtctcacagcgggttctcacgggcgcgggggtgacgtgggtggcgctctactgtgcacgtgnggtgcgcgagacagtgacgtgacgcgncactctgtgtgggtgtttgtgtgggtgacaacttctcttctgcgcaccatacacgtggcccccacttgtgtggggccacacacacacacgccccgggtgtctcagagccgggggaggcggcgcagaggccctctccctctgcaagggggagacagcagagacagaggcgggtgagagagtggggcaccaattatcaggaggggggggtgtgtcaacagactcacagtgtgtcatcacgactgtgtggtgttccccacaaggggggtgtgccgacacaaccacatcacgaggtcaacgacatcacggggcgcctcccgggtggggggcggcccgcgtgggcgagggtttcacaacgacgttgtggtgcaacgccatcaacgacgatcaggccgccaacaacgtcgccgcgnggcacaacgaccaccagagcgtttcaacgcggcaaccatcaccatttctcttaaccaccatctcatgtgttatcaccacatttttctcaccaccaccacatgtgtggggttcccaacgtcggtcttaccacggcggggattgttgtaataccgccggcggtgtaaacccaaacaccctcggggggcattatctttataatcattctaccacattctcccatcaatgtcggtggtggcggggataacacctcggggagccggggagacggcatatcgttggctccatcacagcgacaaccatcttgtgggggcggccgaataaaaccgcgttgggggggggcgtttctgggggggggagttattacaacaagtccccccaacccctcctcacaagacggtcgtggtgccgcggtgggcataaagtaggacccggggcacacctaacaccaggaaccgtgtgggacagcaccagcaacgtgttcgaacccgcggcaacacacaccagagggggcgcactaactacacgcggcagttatcacaccgcggagggacgaggcggcaacgcacaccaaccttcgtggggggagacaacacactcacctacagaccttgtgggagccaccaaccccgggggggggggcgcacaaaacagatcatttgtgggttcccattgtgtgtgtgacacgacacaaacccaacatccgcccacgtggccccccggtcgcatattgtgttcccaccaaaggggggggggtgtgcccccctgtggagggggcaccacccctcctctgtgggggacaccctccacaacaacgtttcgcaacaacgggggggggccacaccactcctctacaagttgtaacagactggggggacaacaagcggcccaactatatacgaacactccaattccacactagggatacacagccactatatgaacgggagggcaaccaaccattgggagtg

SEQ ID NO: 544492 - DNA, 470 bp, Homo sapiens
  misc_feature (75)..(75): n is a, c, g, or t
  misc_feature (192)..(192): n is a, c, g, or t
atttaaattgatggttcaggggaataggtgacgcggcaaccgcaccagctacaggtaatccgggagtgatcactnatttcagactgatccagatttgccgcctggctggaaaagagtcagtgacattgccgggacctattattggcacatcccaacaggaacgactcagtgggaacggcccgtctccatccnagcagatctccagggttctaggaaagggtcacttagttctgtaacgccatctcccaccccagagaacgaggatttgcatgcagccactgttaacccggaccccagtttaaaagagtttgaaggagcaaccctacgctatgcatctttgaaactcagaaatgccccacaccctgatgatgatgattcttgtagtatcaacagtgacccagaagccaagtgttttgctgtgcgttctctgggatgggtagagatggcagaagaggacctcacccccaaaa

SEQ ID NO: 544493 - DNA, 139 bp, Homo sapiens
ttcatactcctctattaactcataatctgtctaagcttcataaataactacttgtaagctttaaattagatagttgagactttatggaggcgtgtggctttaatttgagagactgtcatgaactcccaaagggggtccg

SEQ ID NO: 544494 - DNA, 891 bp, Homo sapiens
  misc_feature (36)..(36): n is a, c, g, or t
  misc_feature (69)..(69): n is a, c, g, or t
  misc_feature (89)..(89): n is a, c, g, or t
  misc_feature (91)..(91): n is a, c, g, or t
  misc_feature (98)..(98): n is a, c, g, or t
  misc_feature (113)..(113): n is a, c, g, or t
  misc_feature (117)..(117): n is a, c, g, or t
  misc_feature (125)..(125): n is a, c, g, or t
  misc_feature (139)..(139): n is a, c, g, or t
  misc_feature (169)..(169): n is a, c, g, or t
  misc_feature (186)..(186): n is a, c, g, or t
  misc_feature (189)..(189): n is a, c, g, or t
  misc_feature (198)..(198): n is a, c, g, or t
  misc_feature (215)..(215): n is a, c, g, or t
  misc_feature (221)..(221): n is a, c, g, or t
  misc_feature (224)..(224): n is a, c, g, or t
  misc_feature (227)..(227): n is a, c, g, or t
  misc_feature (248)..(248): n is a, c, g, or t
  misc_feature (271)..(271): n is a, c, g, or t
  misc_feature (319)..(319): n is a, c, g, or t
  misc_feature (329)..(329): n is a, c, g, or t
  misc_feature (336)..(336): n is a, c, g, or t
  misc_feature (359)..(359): n is a, c, g, or t
  misc_feature (376)..(376): n is a, c, g, or t
  misc_feature (386)..(386): n is a, c, g, or t
  misc_feature (449)..(449): n is a, c, g, or t
  misc_feature (496)..(496): n is a, c, g, or t
  misc_feature (601)..(601): n is a, c, g, or t
  misc_feature (651)..(651): n is a, c, g, or t
  misc_feature (668)..(668): n is a, c, g, or t
  misc_feature (678)..(678): n is a, c, g, or t
  misc_feature (683)..(684): n is a, c, g, or t
  misc_feature (688)..(688): n is a, c, g, or t
  misc_feature (737)..(737): n is a, c, g, or t
  misc_feature (778)..(778): n is a, c, g, or t
  misc_feature (784)..(784): n is a, c, g, or t
  misc_feature (799)..(799): n is a, c, g, or t
  misc_feature (864)..(864): n is a, c, g, or t
ggcagcggcgtctgcgcgcggcataacgacccaggncgcggcgcggcggggcttgagcgcgtggccggngccgcagagccgagcatggngngccaggntgccgtgcgcatgcncaanaccctgcngaccaatgccggcnacctggagcaggtgaagcgccagcgcgggngaccctcagacacagtnggnagccatggnactgtacctggcacggnggggcngcnggnggaggacttggaccggctgancatcatccacgtcactgggacgnaggggaagggctccacctgtgccttcacggaatgtatcctccgaagcnatggcctgangacgggnttctttagctctccccacctggngcaggttcgggtgcggntccgcatcantgggcagcccatcagtcctgagctcttcaccaagtgcttctggcgcctcttccaccggctggnggagaccaaggatggcagcggtgtctccatgcccccctacttccgcntcctgacactcatggccttccacgtcttcctcctagagaaggtggacctggcagtggtggaggtgggcattggcggggcttatgactgcaccaacatcatcaggnagcctgttgtgtgcggagtctcctctcttggcatcgaccacaccagcctnctgggggatatggtggngaagatcgcntggcnnaaanggggcatcttttagctaggtgtccctgccttcactgtgctccaacctgnaggtcccctggcagtgctgagggaccgagcccagcagatcncatgtnctctatacctgtgtncgatgctggaggcctcgaggaaggggggcgccgctgacctgggctggaggggagcacagcggtcnaagcgcttggcttgcagcggccactgc

SEQ ID NO: 544495 - DNA, 100 bp, Homo sapiens
tcaaagaaacgttgtgtttaatggtaaagcttaacacacccctgcacctaaaatggggtggagtttctctttcaacaggccggtgaccccccatggagcc

SEQ ID NO: 544496 - DNA, 443 bp, Homo sapiens
agtttcttctcctaaatctgagaggtgacttgtttccagtggccaagacatcaccaaaagcaaccatttgattgtgcacaccaggaaaaaaagtggacttgaggaggcgaatgatagggaacacccactaatttatgttaaagtcaaaacattttaggccaggcgtggtggctcatgcctgtaatcccagcactttgggaggccaaggcaggtggatcacctgaggccaggtattcgagatcagcctggccaacatggtgaaaccgtgtctatactaaaaacacacaaaaaaattagccaggcatggtggcggacgcctataatcccagctactcgagaggctgaggcaggagaattgcttgaaccaaggaggcagaggttgcagtgagccaagaccacgccaacgcactccagcctgggcaacgagagtgaaactccatctc

SEQ ID NO: 544497 - DNA, 141 bp, Homo sapiens
cctctccaactggtctctctctctctccacactggctctctctctctctccacactggctctgggactgtgttgacttcagtcagcacatgatgttactgatgcatttggagctgtgtcaacgaacccagtgtggagagag

SEQ ID NO: 544498 - DNA, 1540 bp, Homo sapiens
  misc_feature (164)..(164): n is a, c, g, or t
  misc_feature (335)..(335): n is a, c, g, or t
  misc_feature (500)..(500): n is a, c, g, or t
  misc_feature (561)..(561): n is a, c, g, or t
  misc_feature (572)..(572): n is a, c, g, or t
  misc_feature (596)..(596): n is a, c, g, or t
  misc_feature (613)..(613): n is a, c, g, or t
  misc_feature (867)..(867): n is a, c, g, or t
  misc_feature (884)..(884): n is a, c, g, or t
  misc_feature (957)..(957): n is a, c, g, or t
  misc_feature (978)..(978): n is a, c, g, or t
  misc_feature (1005)..(1005): n is a, c, g, or t
  misc_feature (1016)..(1016): n is a, c, g, or t
  misc_feature (1154)..(1154): n is a, c, g, or t
  misc_feature (1206)..(1206): n is a, c, g, or t
  misc_feature (1389)..(1389): n is a, c, g, or t
ggtgtgtgatctaggtagatctgctagtagtgctcgagtgtcgctttttaagggtacgtcaccgggctggcagtagcaatacgtacgctatggttatagaaaaatatttacgccgagcgtagagggagattatgtgtgcgtagtaacgagaggactgcacactnctgagcacacactctacgactcacaccgcagcacttcaatgcacatcgcttacgctctccacaccaacgcttctaccctagcccacccacacagaactcctcctcgctgactattatatactatgttaatttgttgttacgactgatgctcagtatatacgagacactgcntcgctacaatcgcattactatatggctgtattaatcctgaatgtatggctacagtactcgcgatgtattagcatgttggatgcgcgtttcgtgttgtgcccgaacatgcagtggcgcccgtattagtacagactgctctgaactacaccacgtatctgatgatgntgttcaccacttattcgctgtatgtgccacgcaccgctcattctgcgtgactctaattcanatatcacatancaaatatgcttgttcacacctcanagtcatacgacacacanaccagtactaactaagaatagacacactatgtacacaggcaacgatcatcacgcccgacgctatatagtgtgttcgaataaatgaccctgctcgacgcgtgcgcgtcactctataccgaatcttcaccacctatcgtccgattgtcactacgtataacatttctcagtatgtcatatcactatgcaaaccgccaggtccggacaacgtctcctcacctgaacgcgagctcggcgtgatggcatagacatgactntgagactacagagtcancacgatcatctcggagaccagtgtgactctgatttctcacctctatacacagtgcggaaggagatgcggtagnatagcagtgtgcgactatccnccacgaattttcatgatccgtctagtncgtgccgttantactccacatcatctccgatctatcatctagacactctcgtgacgattctaatacatacatgtatactgtcgtaagagacacatatatctgctgctgtgatgtgtcgcactctcgcggatcgctggctatgatacacnccatctctagcgtctcgactagtgcctaccgcgagatgtcggcacgtgatangtgacaggcgcgactggtccactagctcattgctgcgctctccatgtcgcgcgcgagtcacgagcgctatcgtcgacacactgagactgtctccgcgtgtaagtgagcacacagataatctattggatagagacatctatgatcgaccgctagactatcgcagttaatgagcgtcatctcacngacgacacaagtcagcaagacagtaccgagcccactgaattgcaccgcatgtatactacgttaccgccgcgcatcgtgacgcatagtatgttagacggcttcaatgcgtatagacagtcgatggatccgcgcgctctaatgaactacgagt

SEQ ID NO: 544499 - DNA, 192 bp, Homo sapiens
ctgttacccccaagctctgcattttgttgagctcttcttagtgctcagtattgcactggattctctgcagtgatagtcagactggtgtccctctttcctttctgaagctgcaggacctgtatgcatagcccttgcatcttgatgactaagtttttttttttttggggaccacggggttgtgctgtggtcccc

SEQ ID NO: 544500 - DNA, 299 bp, Homo sapiens
catgatgaacgaatgaatgaatgaatcaacccgagtgcatcgaatggaatcgaatggaatggaatgcaatggaatggatcaacttgaatggaaaggaaagagtggaatcaacacgagtggaatggcatggattggaatggaatggaatggaatcaacccgagtacaggcgaatggaatggaatgaaaagcaatggaatggaatcatcactaatggaatggaaaggaatggaaaggactggaatggaatggaatggaatggaatggaatggaatcaactccattgcaacacggtctctca

SEQ ID NO: 544501 - DNA, 125 bp, Homo sapiens
aatcagtagcaccttttcccattcatttgtgagccaggcagggtacggattagtgtcccctttgacaaatgacagaactgagggctgcaatggggaaatgacttataaagtcacccagcaggtca

SEQ ID NO: 544502 - DNA, 686 bp, Homo sapiens
cgttatttgtgtatcgccccccttttgggcgcgttacttctgcgccctccggtcggacggtggtccccggagctccttggcgcggggaacccgccccctatccttcgtggggtgccacccactatatgccggagggtactcccgttgcccggtccccgcctctatttctccgcgggttttttcgccccttatcccgcctcctgtgggctccccgttgcctattacaagagcacggttctccccctatgagaggccgcccacgaaactggggaacacctcaccccccgaaatttcatactggttggctggtcgcccattacacctcccccactattgggccccttcaattcttgttgggggacaaatacaagatgccccggttgctcgtcgcgctaaatcgcccgctccctgtgggggtttattcacaccacatcaactgtacaagagctgtttgtgagaattcgcgccgcgccgtttgttgttctacaagcaaaaggtggtcgcacgagcccgtggagcgcttttctaaagacctgtgatgtattgttttgtccacccccggggcggcccgatgggccgcggagtatgggaagaacgtggcctctcgcaagagtgtctttgtactcgccatgaccccccaaggttcgttgttttgagaaagaaacaatcgcatcatagaacgagac

SEQ ID NO: 544503 - DNA, 770 bp, Homo sapiens
  misc_feature (435)..(435): n is a, c, g, or t
ttggatagcagtgaagaattgaaagcagctcctaaagattgggtggttggtttgaaaatgtttacacttattcactctaagcacgtggaccattttgatatcagggcctatacattagaacaaaaccagaaatatttctaaatctcaaagaatttataagtacaggtacctctgggctgaaaactcggttaaacaatctttgggatattttttcctttataatctttatggtaattatttctggtaattaaggtggtacattaagggttatttggctacttaacaaggcctaaagggtataggctggtatatatgaatggtggctctggggtttttctggtttcctggcttgggtttggtttctgggtatgaactaaggtctaactttttaatttaaagggaattttggtggtagaattatatctctctactaancttggtacaatagggataaggttatgcagaaattttttgggtatatagaatttggttatatataatggacttttagaattttatttggaaaaagcctactgggaaaggcagtaaatagaacctatagtggatatatatatgatacatagcatatatacttttttctgagaaatggtttatatattattggtcacagaattttgggaggtctttcttaccttatatccattcgggaaacataccttccaattgatttccctaagggtggagaactttattttccaaatggtggactagatcatgttggatccggggtctaggactccgtactttgg

SEQ ID NO: 544504 - DNA, 1066 bp, Homo sapiens
tactgttctatatcatgtactgtggctgacattacaaaaagggtctgggaagggaaaccgtgtcactggttttatcttttttctttaaaatacaaaagtttcccaactaatcatttattatggtcagctggttttacatgtcccctatcatgagaaatgctatcaacatctggggatttctaaagagtcttaccaaattggttactttaattctggtggtcctggctgagtgggtttttcttttaaaataccatttttatcaccctgtgggcactggggtgtgttactggggattaccctggatgattctgagctggggcttcttcaagtagctcagttctggcgtttaatattaaggtacacagtttggtggatgctttggggcattcttggtcatctcttctgagtttcgaatctgtcataaataaactttttcactatgcacctggtaaaaaaaaaaaaacaaaaaaaaaaaaaaaaaaaaaaaaaaaaaaaaaaaaaaaaaaacatacacaaaacacaaacaaggagacaaagagaaaaaaatatagcagaaagaggcaaacaacagaaaacagacaagtgagatagatacaactcaggaaggtgggatgttgttcccaatgacagttgagaaatagggacaacagagaaaaaatagaaagagagaacacaaagagcgaggtgacacaaaacagagaaaaaaaaagaacaaacctaccagctccggacaacaaaaaacaaatgagagacagaggatgagacaccacccacacagaaaacaagaggaaaacacaaagaaacaggaaaagagtcaacgcagagagacgcgggaagggaaaggaagaagggacgtaggtacagcaacgaaaagagcgagagggagtgaaacgaagcaggagaaagcagatcaggacggaacgaaaggcgggggggggcgagagcgggaggaaggaggaaaggagggagcgagggcgggagagggcgagcgcactaacgagaaggaggagatgaagagcaagagatagatacactgagatgagggtgcgatgtgttatgagcaacc

SEQ ID NO: 544505 - DNA, 308 bp, Homo sapiens
aaagcccccccctttttttttaaggagaatggcccagtcctttcccaagtccacacaggggaggggaaagcattggttttgggtaaattatgtaaagcaaaatttttttaattttcgccctaaaacttttttattttgttttattttgaaagaagagcctttgggcccccccttcccccttttttgtcccccaacttgaaaagtatgaagggttttggtttccctgggaggggggggaggcagccaggggttacctgtacactgacttgagaccaagttgaataaaaaggggcccccttaaaaatgga

SEQ ID NO: 544506 - DNA, 846 bp, Homo sapiens
  misc_feature (251)..(251): n is a, c, g, or t
  misc_feature (484)..(484): n is a, c, g, or t
tgggtacttcaggatagcaaatttctttctgctattaaatgtggtaaatgtgacccagggtgtttttttttgtgggttttttttttggagaacagagttcctcactgtggttgcccgggcgtggagtgtgcaggggtgtgcacactccttcggcctcactgtgaagagcctcgtgttccccgggtttcacgcctttctcgtgtggctctcagcctctcccagagttactgtgggcactacgggcacccgcncacaagagagtgtgcccgtgggcctataaattttgggggaattttttagagttaagaagacacgaggggttttctccaccaatgtgtgtggtagccccgaggggagttggtgtcctcaaaactctctccgtgacaccttttgtttgaaacacccacaccagcgtttcttgcgggccctctccccccacagaggtgtggcgggcggaagtcacacggggcggtgtgtgaagccnaccaaacgcttgtggggccccatgttgaaacaccaagtgtgtgtttttttcagagggggaaacacaaaaacatcttattatctttgtaagatactcatactcggaaagtattatttattcatctaacgcctttatttgtggggtatttttttacagaggatatttacttcgtgcgagttgacatgtctggtgagatcttcttgagaatatgtttttgtagcacctattgttttctgtgttataaatattcacggtggtggacacgcctcaaggtttattggggggtatgagatgttcgaaaagtatatctccaagggggggcgtgtcaaaatagtgggggtccaattttggggtaaatttaa

SEQ ID NO: 544507 - DNA, 699 bp, Homo sapiens
atttcattctcacttattttccatttggtcaactgatttgatattacaacaacaaaaaaaaaacattctcagcttgtgtttctggacagtttagacttattcctaatgaggaacaccaattaccttctgtgtttagcacctttatgtgcttaacagtggcagggagtcctagttggtgtctacagtgcatttctagatcatgggggattccaaccactgcgaaatttattcatgcagcaaagagactcacaagtcataagtatttgtggggaggaagagaactaattctttatttcacaaaattgtatatccacatcctatttgtaaaggaagaaagagaataaactaactataaattatcagttctgttaaatggttgaaattagaatcatgattttagagaggctaagcttctattcagaatccagagtgagactattgacaaacatacaaaataatttcactgataaaatgaaacgtagctgaggataaagctagattttgtttttcaagggtttcctgagtatatccaaataatgaagtacaatgttttttcttgtcgaaggtatagtagaaaatggccatgattattctgatattatctagttataccataaacttcccgagagaggaccaaaactagaggagggaaacagcaaatcttcctcgaaaacaatatagaagctaccaggttatcct

SEQ ID NO: 544508 - DNA, 233 bp, Homo sapiens
  misc_feature (80)..(80): n is a, c, g, or t
  misc_feature (101)..(101): n is a, c, g, or t
  misc_feature (166)..(166): n is a, c, g, or t
  misc_feature (197)..(197): n is a, c, g, or t
  misc_feature (209)..(209): n is a, c, g, or t
cttggaatccatggcacagccgggtccctctgcagttcctggggaagctggcattttgctcctcactccgggcggctttnttccacacgaccactgatttnccaagtccccttaagtggggtgcttgcctctcacaggtgttcccaacatggcagctttgtctttnttacttcattttatgcacgcagctcgtattncccacagccctncccgcctgtagattcggcagcctt

SEQ ID NO: 544509 - DNA, 419 bp, Homo sapiens
ggccaaaatggtgaaaccctgtttctactaaaaatacaaacattagctgggcatggtggtgcacacctgtaatcctagctactcaggaggctgaggcacaagaattgcttgaacctgggaggaggaggttgcaagtgagccaagatcacaccacactgcactccagcctgggtgacagagcaagactctgtctcaaaggaaacaaaataaagaaaagaaaagaaaaatatagtggtcttggacgaattcagtgacaggccaaaccattaagtctgtcatcacaagcagaccttagggaactgcaatattatacgtctagtactgacgcagtagagaaccataatgattgcctccccggcaaagaagaaccaacccgtatacgcctgaggttgcaatttctcgaattgatgcaggcagac

SEQ ID NO: 544510 - DNA, 337 bp, Homo sapiens
  misc_feature (59)..(59): n is a, c, g, or t
  misc_feature (110)..(110): n is a, c, g, or t
  misc_feature (160)..(160): n is a, c, g, or t
  misc_feature (299)..(299): n is a, c, g, or t
ctgcttaaagatttagcgacccaacatctaaagtgctggctaaacctacacccaaagcntgaaacttacaaccaaaggccctgctctcaccactcccaaggagcccacgnccaccaactcccaaggagcctgcatctaccacacccaaagagcccacacntaccaccatcaagtctgcacccaccacccccaaggagcctgcacccaccaccaccaagtctgcacccaccactcccaaggagcctgcacccaccactcccaaggagcctgcacccaccaccaccaagtctgcacccacngactcccaaggagcctgcacccaccgagccctatgcag

SEQ ID NO: 544511 - DNA, 310 bp, Homo sapiens
  misc_feature (93)..(93): n is a, c, g, or t
  misc_feature (96)..(96): n is a, c, g, or t
  misc_feature (102)..(102): n is a, c, g, or t
ggggacccttttgggttttgcactttccatcctctcccccttccattggcaatcccacgggttgtcccctgcattttggaaggcacagggggntgncccctnctggtctcccccccccccaatatggacatgtagtatggcctcacaaggtgcccgtccggtcccaggtcccttgtcccttccacagaggccttcctagaagatgcatttagagggtcagccttatcagtgtttaagattttttttttatttttaatttttttgagacagaatttccctttccagcctggacgtcagaccaagactctca

SEQ ID NO: 544512 - DNA, 301 bp, Homo sapiens
catagctgtatgatggttccagtggctgcggagaaaatgagaatgggaaatgatgtttcatgggggatagagtttcagtttgcaagataaaaaagtttgtggatggatggtgatgatggttgtgcaacagtataaatgtgctttatgccactgaactgaacacttaaacttggttaacatgggggccaggcatggtggttcacacctgtcatcccagcacttgaggaggcctaggcaggagaattgtctgagcccaggaattcaagactagcctgggcaacatggtgagaccccctctatt

SEQ ID NO: 544513 - DNA, 393 bp, Homo sapiens
  misc_feature (25)..(25): n is a, c, g, or t
  misc_feature (35)..(36): n is a, c, g, or t
  misc_feature (45)..(45): n is a, c, g, or t
tcggcacgaggctgatcttgtctgnctgtgccttnncctctcttnggggtctctgcatacctccttctcctgctctcctcttcagagcaccccccctagtgtcacaacttctgtgatgcctctccccggatgaactcagcactttccaggggctgttcctgtggcagagccatacagtggaggcatccctgctagaatcggtcacggagccttacacacaggaaaggcttgcgcagattatcagtaacctagtcatgtcttggctccctgatatgttctagttggttgacatagctagtgtcctcagctgactggagaggtaggggtgcacatctcaacaaaaggggttccctttccttactctgcagctgttcatttatattgctcctgcca

SEQ ID NO: 544514 - DNA, 872 bp, Homo sapiens
gctgtcgttaacatcagcttacttcgaccccgccggcaggaggagaccccagttctagtaccagaacacctattctgattttgcggtcaccctgaagttgtatattcttatcctaccaggcttcggaagtaatctgcccatattgtaacttactactgccggaacaaaaagaaccattctggatacactaggctagtgggtctgacgactatgcatagtcaacttggcctttccgtagggtttactcgtgtgagctacaccactatagtttacagatagggaagtagacgttagacacacgagcagtatgtgtcaacctccgtcagccactaaatcatcgcttagtccccagccggcggtcaaagtactgttagcctgagctcgccacactccacggaaaggcaatatcgaaactgatctgctgcagtgcctcctgacgcccgtaaggattcacttctatctcttctgcaccgtagagtgagcctgacgtgggcaatttgtgtagttacgcaaaactcatcggcttagacattcgggactagaacggagcgactgtacgtaccgtgtgtagtctcacttccactagtgtcgctaatcaattaggggctgtatgtgcgcatcagtaggagggctctcagtgcacgcgtggagtttcccctattctcgggctcacacccttagaccagaaggctacgccagaaatccatttcgctatcatattcatcggcgtaaatctaagcttgtcttcccacaacactttctcggcttatccggaatgccccgacgttactcggacttaccccgaatgcatacaacacattgaaatatcctatcatctggtaggcgtcaatcatttctctaaccagcagtaa

SEQ ID NO: 544515 - DNA, 177 bp, Homo sapiens
ttgggaatattaacacaaattccttccccttgaatagaaatggtctgtcatattagcaatcttgctgtgtcagccttgctattgttaaacacaacacatgatgggaagatcaatatactctttagaatttgtccagtgaggaatcctttgacgtggggatgcagagctgcgcctgaa

SEQ ID NO: 544516 - DNA, 541 bp, Homo sapiens
cttggagtgcagtgcactccagcctgggcaacagagagtgaaacttcgtctcaaaaaaaaaaaaaaaaattatgtagggcgggggcgtaagggctcatgcctgtaatcccaccattttgagagggctagggcaggaggattgcttgaagggcaggaggattgcttgacggcgggatttgaaaacacgcctcggcaacacagtgacaccttatctctacaaaaagataaaaaatgcgccgagggtggtgggcgcatgcctctagtcccagctactccaggaggctgaggcaagaggatcacttcagcccaggaattggaggttccagtgagctaggaccgcacacatgccactcaaagcctgcgcaactgagggaaactccatctcaaaaacaaaaacaaacaagagaacccccaatgtcatccaaaatcattctaacagcaatccagtttctttcccagtcccttcccatcagacacgggtggctcatttgtatcacccaaacacacatggggctgtcgcgcttattcactaacccgatac

SEQ ID NO: 544517 - DNA, 362 bp, Homo sapiens
ctcccatcaggtcatgtgaacttacagttacacaaatcagaaacaaatggtacatccaaaaccatatacggaaatatcatgatgcccagatgatgaagactggggtgaattaagtccacacatttatttcaagttgttaaagagtttgtgggccacgcaatgatccctcgcatgcaagaagtcaaagagctcctccgtgcaatcctcttctgtatgtgatcgagaggatacgcgctcatcacagagctctagccgctcccgggcctttacacatttctccaactgctcgcattgctcactcactgttgttaggggatccactaattcctcctcttcctcttcctcctcctcaggatctccgg

SEQ ID NO: 544518 - DNA, 336 bp, Homo sapiens
ctatgctatcactccaggcatttagcacataaggctacagtaatagcttcatctcttcacaacatgacaggcacacgtcttcatgcacaggcacgttaagagaccagagggtggtcacaagatgatgtttctcctgaaacagtggctactcccactggctgaaaatagaaaggctagagcaagacggccaaacagagccctccagcgcttgtctccatgcaggaccaccaaactgaacaactgtaccccaaaaggaaagcacctttaggccggatgcggtggctcacgtcagtaatcccagaactttgggaggctaacattgggcaaatcacttga

SEQ ID NO: 544519 - DNA, 1132 bp, Homo sapiens
ctagttctagatcgcgacggccgccctttttgttgtcttcatcttctagagcttcatctttctctagtatgaacatcctacatactgggaagtaaaatatgagttgctacaggacgaggaggacatcttgatatagacagcacgaataggggagcaccccaggaacaaaggaaagactgggctacgcgataagagctcgggccctcgcgcggggatacacatagaagaacggagcgcgcctagcaaccagcaagcgcgaggcaagcgacacaccagacggagcgcgcacaagacacataacaaacaacgaccagacgcaccgcagggcaccgcgacacggggaagcgagcgcgaagagcgcggcaccgcacgccagaccacaaaaaaacacgcgcaaacaaccggaccagggaggcaaaatagacaaagaaacaagagaacggaaaaacgaggacagaaacaacaacagacatgaaagaagaagagagagaacagaaaaagccaacacatgagggacccaccaaaacgaagagagagccgaaagaacaacgaacaggagaagaaacaaaaagcaagaggacgaactctacgacacacaagagaggaagaagacgggaacgagacacacgacaagacaaaggacacacacgaagggaaaaaatgagacaggagacagaaaccgaaacacacaggggagcgaggagggcaccgcatcaaaggaagccgcacagccacacagggaaggagaccaagaccacaccacggacaggtgaaaaagcgggcagaaagcccagaagcgtccatacacagcaaggagacgatgaaagcgcgcggacagacggacaacacggaaggaccagggtgcaacgcaaaagcacgacggacacgcgaagacacggagggcgcagaagcacggagatgccaaacgcaaaacgagcagcaggagaagaagaacgtacagacgagaagaactgacatagctcgcacaggggagaagagacgaagaggaagagccagcgcgacgagcaacgacatgcagcgaggaacaagaggcgacagagggagacagagacagagacgacgcagacgagaaacgacgaaggcgagacacgagatagcagagacgtagcat

SEQ ID NO: 544520 - DNA, 382 bp, Homo sapiens
cgtcgacccttcacctagtctttctgatcctagcttcaaattttatggaagattctatctgaagagaataatattgagagtgatagagagtactgggaatcctcttttgacctctatgagtgaggatgtttgtgggtcagtacagacacatgtgcatatatatgtgtacatggacacactatattctcactataaaaataatgaagaaaaataggaacatagagaataacagaggaagatattcaaaaataacctatagcctgcacaaatgtgcacatgtgtgcacatgcacctgtgtgtccatgtgcatgcacacatgtccgtgcacgcgcacgaacgtgcacacacacacacatatatataatcttttttttgtcgacgc

SEQ ID NO: 544521 - DNA, 222 bp, Homo sapiens
  misc_feature (20)..(20): n is a, c, g, or t
  misc_feature (179)..(179): n is a, c, g, or t
agggctcgggatacgtcaanaggattatgaggcaatcagtaaatggcccaacaccatttctggcacaaagtagatactgggaaaacaattccttccctttctttccccaaatgttgaaggtgccagctatttcttccctgcaagtggcttccccgtcccagatagagcatgttcatctncacgcgagagttagataggcatccacaggtcttcgcgcggagg

SEQ ID NO: 544522 - DNA, 1080 bp, Homo sapiens
ctggtgtgcacacgcctgtgtaacacatgcacctgtgggagctgagactgtgaagggatctgcctgatgcccagtgatttttgaacaccatctcctgtgtgcaaacacatgtgagacccctgtatctacaaaacaaatacacattatgccagtgcatgtgctggcatgctgcctggtgtgtcccaagtactcgtggaggtagaggagagaaaaatcacttgatgcccatgagatggtcaatgtgctaccatgtggatgctaatgatctgcatcacttgtactccagctggtgtgtgaaactgtgcgagactcttacctcaaaaataaataaatacatacataattaataaataaaacatcaaagaccagccgacctaactccatctaacaatacacaacttctacgcaaaatataaataaaattagaaaacaaactacacatctcatgaaaacagcactagcaacttagacgacatactaaaggccaaaaataccctcctgacacacagctaactaacagcaacaagtcaactattccagttacaacagaagacaaggaaactggctgtggtggcttatgcctgtaatcccagtgctttgggaaggccaggagtctgagaccaggatggacagccatagcaagaccccatctctacacaggacaccacacaagaatcaggcaggcatggatggagtggacgctggaaaaccaaactaactcgcggcgctgacagaggaaggaatcgctgagaccaggcaggccgagggccaggcacgaagctaatacctgtaggccactggccaaccaaacctggagcgacatgacgacagaccccaggccacgacaagaacagcagcaggtcaaccagccaagaaacaagcataccgtaatgtgactggcacacacggtcggcaccacacctgagtcaacccaaaacacatgtggaggcccatactgcctggtacactacaatccctagaatcacacaccccggtccgacggtgtgacaacgtcgctactatagataaaacaatcgattaccgtgctcagcccacctgccatgtgccacggtcttcttc

SEQ ID NO: 544523 - DNA, 627 bp, Homo sapiens
atggtacccactattctgttcagggacatcaggaaccagagctgtagtacatcaagctactgccacccatgaggagtcttaacgacagtcctcgatcgagcacgttatagattactaggactattcaacacatcttggttaaaaaaaaattgaatgaccccttttgagggggtttagggtgaactgttgactcgtgaaatggactttgatttaccttctagaacctgtaaccccataacactattgtctagctaacactgaggccctgccctgcctgtattgctctctctgcctagtccagtcctgggcacctcaccctgagcccctgggaacctggaggactgctcctcagacctcctggaagctccttcagccagtgagcctctcactgcaccactaggtagggggctgttaggtgcactaactgtgtctgagtgtcctagagtctccctcagtgttttgttgggccagtgtgcggggacactggggcttctggatgtggtgttcggtgggccacaggcaccagcagcgaccctgtggcacaccaggggtgttggttcagatcagtctcccctgagggaggtggcttggcacttcactctagctgctacagaactcaagtgcagg

SEQ ID NO: 544524 - DNA, 235 bp, Homo sapiens
  misc_feature (195)..(195): n is a, c, g, or t
caaagaagtttctgagaatgcttctgtctagattttatatgaagatatcccctttccaacgaatccctctaagctatccaaatatccacctgcagattctacaaaaagagtgtttccaaaatgctgtatcaaaacaaagtttcaactctgttagttgaggacacacatcacaaataagtttctgaggatgcttcngtctagtttttattcgaagatatttcctttctcaccatag

SEQ ID NO: 544525 - DNA, 551 bp, Homo sapiens
  misc_feature (11)..(12): n is a, c, g, or t
  misc_feature (18)..(19): n is a, c, g, or t
  misc_feature (21)..(21): n is a, c, g, or t
  misc_feature (49)..(49): n is a, c, g, or t
  misc_feature (78)..(78): n is a, c, g, or t
  misc_feature (102)..(103): n is a, c, g, or t
  misc_feature (116)..(117): n is a, c, g, or t
  misc_feature (122)..(122): n is a, c, g, or t
  misc_feature (140)..(141): n is a, c, g, or t
  misc_feature (153)..(153): n is a, c, g, or t
  misc_feature (157)..(157): n is a, c, g, or t
  misc_feature (184)..(184): n is a, c, g, or t
  misc_feature (195)..(195): n is a, c, g, or t
  misc_feature (207)..(207): n is a, c, g, or t
  misc_feature (286)..(286): n is a, c, g, or t
  misc_feature (307)..(308): n is a, c, g, or t
  misc_feature (351)..(351): n is a, c, g, or t
  misc_feature (355)..(355): n is a, c, g, or t
  misc_feature (382)..(382): n is a, c, g, or t
  misc_feature (524)..(524): n is a, c, g, or t
gcgaggttaanngttgtnnanggtttggcgcgaaagtaaggctggcttngcgaaagggcaggttttcggcgcctttcncccccttttccaaataccaacaannagtccttccccanntcccnactcaaccccttttgganntatgtgtggtgnttgngaccctgtggcgcatccttgtctctcntttccttctcntcgccctcgccnacgcgatctttgtggtaacccccttctgccatctctttttcttctctcattgcctaggcatcttcgcgactggcagtgngaataagaaacaacgattcanntctactttctcatcgcatgtacttccatgtgctccatctcgcncgtnccttaccatgtttaatttccaaatccnaaataagccgcgcggtgtagtttgtattatgtatgcgtttctctttctgctttcctcgccctttctccatcatcctttaggctctacagagtgaaggtttaaatccaaggtcatgtgcaaaactatctagaagttcatcgcnaggactgtgattggtacaggataggga

SEQ ID NO: 544526 - DNA, 122 bp, Homo sapiens
ctactctagagcgatcccatcatcgtgataggcatctgggcctcattcctccaagtccactgaagggtccagaagagggagtcagagatgtatcctgtgtggagctgggagaaaggcagaaa

SEQ ID NO: 544527 - DNA, 207 bp, Homo sapiens
ctatggattaaaatattattgcccctagtttaaagtaagggtttccattgggtttaagtaggtccctggatggtattggttatgaaacttaaccttttgggtgctggttataaacatggtttataaatcaggggttggggaaatttttctttttttattttctgaaacagggattaaatatggaccatttaaccgggtggtccctta

SEQ ID NO: 544528 - DNA, 849 bp, Homo sapiens
gcaacagagtgcctagactacacactcttcctcctacaattagagggtttaccccactcatggttacccccctaattaagtttgtcccaatgtgtctctcacatccaattagagcccttttttctaaaaacactccaccaccaattttatgtaaatataagcaatcttacggccgtctccccgggagtattggataacccctccttggattattcctctccccccccacacttactaggtatactacggcgcccccgctacttacctctgagtgactcctcttgttacaatatcagcgcgaggcgtctcacgatatctcctctccctcttcccatcccagtgcaatctgggggccccccgctgggtgtggtaacctttggtgtgaccccgcgtcttccgcgggcggtgtatttttgtcgcatcctcaacaaaattgtcccccccgctttttttcttctggaaccaccggggaccactggagtgatccactgagctggtgtgccaccctggggggtgtcttctcccgccttttgatcccccaccccttctgtggtaatattttcaaccgctacaaacacgtttttcgcacactcatgagtcgtggcccccaccccattggcggtttttaacacgtggcgaattctcccccgggccgttttttacacgcaccacccacttgttcccccgctaccccacgccccgggggttatctttaccggcaaattttttaaattttgtgggcacaaacacacctttttttccccccttccttaaattattctcccccaaaattttttaaaagggccccttttttccccctttcccccccccttcccccctttttggcca

SEQ ID NO: 544529 - DNA, 323 bp, Homo sapiens
cccttgtctgtaaaatgggaaaaataagacctaatttcgtatggacctctgccaggttatatggtagaatgtatatagccaagtgcttaacacactggccaaccaccagtgaatgctcaattcctaatttaaaacggggataactggtgcattcaaaatggtacaagtgacagtgaaaatttggaaccattggtgaattcatggaaggcagttcattcccaaaatatagccactttaaaatgcttatgttttaatttcaacagtattttcaacgtcaactattttctttttttctttttctttttttgagacaaagggaaaca

SEQ ID NO: 544530 - DNA, 729 bp, Homo sapiens
ttgcactatgaggttgttatgcatcacacgtcttgaaggaagccgaggagagggactcctctctccctccgtgtgtagtctctatgttggtgctagttacctttaaaaactctgtgtccagatcacgacacatgggtccgcatctcctgcagggacgtaacggggtaacaatcgttgggtgtagtcaggacgaagatcaccacacaggcatgatctgatgagggcttacaaactggaaccaggtagagccactccgggcagctgtcacccattcagaacttcttttccgcagctgaagaaatgttcagtaacctgtttgacgctaattaaaacagagcctgcaggaagtggggctaaagtggcattcagtgatcctgttctgtagacttttctttctttttttaaccaaatccaaaggatgttacagaaaagctagccacgtggtattatgttttgtttaaaaaaaacggaaagaaagaaagaagaaaaacggaaaaggaacctagctgcctgtatctttcattttaaaaatagcacttgagttatttctgagtaatccaataaagaaatttgtgatgacagcagaatgtgttagaactctgggtgaacatttcatctccgtgtgagtcaagaagggcttattttctccctttggttgggggcccttcttctttctggggctctggaagttgttcagaggaaagaatctattttattaaattggcagtg

SEQ ID NO: 544531 - DNA, 278 bp, Homo sapiens
gactgctataatccatctgtacatctcttcaggactatcagccttgtacatagaaagttcgagacgtagttacaatttcacagaggttgtccctcatccttatgtcgctatgcttacattcctccacttcatgaacctctttaagtggtattatgcgaagaggttccttttccagttcagatttgacagtacgcctattgagtttacatcccaattgaaaatatcttctcttccagtttttcatcacgttgcaccttgtataacacaaatatccagct

SEQ ID NO: 544532 - DNA, 552 bp, Homo sapiens
agaggacgtaggagaacaagaaaggaggttataacgtgaagaatataaaaagggggggcccataaagggtacgaaatatttaaaggagaatgacaaaaaaaaatttttgaggaaagggttcagaaaggggatattccccttaaaaaagggttttgagcttttaaggttgaagcaaggttttaaaaaagggaactcttgtccaaaagggaaaaagactaaaaccaaatgggggaagatttttttaattaaaaagggattttccaaattgggccaaatgggtaaaaaaaaaagttgttttaaaaaaaattaaacggaattttaaccaaaaaattaacgttaaaatttgacaattcgcaattaagtgggggaaatttttggaaaggaaaatgggtgggggctttttcattttaacacaactgggaaaaaggggaatgttttgaaagcaaattaatttgggtaaccaaaggtttttccaagtaaaagggttgtaaaaaaagggccattaaattgaaaaagaacccaaaaaagggaaaattgggtagggggcccccc

SEQ ID NO: 544533 - DNA, 235 bp, Homo sapiens
acctattttaaaagtgacttgattaggctgtgcaaggtggctcacgcttgttatcccagcactttgggagactgaggtgggtggatcatatgaggaggctaggagttcgaggtcagcctggccagtatagggaaaacttgtctctactagaaatacaaaaattagtcaggcatggtggtgacacgtctggtataccagcttctcaggaggctgagagacgaggatcacttgaaca

SEQ ID NO: 544534 - DNA, 245 bp, Homo sapiens
ccactaaccctaatcgctggatatcactaagcagcttcttcctctcccccaaggaacttactccaagattttcaaaacgagactcatcaacgacacggccgttcatgctgccctgagatttcattttctctggatgttcttcagacagcaccgtgctcttcaaatgccacctgtgccatgagtgcaaggagcaacacctgctcctggaccccaatgtctatgtagtctgggatgtgatgttccat

SEQ ID NO: 544535 - DNA, 197 bp, Homo sapiens
ataattagcatataatgagcagtgaggacaaccagaggacacttttattggcatcttcgttttggtaatgttttggcccacttctttatcacaaacagttttatcagaccaaatcttcataatctgtatctcgtcgagacttctaatctcatcctgctgaattagatgcctaacctcctcggcaatgcatgcccagt

SEQ ID NO: 544536 - DNA, 166 bp, Homo sapiens
cggacgctgtagaggagcatctggtggaacccttatgctcctggcactcggctgtgaggatagccaactcacaagttatctgacaccaccaggcttattactgtatgaggagagatgagacttgacaatgggctaggaccgtgccgctctcatggagactgctagg

SEQ ID NO: 544537 - DNA, 764 bp, Homo sapiens
  misc_feature (38)..(38): n is a, c, g, or t
  misc_feature (106)..(106): n is a, c, g, or t
  misc_feature (161)..(161): n is a, c, g, or t
  misc_feature (263)..(264): n is a, c, g, or t
  misc_feature (317)..(317): n is a, c, g, or t
  misc_feature (360)..(360): n is a, c, g, or t
  misc_feature (386)..(386): n is a, c, g, or t
  misc_feature (397)..(397): n is a, c, g, or t
  misc_feature (448)..(448): n is a, c, g, or t
gtgggcattttgaaatatttaacgtttcctcatgattngcctctgtgtgtgattttagttccacatgatgactgtgaacattagggatttaaaggaaaaaaaaaangaattctgttcccctcatatcatgaacacagtaactgataggtaaaaagactgcntgattcacttttacacttatatttcatggctagttaaaaaataaaaccttggagaatctaagatgtacatttttaccttttaggcaatttcaatataatgtnngaagtagtagtgtgccctgaaaaatgtacacgttttccttatggtaccacatngttcacctttatcagcgtgatactgtcagcatgagtacatatntcaacccagctgtgtaaaagacatangagtttataanggaccaaatccagttcctgggtcctgtggaagacctatattctctgtagtnactgaaaaccgaagtcaattctaattattcatcttacatatttttccacccatgtcatttgaaaactggctttcttctgcataagagattcttatgcaaaaactttaaacagaagaaatcattttggctatgtatacctcgcaattgtgtctaaaatcaagctcagtaataatttccatgttgacctgttaatatcagatggctggtaatttatgtcttaacgtttcttatagactaattcctctttcacctgcagaattgttaacaggtcgaatgattgaaagctaatgttttttctaaactagggtaatcgggg

SEQ ID NO: 544538 - DNA, 124 bp, Homo sapiens
gacggatccctggtggttagaataaataggcaggctcaggttgcagttgcaccagggtgttgggtcatggggcaggggggttcatagtagaagagcgatggtgagagctacggccgggacttgt

SEQ ID NO: 544539 - DNA, 140 bp, Homo sapiens
cccgtttctagaggatccgccgcagttgggtgggtaaaccagagtgttcagaggcagtaccaaggagtacagggctggacgcaaggcgcttctgggcagcttcatcagctactgttcttggagcaactttctgaaccctg

SEQ ID NO: 544540 - DNA, 388 bp, Homo sapiens
  misc_feature (1)..(1): n is a, c, g, or t
  misc_feature (329)..(329): n is a, c, g, or t
  misc_feature (334)..(334): n is a, c, g, or t
naaaagtgtaaaactgtaacgactatacataattgctttgatagctatttttttcatgtctatcagttatgtaaaatttacgaagacagtcaatgtaaaactttaaagaagatatcccacatttttaaacctttaaccttgtggctctaggttgataaactcaccaaaggcttccttggtatttcagacagattatgagggacaagccaagaaactcctgggaactgatgggaaaacacggatgtgatacattgttgcaggaggagatggggacactgcagggaggttgttactggtgttcttcgacggaacagatgagggctaccttncagtnaaggattcccattgggattttattcccactggggaggaggaccagtagtttgga

SEQ ID NO: 544541 - DNA, 314 bp, Homo sapiens
tacccgtcatagaaagaaaatagtgggggttctttttggtttctagtgggggtctctttggccgccggaggactaaagggggctttatggttcttaggtttatggctggcccttttccctttatatatatttttttagagggtaggggggttttagcccttttttaaaaccccctttttttttcctttgggaccctggtacctttatccggaggttagccctggaattggggactcttgggaatggttttaggggaggttgccccttaacttaacccggtaaattttgatggttggtttccaaaggtttatgga

SEQ ID NO: 544542 - DNA, 820 bp, Homo sapiens
gtctcggcagggtttctggagagcattcatgtgaggaagattatgtcatgtgaatgggtgcgcataattaaaagagtacatggaggtgatatccaaacttgggtataacagtgaaatgaagacgaatgaggagcaaatctgtgttaaactaatggcttggactggacacgtatgtagaagaatgtacgaagagtctgtgtgcaccatgagacaacacaggtgttaggccaacggagttgctttgacatatgtattgaaaatggggctgttgtggtctgctgcgtagctgtgttgagaggctagacttaacagtggttcagatagcatgttactcggagccatagctagaagtgcgcgccgactctatggatactgtgcacacgcaggaaagcagtgaagagctcctcttggcgtaagaggctagacgtggctacaatagatgccgatcattcggttagatgttgttgcgtgacgatagatgtttactacatttatgagacagcacaatggtgacgtcagaagtggaacgagtccagggtagtaagacatgacagtatcgaacttggacaagatcacagtcacttcccgggccctctcaagacaccagttagcaattaacgccaacaaaggatactaaagggtaaatttgacactgacagcaaacccagttgacacccaactcgtggataacatccacgggtgagagttggctccccgattctaccagtttcactaaattcccaagttaactccactctacaacaccctccggggacactaccgaagatattcctagtcgcggcacattttccccttggtg

SEQ ID NO: 544543 - DNA, 329 bp, Homo sapiens
ggacctcaatctcctcccacctcggctcttaaaagtgtggggattacaggcgtaagccacgcgccggccaaaatcttccttctttttaaatacagtgcttacatctatgaatttccctgtaaacctgctttagcggcatccataagtttggatatgttgtgttttcattttcatttatctcagcatatcttctcatttctcttatgatttcttctttgatacataggttatttagcagtatgttcatttctatatatttgagaatttctgaaaaacatctttctggtgttcatttctaacttcatttcactgaggtgggaggagaggaa

SEQ ID NO: 544544 - DNA, 92 bp, Homo sapiens
  misc_feature (34)..(34): n is a, c, g, or t
ggtgacatcgtcacagtgggcgagtgccggcctnctgagcaagacagtgctgcttcaactgtgctcaagtgtcaccaatggctgcctggcac

SEQ ID NO: 544545 - DNA, 413 bp, Homo sapiens
cttggcttcccaaagtgctgggattacaggtattagccactgcacccagcccaaactgtattttttggtcttcaagaacaccttgtaattttttattgaaagctgggcatgggccgggcatggtggctcatgcctgtgatcctggcactttgggaggctaaggcaggtggattgcctgagttcaggagttcaaaatcagccagggcaacatggtaaaaccccgtctttgcaaaaaaaaaaaaaaaaaaaaaaatacaaaaattagctaggcatggtaagtgcatgcctgtaggcccagctacttgggggggctgaggcaggaggatcactttagccccggaggcaaaggttgcaatgagctgagatggcgccactgcccttcagcctgggggacagagtgagaccctgtttca

SEQ ID NO: 544546 - DNA, 571 bp, Homo sapiens
ggcgccgatggtctggtggatctaggcacgcggggtatctatggagacctagtgagcgctcgtgcctccattctgctcggaaattctttcgctcgacgggacgaaattacggtgatgcggtctcgagaccttggctgccgtggccaagcgaatcgtgggtcgctaccggacaagataccacgaggaatcgcgcgtgcgtctatgtggaccgacaagcgatagcctaggagatcgtatcgataaggaggtacacagcgcagtgtgtgaggtacgctatggttgacatagcctatagcatccgagtagtcctaactctttgacgcctagggtccccatgtgaggtcgtccgcgaaaacttggggtgcctcgagacagtggagtaccaccaattccaacgattcaatgacccatgacttcgcgggcgacgcaactgtgacttgcagggatcagcgcaagtccggtagctaggcacaacgcttttctacgtgggggtagaccttggccttggtcaaggcgcccaccgctgcagcattccgttcccaaacaatcttgaatgtaagtacattctccg

SEQ ID NO: 544547 - DNA, 152 bp, Homo sapiens
gcagtccattagtctccagtggctatggcggtgccagtggtgtcggcagtggcttaggcctgggtggaggaagcagctactcctatgtgacagtggtcttggcgttggagtgtggcttcagattccagcagatggcaagagccgattggagg

SEQ ID NO: 544548 - DNA, 475 bp, Homo sapiens
taaaggtttccccaaatttttttggacaaaaccaagtgggggggacattgggggaaaaaaaaacgacgcctgtaagtggggtttcaaaaataccctttcaagaaggtattattcttagaccacgagatcttttctgtcggcaccgagatcatgtgtggtgggaagacattttctccaaacaatgatcggtgctaggagagtggtcccggtgcttgaagacatcaagaacctcatcttccccttgtccacacaaattctttattgtgggccccccctgacaaatctcgtcccggacaagaggcccgtttgaacaaccgccggctccttaaacgatcatgcgggcattctccctacaaatcaccgcgcgggcgcaaacatatcgttcgccggcacccatgagttgtcaccgaacaccctctcccgcatcgcctccagacagcatcagctcctgaccagcgccccacaccgtcccact

SEQ ID NO: 544549 - DNA, 257 bp, Homo sapiens
agaggcacagtgcctgaggcaggaggatggcttcagcccgggagttccaggttacacaagctaagatcatgctacactgcactccagcctgtgtgacagagtgaaatcttgtctcaaaaaaaaaaaaaaaagagagaaaaaatcgtttatgtcacattcaaggttataaaacccaagatcgggatttgggtgaaaagtgatgagggtgtatttatgattcaaacattttgatcagggagggcctctccggaggaggt

SEQ ID NO: 544550 - DNA, 376 bp, Homo sapiens
tagatgttggcatacaggcgtgagcatagctccatttattatctatgctttgaaaaaaggcgatgggttctatctcgtagtgttaggggtccctatcagctctgagatgcttatgcgttagcttagttcgtttcgtcttgttctaattttaggtagttctcgatggtactaaagggtagttgattcattttagttagataaaatgggctgctgaaataaaatagggcactaaaagaggaaatattgttacctaggaaaatgtatcgtctatttgctttatttattttatttgatacagtatctattggggcctctaaaactcaactctgattctttttcgtaataattattttaaaggagtttagaggcaccagct

SEQ ID NO: 544551 - DNA, 615 bp, Homo sapiens
gcacgatctacacttgagtataagcgattctcctgcctcagcctcctgagtagctgggattacaggcgtgcaaccaaacttccttatcatgcacacaattacttaacaagtgattgtataaacattaatatctccacccttgtgctacccacgcatggactgcacactattgaacagcaactgcacacacgcttcagcacaccacagacagtcatacccccagcaacgcatacacaaccgcacgcggcacctcaacgtatcacaaagtctatgccgccaaatccgctcccccaccacgacctgctccaacacgaaccgatgcgaatactaccgacgtacacagatgcaacatttcgcgcacagcaaccacaatgctcattggccccatgacacacgtgcgtgacccatagcaatgacaatcctcctaatggaacaccccttgcacaagactcgcacacacgcacggactactcccgatgaaatcagcggaacacaatacaacctactggagcgcccacatcacacaccagatacccccagatacacaaaaagtacgacagcacaccaacccgatccattcacagagagctaggccaatgaagacacccactaact

SEQ ID NO: 544552 - DNA, 373 bp, Homo sapiens
taggcattgttgaagccatttcacgggctcccgctgagggggcatgaccaggtggatgtaaccgcagattacttcttcactctctgaacgactgtaatgaatacaattacttaaaaaatctagccaatagtttactatcacatcgcttatcgttaagtcttcaaccaacttttaatagctcacgattttaagagaaaatctgaagacttacaacactagcatgaggaaagaacgcataaaaggtttctaaaacatgacggaggctgagatgaagctcgtccatggactaaaaattgtccttaaacagaaatttgcgactaaggcttccagatcctcgaattaattccaacttaattggcattgctttacgatc

SEQ ID NO: 544553 - DNA, 157 bp, Homo sapiens
tgatgtaagacaatgtatttccctctctcttttttcttttatatgtagagaccaagtcttgctatattgcccaaggctggtctcgaagctcctgtgactcatgtgatcttcctgccttgtgatcccccaacagtgctgggagtacaggcgtgaatca

SEQ ID NO: 544554 - DNA, 106 bp, Homo sapiens
cgctctcgcgcgcaaactagaaagatctatcaactaaaacacattgacaataataaaactgtaagatctacaagaagcagtaaatttccttcataccagcaattaa

SEQ ID NO: 544555 - DNA, 1123 bp, Homo sapiens
  misc_feature (483)..(483): n is a, c, g, or t
ggagcgggcaagctggggccgctcctcggcgctggcagcgggtgcccgacttaccgtcgaccgcgctcacgacgagtcgctcttctctatcctgccggtaccaggctccaccgagcatctctgtccatcgttctgccaatctcgcttgtgccttctcctcggagcttctcgccagcctcttggaccgtccggccgctcggctcgcggtcggcccggggttcgtggaggtggttgatgggcgctcgtccgtccagaggccttcctaccgtgctgattcttgattctggcaatgagccattattagtcgccatcatcccgactagtctatgctccggtttcctggagcagacagcgcacgggacacagcagacattacgcagcgaagagataacgcgcgaaacatagatatgggacgtcgccggcacgatcgaacgcgagtcgcttctgcagacggttgcggtccccatttcacgaacaacagcncggtgcctcgtttacggttcatggggggcgaggactgacgcgtgtcgggcgcgcaacgtctaagaaacgacgaggtcgaccggtcgagtcggcagtcgcaggctcgaatcggactgcgcactggcatggcactgcgtcaggggtagaacggtgaccgacatcacaagtgttggatctactagcatgacttaaggattgcagagaaacggtttcattactgttgcccaggctggagtgcagtggcatgatcacggcttactgtatgcctttgagctccccaaggtttcacggtgatcctcgccagctgcaacctcttacaggtaactgggactgggaggcaactgcaccatcgaatacctggcctaattgttacaaattattgtcaagagatcggggtttggcaagtttgcccaaggcaggtctccaaagtcctggggttcaaaatgattgtgctccccccctctggccttcccaaaggtgccttggttgagaccaaggcacgcacgatttaagccttaagatagcgcaatttttcgggacagagccaccaccttttgcccacgcactgggtcaatggaaggctgagtacacagggggcccagaggagcctcacacacaagaccctgagaaccggagatag

SEQ ID NO: 544556 - DNA, 589 bp, Homo sapiens
ggcgatggctcatgtccgcaatcccagcaccttggaggccgaggcaggtggatcacaaggtcaggagttcaagaccagcctggcaacacggtgaaatcccgtctctactaaaaatacaaaaatcggccagttgtggtggtgcatgcctgtaatacccagcttcccgggaggctgagacaggagaatcgcttgaacccgggaggcagaggttgcagtgagcaccgcacttcagcctgggagatgagaatccgctcaaaaaaaaaaaaaacaaaaaaaaaacaaatttgggggcccgggtgggcctgaaagaaaggttttttagcagaaccaatttcggttggggaggccggggcccccagtatagggtacggtggcaaccgtgcgacataagggggcgcccaagaagaagaaccgcgggcccagacacaaggctgcgtggaatcccaccacaatataaaaacgcgccggcggcagcacagcagggtttcggaacaaaactcaagagggaagtccggagagaccaacacgggtcttcattcacgcgaggagctcaaggggagtgcgaaattaaattagccggcgcggtgct

SEQ ID NO: 544557 - DNA, 132 bp, Homo sapiens
gtgctggacagacgggtagctggacaggtggggtctgagagagcgccagtctgtcttgaggtacgtttcggtccgtgacgtgctactcgatcgttcgatttggtctttcgggcctatagcctagtcgaacca

SEQ ID NO: 544558 - DNA, 851 bp, Homo sapiens
ttggtggtcaactgtgggcctaccctggacctcatctactcagcgagaattggacatgaagctagaggcagctgccttggaagggaagtcaggctcacttggacagcccaggccatggcaggaagaatcccttcctcttggggtccttgatgggcatgtgtgatggggaaggagcagtctcccagccctgggtctgctccccacatctctcctaattccacttcaccttttgccaccccctccccaccagaggcctagcccttttgtcaccgaaggcccccagagtgtttctgtgtgaaaccctctcatttacactgtggcatcaaaatccacaaaagatggattaattgcactctggttaatagcagcagcacaatgattaaaatctatattcctatcttctctagcaccctggtgtggggatggggcggaagggtgtcttgaggggcagggaggaccccataaaacaatccctcctgcattctcaggctaaatagggcccccagtgactacctgttcttggctgtcccctctgaagagctctgccttctcacagccaccaccagttgccccactcccaggaaaacagcacatgttcttcttctcctgccttgagactgcgtgttagtcttccattcataactcatcagcagctcagtccttcttatgtctagtctcagttcattcagccaaagctcatttttgtcctatccaaagtagaaagggttcttttagaaaacttgaagaatgtgcctcctcttagcatctgtttctgactcccagttatttttaaaataaatgatgaataaaatgcctgccctgaagggttctggaggagtcaggtatcactc

SEQ ID NO: 544559 - DNA, 397 bp, Homo sapiens
ttggtggtcaactgtgggcctaccctggacctcatctactcagcgagaattggacatgaagctagaggcagctgccttggaagggaagtcaggctcacttggacagcccaggccatggcaggaagaatcccttcctcttggggtccttgatgggcatgtgtgatggggaaggagcagtctcccagccctgggtctgctccccacatctctcctaattccacttcaccttttgccaccccctccccaccagaggcctagcccttttgtcaccgaaggcccccagagtgtttctgtgtgaaaccctctcatttacactgtggcatcaaaatccacaaaagatggattaattgcactctggttaatagcagcagcacaatgattaaaatctatattccta

SEQ ID NO: 544560 - DNA, 209 bp, Homo sapiens
actatgcaaaaacaagggggcggggaggttaagggcactgactacccttccagaggtcctgagttcaattcccagcaaccacacagtggctcacaactatctgtaatgggatccgatgctctcttccggcttgcagggttacatgcagatagagcactcatctgcataaataaatcttttgaaagaagaacaaaataaaaaaaataaga

SEQ ID NO: 544561 - DNA, 366 bp, Homo sapiens
cgactgtactggtggttcagacagcaactcggagaagatacagactccgggatggtccgtactgcagcatgcgcatcgaagacaacccgctcgatctcgcgccgaagcggatcctccaggccctcggcgctgcagagctggtcgacgaactgctgagacaggtactgcacatgctgcgcgtccagcagttcctctgcctccagagtcgaaaactggttgtaggtctgctcgccagactcccagtgcagccttgcttccgagttgctcaggtgactcgcagcgcgggcgcaagaaggacttctcgctgagatgggagagggctgcacaacctcccatggcgatcaagtccgccagagcagtacggcg

SEQ ID NO: 544562 - DNA, 538 bp, Homo sapiens
  misc_feature (1)..(1): n is a, c, g, or t
  misc_feature (25)..(25): n is a, c, g, or t
  misc_feature (79)..(79): n is a, c, g, or t
nctcttctgtgtatagcaaataccnctagtattatctattagtaggaaatgtgcacaccataaagctgcagtgaacgcnatctcctagtgtcctacacaatcggttctacaagatactctacaatcagccgccgatagttgtgcatatatcgtgccaacaacgtcacggcaattggtgtatttctcaacaagtgataattgcgcacaacttatcaggattgtgacagacctcctcagtgtgaatttcagtacagaagccccttatagtctgttgaaatatatgacgccgccctgtgcttgatacataactgtgaagcagagtcgttattgttagattaaaagataaggtcctaccatataattattttttacacaacaagggagtttttcattctgctctcacagcaagcccctggttacacaagaccacaagggcctttccttggagagacgctctgttttactcgaattcttataggccaaacccactcgtaagccagttgatgacatgcgaaataatgtgtgagctgcaagtata

SEQ ID NO: 544563 - DNA, 84 bp, Homo sapiens
agcttctacatctgcagcgtgtacaagggacagggtcgtcgtcagccccagcattttggtgatgggactcaactctccatccta

SEQ ID NO: 544564 - DNA, 967 bp, Homo sapiens
attctagaggccgaggcgggtggatcaactgtggtcaggagtttgagatcagccaggccaacctggtgaaaccccgtctctactaaaaatacaaaaattagctgggcgtgatggtgggcgcctgtaatcccagctacttgggaggctgaggcaggagaatcacttgaacccgggaggcggaggttgcagtgagccgagatcgcaccattgcactccagtctgggcaacagagtgagattccgtctcaaaaaaaaaaagaaagggaaaaaaaaatagcattatacctcttcctgtgtctcaaccgccttgaaaatcctgaacactccaaattcagtggaataagtccaaacacaaagtttataagtatacaaactactttcacttcttatagtactagtatactttaaaaagcctcagggtatatcatcttcgtaaacagctacaattcagtgcagctactttaaccaactatgtctctagtggagaacaactaggcctatttcacggctgtgtagcctcagggcctaccatgggtgccaaatacctatccgtagaatcacactgaatggtagaaacaatcgattggttacaattggccaaaatctcaacgggcccggtactgatgctaatcctttggaacagtcatcaatccaatagaggaattactcaagtattggaccgggctgggctgtgaacttacgtacataagtacttccaatgtaattatgtaccgaaccgctctccaaatatattgggacttggacattttgccaccgaggacatccctttccccttgtctctaccagagttgaacgttttcttgcaccaaagtcccatcgggggataatactgtcctcaaaatggggctataatactgatctggccgtcctgagaaacaccacatgttatccacgaccactaatggtggcatttacaagacgatggatgacaactgggcgatacgcta

SEQ ID NO: 544565 - DNA, 228 bp, Homo sapiens
tttagatatgagcttgatgtatgcaattgggtattgatgtgttttttatgaattagtaaagagagtaggtttattgcgaatggaatactactcctgatgaagatgctgtgaacattgttaaaatgacaacaattgatttagactgttacatgaacttagttgataaagcaatgacagggtttgagaggactgacagcaactttagaacagaagttctactgatggtaa

SEQ ID NO: 544566 - DNA, 349 bp, Homo sapiens
catccgtggaggttgcagttgtcatctagctgaacaatgagcagtcatgtctcacaggttctatgtaggtctcagcagtcagcgatttcaccataggtttcctcaaggtccgcatctgtgcatactgagtcccagtcaagggcaaattcagccacttcattctctagcacgacatgctgtgcatatgtaccgttctagatagcgtgatccaagtcgctctgcatcaaggctataagatagtcatctccgacatctttagctcgatcagcggccacaatcgtgtgtacatctccaccaagcagacccctggaatgaatcgagctacagatactaaaacggcaaattaagg

SEQ ID NO: 544567 - DNA, 423 bp, Homo sapiens
ggaccatcatggggtctggatatatcctgcagagtgtttcaactgtttccattctccctgtcactttcaggtacaccaatcagatgtagatttggtctgtggccatagtcccatatttcttggaggcgtgtagtttctttttactcttttttctccaaacttcctttctcgcttcatttcattcatttgatcttcaatcaccgaataacctttcttccagttgatcgaatcagctactgaagcgtgtgcatttgtcacgtagttctagtgccatggttttcagctccatcacaccatttaaggacttctctacactggttattctagttagacattcgtccagtctttttttggttttcagattctttgtgatggggtccaacttcctcctttagctcagacaagtttgatcctctgaagact

SEQ ID NO: 544568 - DNA, 191 bp, Homo sapiens
cgattttaacacggcagagagagagagagggagggatgggaagaagagggagacagagagagagggaaaagggtagggggagagagagagtgccggaggagagaatgacagagacagagaaatggacaaagacaaaggaagagaaagaaggaagccaggcgtggtggctcaagacgtctgtaatcccagca

SEQ ID NO: 544569 - DNA, 190 bp, Homo sapiens
  misc_feature (134)..(134): n is a, c, g, or t
  misc_feature (137)..(137): n is a, c, g, or t
  misc_feature (141)..(141): n is a, c, g, or t
  misc_feature (143)..(144): n is a, c, g, or t
tgatctctagagtatccctgggcgctgtatcggggggacattcccaattcggtgcattctgacgtctacttgccttttacatctcttgtggagtgagctaaaaggaggctcagacagatttggttcccaacagntgntccngnntaggccaaagggcacactcagaaggtcctccctgtagaatggaaca

SEQ ID NO: 544570 - DNA, 295 bp, Homo sapiens
attagctgtaggagaagaatcacccggcacaaaaccggtccagagatcctggacacatgagatattccaggagggaacacacaggaactgaggtagaaaggagacggatgggtggagatggaggagataagggaggagacccctgatccacacagcacagccatgtttggaggagaatcataatgctacgtacgatgtctaagctctcctcaagatgcgagggggggagtccctttccagagcctcagagagcatactggtcttaggtccaggttactgccattgaatggtatta

SEQ ID NO: 544571 - DNA, 253 bp, Homo sapiens
cttaccaccatttaacccccttattttttttcaagataagctcccgctgtgtatacccagggtggagtgccgtactgtgatcatggctcactgtagcctccacctcctgggctcaagcaatcctcctacctcagcaccctcccacccctcaagcagctgggactataggcatgtgccaccatacccagatagtttttgaattttttggtagagacagagtctcgccatgttgcccaggctgctcttgaactcc

SEQ ID NO: 544572 - DNA, 179 bp, Homo sapiens
aatgttatccaaatgctcggtgagcgctgaaactttaatcgtgctttgatactcagatgcactaaaatcgaccgtactacctaacatctcaagcgcctgtgacaattgttcactgctacgcttttgggtcgattcattgagcatttccgcagttaagcttgccagtcccgccttttcga

SEQ ID NO: 544573 - DNA, 235 bp, Homo sapiens
cttcccgggggcctacccagtgccccaaaaaaaaacccgtgggggtttgtgttgtgcgggccctgttcctttgccccaaaaccattgggtgggccccttccttgagccctggccaaaatttaggttgcaggggaaaaaaaaaaatgcccgggaggttttgcccccaacccaaggtccccccccaggggtgccgcaaacaggaggggtttaaaaaaggggtttttttatttcctca

SEQ ID NO: 544574 - DNA, 383 bp, Homo sapiens
cccccatgggggtcccccctggggggggggttccaatgggcgtgccccccccggggatggggccccctccccctggggtggggggccttttttgacccttggcccccgggtttggaagttgccccgccggggcgtgggctcggttcctcagggccccgtttcccccggcctgtttgtttcttatgctgttgttcgtggggtttcctggggttttttggtttcccttacagggccccctcccccggggattcgcccccccaggcccttggctcattttggccctcctcagctcccttcctgtttcccgtaagggtgtacattgtccctttttttccttttggcctttgaaactgggtttttattaactttttgggggcccttta

SEQ ID NO: 544575 - DNA, 230 bp, Homo sapiens
  misc_feature (184)..(184): n is a, c, g, or t
tatattgtggatatatatatagcgggtatatgtagtggatatatatagtatatatatattgtggatatacacacacacacaatagctgggcattgtagtgcatgcttgtagtcccagttactcaggaggctgaggtagaaggataacctgagcccagggagattgaggctgcagtgagccgtgntcagtcgctccattgccctccagcctgggcgacagagaccctgtct

SEQ ID NO: 544576 - DNA, 210 bp, Homo sapiens
ctggccctcgcggaactgcgttataggttcagaagcgagcctcacgtgcacactgaccggcctgagagatgcctctggtgcctccttcacctggacgccctcaagtgggaagagcgctgttcaaggaccacctgagcgtgacctctgtggcagctacagcgagtccagtgtcctgcctggactgtgcccagaccatgggccatacgagaa

SEQ ID NO: 544577 - DNA, 941 bp, Homo sapiens
  misc_feature (11)..(11): n is a, c, g, or t
  misc_feature (69)..(69): n is a, c, g, or t
  misc_feature (130)..(130): n is a, c, g, or t
  misc_feature (146)..(146): n is a, c, g, or t
  misc_feature (177)..(177): n is a, c, g, or t
  misc_feature (208)..(208): n is a, c, g, or t
  misc_feature (265)..(265): n is a, c, g, or t
  misc_feature (274)..(277): n is a, c, g, or t
  misc_feature (279)..(279): n is a, c, g, or t
  misc_feature (282)..(282): n is a, c, g, or t
  misc_feature (288)..(288): n is a, c, g, or t
  misc_feature (290)..(290): n is a, c, g, or t
  misc_feature (292)..(293): n is a, c, g, or t
  misc_feature (295)..(295): n is a, c, g, or t
  misc_feature (303)..(303): n is a, c, g, or t
  misc_feature (311)..(311): n is a, c, g, or t
  misc_feature (313)..(313): n is a, c, g, or t
  misc_feature (315)..(317): n is a, c, g, or t
  misc_feature (319)..(319): n is a, c, g, or t
  misc_feature (325)..(325): n is a, c, g, or t
  misc_feature (336)..(336): n is a, c, g, or t
  misc_feature (342)..(342): n is a, c, g, or t
  misc_feature (347)..(347): n is a, c, g, or t
  misc_feature (362)..(362): n is a, c, g, or t
  misc_feature (375)..(375): n is a, c, g, or t
  misc_feature (379)..(379): n is a, c, g, or t
  misc_feature (410)..(410): n is a, c, g, or t
  misc_feature (454)..(454): n is a, c, g, or t
  misc_feature (463)..(463): n is a, c, g, or t
  misc_feature (469)..(469): n is a, c, g, or t
  misc_feature (477)..(477): n is a, c, g, or t
  misc_feature (486)..(486): n is a, c, g, or t
  misc_feature (489)..(489): n is a, c, g, or t
  misc_feature (491)..(491): n is a, c, g, or t
  misc_feature (495)..(495): n is a, c, g, or t
  misc_feature (603)..(603): n is a, c, g, or t
  misc_feature (710)..(710): n is a, c, g, or t
  misc_feature (712)..(712): n is a, c, g, or t
  misc_feature (718)..(718): n is a, c, g, or t
  misc_feature (790)..(790): n is a, c, g, or t
  misc_feature (886)..(886): n is a, c, g, or t
cgtgtttctcncctcctgggtgctcccgggcgctctccgcgccgtggccgtttccgttccgccgtgtgnggctcgtgtgcttccccgccttttccgcccccgccccccctcccgtggtctgtctgcgggncctctcccgtctgtgnggcgcctctttccgggtcgccctcccggccnccccggccctgtgcctgctcgggggggctcnctgccggctgcggcctgggccccgcgggccctgtgtgtttgcctggggtgctctttngtggcgggnnnntnagngacggntncnntnaccccacncctccgcngntnnngngccgtnctgggtgcatnggaccngtttntgtgacttttctccngttgggcatgttnacanacatgtttcccctcctcccaccctaattttntggtcctcgcgactgagagccaggggcgacatcatgaccttctntcccggccnccttanccccgggnacagggaangcngntggnccgtttctgtctgtgtcccatcctgctgtccttctgtcctggatgtttcatgggcccggggccccccagggaagcttacccctcctgtgctgggtggaggccacgggncacctcaggtgccacccaccttggccctaaaacagccaccaggaaagcagccggagagccggacagcaggcagcctgtctgggttcctgaggcctgggggtggcagncnagcccncggcgccgtggtcccagcagcagggttgtcagtcggagcatcctggggctccctggctcctggccgtctgtnaggtaggcccagtaccgtgtatcgtaggtaccagtaggaacgggggcccccccggccctgcaaccgctcatggcggtgaggtgtgtgccaagcccncccggggtgcagggcgtgacgtgtggggaataaataggcgttgtgacctcaaaaa

SEQ ID NO: 544578 - DNA, 1012 bp, Homo sapiens
ttctctgacatacaactggggcgtcgctgtgagtcatttagacaacgatcgtcccgaatggcggataccattcccgagtgtgtgcattcatcaccctacacctctggggccacccaccaatttgtgttaccgcactgacatatgtggccacacggaatttgtgcccactttcagcgttgccaaacacacatgccgtttggtggaacctaatggaacacaacaacgtgttttgtccgtggagcccaccaccgatgcttagcaaggttgtaccgcccccgcccacatgctgtttcttaacctggcgaagaacaacaatagtaactcgggtctggggcggtcacccaaaaccacatgggggctttcacagacctccctgactgtgtgtgtgcccgacaccccgcccgcccgctgtcgaaagtgctgggagaaccaccaccctaggaagggcccccggtgggtaaaacaaaagccggtgtgaggccaccccgtcatgtcgccagaattgtctcaaggccccaagctcacttgccaaccacaggcctcctgcgccttctcaaggtgtctcccgcgcaaacagcgcccctccccacatagtggcggatcaacataacgggcgccacgccatcttattcctcagaggagaagcacgacaaagaaaagaaggactgcgttccattgcagaggcagtctgctacacaagatccctgggtttgtaggggttcctccgcctagtcatgtccaaggacacaccccgcgagagggcacttcaccagatctccccctacaagaatcagctccacacaagggaactccaaaaataaggttagaagagaagtatgacacagaatatcttggggcgtgtcaacacgtcctatgtgaatatacccttggagacacgacccagagagccgttttattcctacccgaggtacatcaccgcggggaacaaatataaatatacagggcctgaagaccacgcattttggaaaaaacccggggagccaacaaaaca

SEQ ID NO: 544579 - DNA, 238 bp, Homo sapiens
tgacagacagaatccagacatatcaaggactgtcattcggacagagtactctagcacaaaccaatgcagagacagtgaaacagttttggctgggttacgatgtcctgaacgtatctcgcagtggttctccataatgtttggcattatagtgacttactgagctttgttaaatactgatgcccaggcccggcccagatcaatcatgttctctgtcgtccgagggagggtgatctcgtac

SEQ ID NO: 544580 - DNA, 531 bp, Homo sapiens
  misc_feature (50)..(50): n is a, c, g, or t
  misc_feature (69)..(69): n is a, c, g, or t
  misc_feature (78)..(78): n is a, c, g, or t
  misc_feature (80)..(80): n is a, c, g, or t
ggagcgggagagagaggggggggcgcgaggaagagcgtggggaagcgcgncccctggagagcaatggcnacgggccgngnggagaggcggcgggggccgggaaggggggcaggagggcggggggcggaggaggacgcggattaggggagaggggggggaggcgaagggaggggggggacgaggccaggagagaggggccaaagaggggaacacggggaaacccgggcggacgggaaggcgcgaagaaagggagcgggcggagcggcgggcgcgcggaggacgagagaggagggagggagaggcaggagaagggcgagaacccgggagggggggggaggagggagccgagaagggggagaagggggggagacagggggacagagcgagagagggggggggacgggaggaggagaagagagaagccagagaaagagggagagggggaaagcgcaaagcaaagaagggagagagggaagacgagaggcgagcgaagagagcgagagggggggagagggagagaaggcgcgaggg

SEQ ID NO: 544581 - DNA, 982 bp, Homo sapiens
cagcagccgtggaacgtctggttagacgtccgcagcacgagttactctaagttggaatgcagtcatggacctcggctcaccttagaggagttacctcgagaaccaacagagatccagaaaggagtcggcctggccggtcctttcaacagctctagaggcccgttttctctgttggcaggggctaggtcttccagctcactgtatatggctataaatgtcttacgtgagagtccagatcacctgcagcttgagaatactaggcactcgcagggtcttagtgatcgaagtggcagcatgaaacagtgtggctgcctttctgaccaccccacatttcctgccctgagacagcagcccaggcaggtgcttcatattcagaccaggtaagcctcatttgcacaacagtcaaatggttgttcctttaaaaaggacacaattagcctggcacggtgactcatgcttgtaatcccagcactttgggagggcaaggcaggcggatcaccgtgaggtcaggagtttgagaccagcctcaccaacatggaaaaaccccatctctactaaaaaaatacaaaattaaccagggtgatggcacattcctgtaatcccagctactcgggaggccgaggcaggagaatcgcttgaacccgggaggcagaggttgaggtgagccaagattgccattggcctccagcctggcacaagagcaaacttcatctagaaaacagaaaatatgagatgattccatgtggaaacttttaatattcggttgggaagttggtgcccagcatgtggtgtgctagtctggaaattgcggaatgggattccaatcattctccgttagggaaaaggcttcaacgcagtcacagggctattcaggagggactcacccgggctgacacaccaggtaacaagtgggaggtgaaagaacgggggggcaaccatgggagcgggaaaggcacaaaggcgggggcggctctgtgctgga

SEQ ID NO: 544582 - DNA, 326 bp, Homo sapiens
actgaatgtggcgatgccttggaacgcgacctctggaagcgaagtccccatactccatgtactctgagactgtgggagctcctcaggtatgcaatgaggctgaacgaacttggcaagtcccttggcttcggatgggagacgtgtagctatcagtactatgctaccggatgtttatcagctccgtctagtttgagaatgttctaagctgacagaaggaccatgctatgtagtactccatatcactgatggaatatttcaagcgaaatgcttcctgagtcgcgcagatagcctctccatgggtaagccatggaaagaacactcgatcc

SEQ ID NO: 544583 - DNA, 283 bp, Homo sapiens
gctacggaggtggcagccatcttccttcttcggcaatcaatgggccgcccttcaagaccctttgttgaaggcccaagatcgtcaaaaagagacccaagaaggttcaatccggcaccagtcaagaccgatatgtcaaaatttaagcgtaacttggcgggaaacccaagaggcatttgacaaccagggttcgtagaagattcaagggccagatcttgatgccaacattggttatggagcacaaaaaacaacgcaatcgtcgccagtcgttccggagtcctcgtca

SEQ ID NO: 544584 - DNA, 179 bp, Homo sapiens
  misc_feature (67)..(67): n is a, c, g, or t
cgggacggtttgtccctatctggcgcggagtaatccatgtcagcaaagagctcgaaacaccatcggncagtgctacaagcgcgcccgtgaggcccggcatgagttcatgacggtcgaacacctgctgttggcactgctcgacaacccgtccgcccaggccgtactgaaagcctgtggtg

SEQ ID NO: 544585 - DNA, 1415 bp, Homo sapiens
  misc_feature (211)..(211): n is a, c, g, or t
  misc_feature (313)..(313): n is a, c, g, or t
  misc_feature (396)..(396): n is a, c, g, or t
gtcagtcgggggccgagatttgggagagacgctctgaactagactgccccgcgtacaccgatgagcgggcccatgtacaaagaaggagagacagggaacgggaggataatgatgtgaaaaacaggcagcgaaagaggaccatgaacctaattgagagatataagaaaaaaaaacttacaagatgaatctaacaaaaaaaaaatgaaaaganatcaacaaaggactaaaaaataatcacgatacaagttggagataggcacagtgtgtcgaggagcacctgggtcgagaacaggcaacaggaagagtaccagancctaaagccatatggagatcgatgattgaatatcagggagatatgcaagagagcaacgatgattgagtacatcattcgattanaatcagatgggggagagcacggcattcatacaaccataagcaagggtacatcgcaaggaccatggataccaccaaaattaaaaaatcaaaacataaacaacaaatcaatagcaaacaaagccaaggcaaggtagcaatcaaacaaatagcagcctgaaaaatcccaatatcaagatcgacagccatgaataaggagtcagggagggagggagcaatagtgaaacgagaggtcataccccccaaaagaaagaaagaggccaaggaagcagtaaataaaaaattctgcagagcgaagcacagcagataatgctgaaataggactatcgagctagggggaaagagcggagggggcgttgatgagaaagtctcaaggatataagtgaaagctgagcgaaaggaggaccccaaatatgtgccatcccccaatgaccagataagtgaaaggagaagtgacagtgagacaggagaaactgacctcgagcctgaagaacctagcgaaactccctagagtggtgagctcccccccagagggtccaaggaggaccgacaaaagattgtcccgaggttgaagaaatagccgacgagcggaagagcgggaagaccataactaccaagtgtggtgtgcccaaggagggcgaagaaggagcccaagtgaattctaaagatgccccaaggagcgagtcagaaggtcgtaggaagtgaggcagagtgataaaaaaccccacgggaggagaagggcacgtacaaaagtttcatgaagaacaaaggaatgtgacgatgggaggaaataggctccgagtagggtccagaagcccgaggcgtatgaagtggaaggacccccggaccccccgaaagagtcgtgaccccaggagacagctatagagtgagaaagaccagtaagctggtagagaaggtaggaatcgaacgacgcgtgcgtaggatgctgtcgtagagccgttccgacgcccagtaaaaaactgtcactataggtagcggaaggtttatactaaccttctcgg

SEQ ID NO: 544586 - DNA, 976 bp, Homo sapiens
gagagaacgaaggtacggcaggggaccagtgtgtggtgtgtgacctggagtggtcccaatggactgccatcctggatctgccacccgcccaactgagagacgcccactctgtcctctcccctgcctagagaaagtgccgcaggctcaagtttgacttccaggcgcagtcccccaaggagctgactctgcagaagggtgacatttgtctacatccacaaggaggtggacaagaactggctggcgcggagagcaccacggacgcctgggcatcttccctgctcattatgtggaggtgctgcccgcagatgagatccctaagcccatcaagcccacgactaccaagtgcttggagtatggagaggcctgtgtgcccagtaacaccttcaacgggggacctggaggatggagctgtccataccgcaagggagagcacatctggctgatccgcaacggtgaccgagcaactggtacagagggacgcatacaggggacacagggggttgcctaagggcatatacaccttggcagcttactgtgcaggtgatcttcggttgtaacgcccgcgtggattccgtggctttcatgatgacccgggaaggggagcagcgcgacagccgatcgcacaacgggaacagagccgcgaatcatacatcccgcactgcgcggacacagattaatatactcgggtgcacgccaaacaccaccagcacaagtgaacaagaggggtagcagcgacaataggaggcgcacgtgccaggtcgggcgcctagtgggggagctgcaccagccaaagagtgagcgtctcaggggaggccggagaacgctagacgctcggtggccaacacgagcagacggggatggatgggcacccctgaggagaatgatcctggaagtctgatggcaatggtgaggcgaagtggaatgcgcggataacgagtcgtgtaggtctggcggagcgagtcgtaggtgagtcaac

SEQ ID NO: 544587 - DNA, 149 bp, Homo sapiens
cccggtacctccactgttaatatattatagcctggtgggtgtggtggctcacacctgtatcccagctactcaggaggctaaggcaagaggatcacttgaggccaggagttggagaccagcccaagtaacagaggaaaatcccttctctt

SEQ ID NO: 544588 - DNA, 902 bp, Homo sapiens
agctccgccacatctccagctctcttgtgtccagcgagcgttgcctgggccagtgctcaagcggagggctcctgacggtgcggacggagcgaagcgccgatgccatggcgcactcaaacgggcatccacgccacggaagagctgaaggaagttctttgccaaggtcacggggctggcgtctgtgcgcgctcgatctaaggttgttgattggacgtgacgcagcagcctctgtgctgtgtgtgccctcgcaaggatgccgagtagtgcccgctgtggatcacggactatagacagggccggtgctgccaactgcgtgggacagcccatgcagcccatgttatccttgcttcttgccggcctacgactcactagaagtgcttcagtgggctttcgaattggcatcttacctcgtccgtgggtctgccctgattaagcatcgcccacgtagcgggctgagagatgcgtgtagcgcggccactgctgggccaccagtgacagacaggagttcggcaggtggccacatcacggtattgcatctcttcggggacctgtgaactggatgacctctcttgtgcaaggagtaccagaaaacaccttgttcgttccttgtgcgtgaccatggcccccgcttgaacctcggctggagcatgaggatgcatccacggcaatgatcccgtcctttaaccgacggttgactgtacatgatagattccagttggtgggaaccaggtcctatgctacccatagaccccttgtcatagggtcagcttgtccctttctcgcctacttgtcaggccttgcatgcgcccaactggagtgtaacatcccaagatggtgctcatggcaggactacaatgggtccaacctacagttcctagtgcgttgaacgccttggaccataa

SEQ ID NO: 544589 - DNA, 730 bp, Homo sapiens
cccgccattcagtctttgctttccaggccccccgcgggaactggcggcccgcttctgggaaaccttatgggagacccaccctggccctccgcgggacccctcttccccccctgggaccgccgggagcccagcctcccatggcctgcctcctcctccgccttgggattattcccgaaggactccccgcgggggttggtgcccctgtccctccgcacctcctcctgcaatcatccggcctgtacgttgccccctcctcctccggagagagtatgagaaataaatttttcgcccccctgtaaccccggtctttgaggtgagttcccgtatgagccccactttccctcgggcactccatataatagttcaccctcggtgagaagacccactgaagattatttacccaggctaccctcgcttttttctgggtgtcctcgagacctcggagagttgtggctttttaagtcttatggatgttatcacgcgcgatttcaacttcctcgaattttcgatgagatttctaagaacactgggccagattcgggttgtaagacctctctgagatttaagcgccactcgccctcggatcatggggaacttcccaagccaaccaagcccgttgagatggtccccagcaacccacccatgaacttttttggggacatcctgttttttttgtataactttatattccctataatccctttaggcccccataaagatttttttttta

SEQ ID NO: 544590 - DNA, 746 bp, Homo sapiens
ggaggaagtggcgcggaccttcatttggggtttcggttcccccccttccccttccccggggtctgggggtgacattgcaccgcgcccctcgtggggtcgcgtgccaccccacgcggactccccagctggcgcgcccctcccatttgcctgtctggtcaggcccccaccccccttcccacctgaccagccatgggggctgcggtgttatttcggtctgcactttcgtcgcagttcggcccggccttcgcgcttttcttgatcactgtggctggggacccgcttcgcgttatcatcctggtcgcaggggcatttttctggctggtctccctgctcctggcctctgtggtctggttcatcttggtccatgtgaccgaccggtcagatgcccggctccagtacggcctcctgatttaaggtgctgctgtctctgtccttctacaggaggtgttccgctttgcctactacaagctgcttaagaaggcagatgaggggttagcatcgctgagtgaggacggaagatcacccatctccatccgccagatggcctatgtttctggtctctccttcggtatcatcagtggtgtcttctctgttatcaatattttggctgatgcacttgggccaggtgtggttgggatccatggagactcaccctattacttcctgacttcagccttatctgacagcagccattatcctgctccatacctactggggcactagagtacaataagaagacagagaca

SEQ ID NO: 544591 - DNA, 502 bp, Homo sapiens
agtcatctacagtacacaatatgaatagatagtaaggaatgacgaaccagaatatagcgaaataacatcaccacagcgtggcgtgagcggggtggggagagacagtagcgcagatatatggagtcggggcaggaatcatcgagatctctctacttcttcagaatcactaactcagactcccttattcacatccccactcttaacccagatccaaaggtacacggtgctcccaagctagaagattgtggtgtacaatcagactaaaaaaaaaaccagctaactctactgttggcttagagtatacaaagcagtactatggtactgcaaaattagtccatatatttacaagcttccaaatttttgtagctacattatctcctctcctgtaatccttataccatatgggccctcactcttcatctctagttctggtaagcgttccacgaggaacaaaattatatgtgtaatggtcgggcttttgggggctcctctaaaagtcggc

SEQ ID NO: 544592 - DNA, 1030 bp, Homo sapiens
ggaggaagtggcgcggaccttcatttggggtttcggttcccccccttccccttccccggggtctgggggtgacattgcaccgcgcccctcgtggggtcgcgtgccaccccacgcggactccccagctggcgcgcccctcccatttgcctgtctggtcaggcccccaccccccttcccacctgaccagccatgggggctgcggtgttatttcggtctgcactttcgtcgcagttcggcccggccttcgcgcttttcttgatcactgtggctggggacccgcttcgcgttatcatcctggtcgcaggggcatttttctggctggtctccctgctcctggcctctgtggtctggttcatcttggtccatgtgaccgaccggtcagatgcccggctccagtacggcctcctgatttaaggtgctgctgtctctgtccttctacaggaggtgttccgctttgcctactacaagctgcttaagaaggcagatgaggggttagcatcgctgagtgaggacggaagatcacccatctccatccgccagatggcctatgtttctggtctctccttcggtatcatcagtggtgtcttctctgttatcaatattttggctgatgcacttgggccaggtgtggttgggatccatggagactcaccctattacttcctgacttcagccttatctgacagaggcatatctgctccataaccttgggagtgtgtctcgatgctgtgaagaaacggacggctgggctgggggggaggcacaaccgaatggacgaattcctgaacctaggtagaggccaccgggccatcaagcagcccaggtacaggggagcagggcctcacacgtggaggacaccccaattaggcacccttggcaccgagcggaaacgagagggtaatcgccgcacccccgagcgcacaggccgcggggggcaatacccacagccaaagggagacggcaaggagaacagagaatagaacactagaccacactcgcacacaaaaacgcgaagaaatatgcgggcgcc

SEQ ID NO: 544593 - DNA, 829 bp, Homo sapiens
  misc_feature (400)..(401): n is a, c, g, or t
  misc_feature (404)..(404): n is a, c, g, or t
  misc_feature (407)..(407): n is a, c, g, or t
  misc_feature (415)..(415): n is a, c, g, or t
  misc_feature (418)..(418): n is a, c, g, or t
  misc_feature (421)..(421): n is a, c, g, or t
  misc_feature (433)..(433): n is a, c, g, or t
  misc_feature (437)..(437): n is a, c, g, or t
  misc_feature (451)..(451): n is a, c, g, or t
  misc_feature (691)..(691): n is a, c, g, or t
  misc_feature (708)..(708): n is a, c, g, or t
  misc_feature (744)..(744): n is a, c, g, or t
  misc_feature (746)..(746): n is a, c, g, or t
  misc_feature (815)..(815): n is a, c, g, or t
ggaggaagtggcgcggaccttcatttggggtttcggttcccccccttccccttccccggggtctgggggtgacattgcaccgcgcccctcgtggggtcgcgtgccaccccacgcggactccccagctggcgcgcccctcccatttgcctgtctggtcaggcccccaccccccttcccacctgaccagccatgggggctgcggtgttatttcggtctgcactttcgtcgcagttcggcccggccttcgcgcttttcttgatcactgtggctggggacccgcttcgcgttatcatcctggtcgcaggggcatttttctggctggtctccctgctcctggcctctgtggtctggttcatcttggtccatgtgaccgaccggtcagatgcccggctccagtaannaanaanaaattatnaanaanaaaaaaaaaaanaaanaaaaaaaaaaaaanaccgctttgcctactacaagctgcttaagaaggcagatgaggggttagcatcgctgagtgaggacggaagatcacccatctccatccgccagatggcctatgtttctggtctctccttcggtatcatcagtggtgtcttctctgttatcaatattttggctgatgcacttgggccaggtgtggttgggatccatggagactcaccctattacttcctgacttcagccttatctgacagcngccattatcctgctccntaccttttggggagttgtgttctttgatgcctgtangncgagacggtactgggctttgggcctggtggttgggagtacctactgacatcgggactgacattcctganccctggtatgaggc

SEQ ID NO: 544594 - DNA, 710 bp, Homo sapiens
caagagtgtggttacagttggtcaacgagaaaactccttttttatagactttattctaataaagaatgaaataaggccaggcacgatggctcatgcctgtaatcccagcactccgggaggccgaggcaggcacatcacttgatgttaggagttagagaccagcctgaccaacatggggaaaccccgtctctactaaaaatacaaaaattagccacgtgtggtgatatgcacctgttataccagctacttgggaggctgaggcatgagtattgcttgaaccctaaacgcggaggctgcagtgagctgagattgcgccactgtgctccagcctgggtgacagagcaagactccatgtcaaaaaaaaaataaacatattaggccacgcacgcgggcttatgtatcgtatcccagcactttgggaggctgtggtgggtgtatcacaaggtcaacagatcatgaccatcctggccaacatggggaaaccccatatctactataaaaaaatttttataattaaattagcctgcgctggtgggagtgagcctgttatcccacgttctttggagggtgaagcaggaggaatattttaacaaggggtgggaaggtgcaatgggcgaaattgtgccaataacttcaagctgggaaagagcttgatttcggtgaaaaaaaggacttaaggaatccgattccaaaggggtccaaatggcaaa

SEQ ID NO: 544595 - DNA, 483 bp, Homo sapiens
ccctagagataaggcgcttcaggataccgaagaagttgttgaacacaaggagatcgacggcgtcttaaggagttaagggaacaattaacagaacttaccaagcagtatgaaaagtctgaaaatgatctgaaggccctacggagtgttgggcagatcgtgggtgaagtgcttaaaccagttaactgacagaaaaatacatgttaaagctaccaatggaccaagatatgtaggggtgtccgtagaacgttgaaaaaagtaagctgaagccaggaacaagagtgctttggatatgaattacaataaatattcatgaagactatttgcgagagaggtggatccactggtttataacatgtctcatgaggaccctgggaatgtaactacttctgagatggagggcatataagaacagatccgggaattaagagaggtgatagaattacctcttaaaacccagagatatatacaacgtgtaggataata

SEQ ID NO: 544596 - DNA, 1195 bp, Homo sapiens
catgacctccaggttaggattaatttgagtggcttgaaaatactgttaccttgaaggaccttctctttgaacaccatgtcccaagaggagaaggcggcttacctgagtgatcccagggcaccgccgtgtgaatataacagatttggcatgcacaaacacatgtacaggcaaaaccatgatgtataggcagcattacatagcgtaatagtatcacagggctgctcaatctgtcactgacaacagtcacgtctttctcagaaaacgatgaaagtaaagtgcctgctgatctcttaaagcgggccttcgtgaggatgagtacaagccctgaggctttcctggcgctccgctcccactatcgccagactctcacgctctgatatgcatcagccactggatcctcgggattggagacagacatctgaacaactttcatggtggccatggagactggcggcagatgatcgggatcgactttggcgcatgcgttctggatccgctacacagtttctgacagcccctgagttgatgccttttcggctaactcgccagtttatcaatctgatgttccccaatgaaagaaacgggccttatcgtacacgcatcatggtacacgcaactccgggccttccgctcagaccctggtctgctcaccaaccaccatggatgtgtcacgccacggagtcctcctttgctttggccacaatttgaccaggacaacatgctagaccaccaacggacgggctcccggcattacacagccacgctcacactgttgccacgacaccacaccgggacccccgaaccgcacacaatgccacgccacgacgaaagctacaaggtgccaaaatcagcccaccaaactgtcgacagacccacaccgggcccgcaaaacgccccggcgctcaagacatggtgcgctgcacaagaacccaccatccagacatgggcccagcaacagagcgaggaccccaaaacagcaaccaggacagcgcgtggacacgcacaatcacccaaattacgcgaactgtcagagcacacccaagacaccgcgaccggaaacaacacggacgggccactccaaggtggaccaatgatccttcccaaaagactacaggcaccaagcaacaacactggcacacaacacacgcgaccacccacgacaagcccaccgacacacaacgaacacgagacagat

SEQ ID NO: 544597 - DNA, 508 bp, Homo sapiens
ctcgctcctccagttactggggcgcattccaaccttccagcctgcgacctgcgttaatgaatcggacaatatagatacttgccccatacataccattgaggcagagcaaaaaaatataaatagaaccatgagtggaaatcgtgcacatccaggctggtcagtgtgtgcaaccagatctggttgaccaagttctatgggaggtgatcacgtgatgaacatggacatctgaccccaacactgtgcaacacataacacagctggtttttcacagactgagcacattgcgatcaagtgacatcgtgcacatgatcgtaccaacaagagaacaacacacacaggaaaggcacaaccagagaggaaccccaggacgccgagacacagacagacgaatcaaaaaaacacaggagacaaaatgagcaacaggaacagcaacaacgaaacaaaacgagacaaaaaccaaaagaccgagaacagaaagagaaaaaagggacacaccaagcgccccgac

SEQ ID NO: 544598 - DNA, 802 bp, Homo sapiens
tccggtcgccggccgtctatggtctccgtgccctccccagcccgctcctgcgcccttgcctggtcccgccgcccgcagccctggcagctccctgcgtggccccgccgaggcctgcctgcgccctgtgccagcgctgcgccccgggaacctggtgcgctgcctgactgcggccaccgcttctgtcgggcgtgcgtggtgcgcttctgggccgaggaggacgggcccttccctgtgccccgcagtgctgcctgactgactgctggcagcgcgccgtgtgagcccggcaggccccctgctcagccgcgccttctggcgctcgaggaggcggcctgtggctgcccgcgcgctgacggcccggccagcgatggcctgctgctgcagctgcgtgtgcctgcgccgacgcctggcccgcgtctgcgccgcctgccgtatggctgcggggccccgatgccgcccgatgtgggaacctgcgctggaggatggcgctggcggaaatggagaacaaggggtcttgtgcgaaatcattgagaacaggacttgaatgacgcccgggacctgcatggccagggcagagtcagcagctgcagtgtgcaagggacacgatgatggacacgtagggaagaaggcactgaccggactacaaggaagctgcgggccttcttagtgaaggaagaggagcatttctgccagaggcttagaggaggagggctccctaggacagttgttagaccatgaggaccagccctgctgcacgcgctcaagctgaaagaagatcactgggctcatgtgtcagattcgcacg

SEQ ID NO: 544599 - DNA, 152 bp, Homo sapiens
tctagaggtatccacgagtgccacacacagagacacaaccatcaaaaagagtgtcgtgttgtgaactaccacccagcgtttgtacactgcccatatctccatggcttttaaaaccacaaagccgaacgttgcccagagctgtctttggtatc

SEQ ID NO: 544600 - DNA, 276 bp, Homo sapiens
gatgtgattgacatgcacagaggaggtgtacagctacagaggaggagacgagggagcggatgggatgttatgcaccaggtatttacataacagctcgatgagcgcttcagcgaacagctgcgctaagtcatgactgcagagtggccagatggacgagtcccaacacagccaaacctcagaaaagccaatcagatggtttcagaacagcagccagatgggatgtgagtgttgcccactgtcagtcccctcctgtgtgctgtccacctcctctgtgct

SEQ ID NO: 544601 - DNA, 564 bp, Homo sapiens
ataatttttttataaatagatattaaaaatataatatacatctccaaacaaaaaaaaaaaaacacccccctccaaaacccaaaacaaacatttcccccatctaaaccaacccacaaaatttccatcctctaacaacgtaaaaccccctcccaaactcttcaaccctgtaaaaaacaccaaaaccccaaaatctttctaaaaacaaaaaactctactacccctcaactcccccaccccccaccaaaacactcaacccacaataacccttaacactcccccccctccgttaaacaccatacacttctcaccactatattaagcatacacaaaacactcttagaaacaaattccccacaaaaaaataaagttaacagggtctcccctaacaacctcccaaaaacaccaatcatatatccaagaaaaaaaacatctgcccgccaacacaactcacaaatataaaccttacttgccacaccataaacaccacatttcccccaataaaccgctcacccaattctctcatacaaccacatccaacccctctacaacaatgcaccctccccc

SEQ ID NO: 544602 - DNA, 147 bp, Homo sapiens
atgatatacatcggcacttcgctattctcgagcacctcgctatacatcgagcacctcgcatatcattggcactattgctgaacagaatgtcagtactattcactgcagcagtgaagaaaacgtgggggtgggtgccgataatagcga

SEQ ID NO: 544603 - DNA, 139 bp, Homo sapiens
tgcggatgacccggaatgttaccagctgcagaacttcaccctggacaggagcagtgtcttgtggatgggtattctcccaacagaaatgagcccttaactgggaattctgaccttcccttctgggctgtcatcctcatcg

SEQ ID NO: 544604 - DNA, 287 bp, Homo sapiens
  misc_feature (7)..(7): n is a, c, g, or t
  misc_feature (10)..(10): n is a, c, g, or t
  misc_feature (16)..(16): n is a, c, g, or t
cagcggnacnagcaantattggtaagtacaggaagaaatggaactctcatacgttgccaaaaggtctgtaaatcggtataaacactttggaaaactggtaataccactgaagctgaacattcgcataccctaagaccaagcaattccactactagtaattttatctaaaatatgggcaccacaaaacatataccaaacattcgcaaaagccaaaactggaaacaaaccaaatgctcacccacaatagaataaatgaatgtggtacagtcatacaagctggtcttgaa

SEQ ID NO: 544605 - DNA, 380 bp, Homo sapiens
gcctgccgataggacgctctcgtggtgtgtggcacgagcaggtgcggtttcgaaatacaccgtggggtcggctttgccggcagttggtagcgcaattcacagcgtttgccttgcgaggtggtgatccacagcgctccttggtccagcacattgggcaggaacacctggctggcgtcctgcaccaaggtgacgaactcacctgtggtcgtcgtaacggaggctcccaccggcatggggtttccatgatcgtcgctgacggtgagcagcatgcggcgggtcaggcccacaccgaactcgacccgatcgacagcgccacgcccggccgagatcacggccaggccattgttgatatcggcgttgcgcggtagtgagcgggtctg

SEQ ID NO: 544606 - DNA, 598 bp, Homo sapiens
atctcacatcttaacacatgctaaggccaaaaacaaccagtgaaaagaagagagaagacccttctcgaccacgggaagcatcttccagaagtgtgatgggaataaatatgcctctccttgtatattatttctaggaagaattttaaaaatgaatcctacacacctaagggacatgtttgataaagtagtaaaaattaaaaaaaaaaaaaactttactaagatgacttggctaagatgctctatctggctcgggaatctcgtttcaaaaacacaggggtgttttggtgaaaggtggtgggtcccaacagggagggacaattcatggaacttcgcatcaaaagacaattctttatacaacaggtggctaaaaattggggactctcttttcacattcttataaatatgaagctcacctggtggcttacaattttttaaatttggtattttccaaggggtgcatatggtacactttttgggggatatgctaagtaatgctacgtgtggattcctggaggtggataactttgcttgcagtagattttctttaaaagaatgcgcagttacatgcatacttcaaaagtattttcctgtaaaaaaa

SEQ ID NO: 544607 - DNA, 186 bp, Homo sapiens
cggcacgaggattctgaccagcaagcacccagacaccttcgcattctgtttctgtgcttgcaatggttcaactctccctggtggcagatgccctctagtggcaaaatcaataatcccacacaggcaacacagtcagtagagaagagtaagaaagggctatgaaactgcctttccaaaatcagaaca

SEQ ID NO: 544608 - DNA, 256 bp, Homo sapiens
agctgctacaatagctaagctcagcataaaggctccatatgtcatggcttcttcctttacccccagatttataactgatatgccaaatgcctggccctgcgctattctgaggcgattcgtgccgtctgttttcctcagtttcacaggactgttttgtgaatatcgctctatgaagagttcaatacttggcgctgtgtacaagttttcattatactgatctccaaatgtgttctatcaaatacctaccttggcttct

SEQ ID NO: 544609 - DNA, 229 bp, Homo sapiens
actctcagatctctcctttatcaagcagtcgtatttgactatactgtcagagacctggaggtgtctgaccaactctgccacatgcgggggctctatttcaccactgctgctccttggactgttttttgaggcacattgataatttagctactctgtgttacagatagcgatgtagactgactgattgcctgatgtaacaaaaacaacacaacacggtgttgcgcaaata

SEQ ID NO: 544610 - DNA, 81 bp, Homo sapiens
gacagcagcttctacatctgcagtgtcgaggggtacttaaccggggagctgttttttggagaaggctctaggctgaccgta

SEQ ID NO: 544611 - DNA, 109 bp, Homo sapiens
ctcaaaacgacaattctgtgcctgggggatctgacctggtgaggtagcctgaagtctgaatggagcccatagtcgaaaacaacctaagaatctctcagaagagggtttg

SEQ ID NO: 544612 - DNA, 231 bp, Homo sapiens
atcggatgcacctggcatggtgatccaggatgcagaagggatcatattcccagaacgcttaagtgtgcacctgcaggataaagagatgccggtcacataataaaatgatatctagggattcactgggggatatttttgttgctttaacttacatggttagagctacaaagaacagcgattttttatgttgtctcccttcccgattgaaaaacataatacatggggaccata

SEQ ID NO: 544613 - DNA, 207 bp, Homo sapiens
cttagttggtacatagctagatgtaaggtacattttaaggtaaggtaccttaacgtatacattacttaagaatatcacagaggtggctggcaagatgacagcataggaacagctccagtctgcagctcccagtgagatcaacacagaaggtgggtgatttctgcatttccaactgagatacccagctcatctcattgggactggtta

SEQ ID NO: 544614 - DNA, 156 bp, Homo sapiens
tcaatttacacatggttgctaggggctagggggcaaggggatgtggagtgactgctaatgggtactgggtttctttggggatgatgaaaatgttttggaatctgatagtggtgatgcttgtacaaccttatgaaaacaaaaagtgtagaaattgaa

SEQ ID NO: 544615 - DNA, 904 bp, Homo sapiens
gtagctctgcgaggggccggagcgcggcggagccatgcagtacccggcaccccgggccggcggcgggcgccgtgggggtgccgtgtacgcgcccacgccgtgctgaaccggacacccgacgcccttttacatcgaggacatcctgggtccgcgggcccgccgcgcccacggcccgccccacgctgccgtccccctattcctccttcaccagcctcgtgtccccactaccggaaccccgggtgtacgagcccagccgatccatccagtcttctcgcaccactccggcgccggcttggccgtggctaacggacccggcgtgtttcgacgggggcccctccgtgtaccccttcccagcgggacggtgaatgacctaaacagcaacggaccccttgctaccggacaacagagcgcggagtggggaaaccttctaactctgagcagccgtccgttacttgcaggatggccctcttgcccattgaagcgaggggcaacacggcaggcccattgtgacgaattcctaccaacagaaccaatactcaattacggaagctagaaacgcaccggaccatttcggacggacgccagccacaccctagtcttcgtctccgtgggcgaggaagagaaacgccgttctggccaaagaatgcttgacagcataagcgaaggagcacacgggtgatacacaccttggtatcccacggaaatccgacgtcggctataattgggaggacgactaccacaattgtgaagatagccttacaacgcaatgtcccaccctcacaggacgcgggaaccgatttggcacagtttcctggtcgatcagtgggacggagttgggccactgaacacacttacggtggctctctgaatacgacccaacgtgcagcactacctttttccatag

SEQ ID NO: 544616 - DNA, 311 bp, Homo sapiens
cgctatgctagtgtagtccaggcgtataaaataggacataccctgcatacaactacctctatcttggctacactaactaagcctgatacccttttcactagcgttatacagactctatcatcacaccactaatctaagttctcagacagttcaacattacacgcattcagaacaacataggcgtctttggctcccttcaacagaagccggaccatagtgatcattcactctctatgagtctgtcttatacttctggaacaggggcctaacaaccatatcctatagcaaaaccggtagctgcctatgcctcc

SEQ ID NO: 544617 - DNA, 136 bp, Homo sapiens
ttctagacctcccaaagtgctcagattacaggcgtagccaccgcgcttggtgagaaatccaatattactattcaaaactcaccacagtgcgcaagggtgcaggtttcactcagtatggtagtactcaagactcatt

SEQ ID NO: 544618 - DNA, 204 bp, Homo sapiens
cccggcttttactgtaccgataatactagtttcttgcactgaatatataaacactccacagtgtttatagttagggaagatattagggaaggaaatatatattgtaaaagatagaaggctgtatctaattattaaatctatatttaaagtttgttcacttgaattcttttgaggataggatagtattattcttgctgttacagt

SEQ ID NO: 544619 - DNA, 385 bp, Homo sapiens
aagccagcctccagcatcgcctcctctgggatcttctctgacttcacagtcggtttcagaagcctctgatgaccccatgcggagaagactgctcccctcactgctggcacacggcagatgctcagtaagtatcgttcaatgactgactaaatgtctcataatatccttcataaacaagggcctggtgtggattcataaatgggtctctcaaagtttaattggtgagactctgttgtatcagacaatgaagggttaaaagataatattcaaaaaagtaaaatcatgacacacaaatctagaatgaacacacattgataaggtttggatgtgtgtcctcacccaaacctcatgtcgaactgggatcccccgtgtcagaggcggccgc

SEQ ID NO: 544620 - DNA, 377 bp, Homo sapiens
  misc_feature (40)..(40): n is a, c, g, or t
  misc_feature (74)..(74): n is a, c, g, or t
  misc_feature (79)..(79): n is a, c, g, or t
  misc_feature (128)..(128): n is a, c, g, or t
  misc_feature (131)..(131): n is a, c, g, or t
  misc_feature (266)..(266): n is a, c, g, or t
  misc_feature (270)..(270): n is a, c, g, or t
  misc_feature (281)..(281): n is a, c, g, or t
  misc_feature (286)..(286): n is a, c, g, or t
  misc_feature (297)..(297): n is a, c, g, or t
  misc_feature (306)..(308): n is a, c, g, or t
  misc_feature (320)..(320): n is a, c, g, or t
  misc_feature (327)..(327): n is a, c, g, or t
  misc_feature (333)..(333): n is a, c, g, or t
  misc_feature (341)..(341): n is a, c, g, or t
  misc_feature (346)..(346): n is a, c, g, or t
  misc_feature (348)..(348): n is a, c, g, or t
  misc_feature (361)..(361): n is a, c, g, or t
  misc_feature (372)..(372): n is a, c, g, or t
ttgttgtcttttgttttttttttccctttttctgggagangggggtctcgctatttggcccaggcgggtctcgnactcnggggctcaagctatcctcccgcctcttagcctccctgagagcggggatnacnggcgtgagccacccggtgggttggagcgctccacccgagggggtgggctagatcgggtctagagaggcgattccaagctctctggcgggctcccagctgggggaatccttaaggctggtctcaacctacacgttnaaantgctcctgggngtgtngggggaggggnagagggaannngagctctctctngacctcntccaanacccttgnttggntnacccagccatttncagtagctacncgggg

SEQ ID NO: 544621 - DNA, 519 bp, Homo sapiens
aaaaaacaattccacggggtgtgggaataatttaattcaaccggggggcagggtttttttcttgggaaaggggcggtgaagggacccaaaataaattaggtgggttccccccttaaggaccccaaggattacacttaatttttcgggcccctattttttttggaattgtttccggaattcaatttttttccggaaggaacttttctaatgtgtattccgcaggcggaaattaatcccccctaaaagaacaaaaaaaaatggtcccccccgggggggggccctttaaaaataaagggttccccggggggaggaaaattgggaggaggacacctccaatttttttgttttattcccttcaaaaaatattttgactaaataattcattaattattcaatttttcttatatttaaaaaaaaagggctctttttttttgcccccctgaaaaagcacaccttagttgaaaaaaacttccccccccacccggaggtttttttttttaaaaataccattccttatac

SEQ ID NO: 544622 - DNA, 1008 bp, Homo sapiens
cggacgcgctgggtgtcaatgatagacaaatacccagtgtaggtatactttttccaactaccactgctacatgataatctttctcacgctatatacatgcaaccttcttgcgcttcatttccatgaagctggtctcaatatatacagtatacttcgtccttcaactgctgcttctgttaacagctgatctctattctcttctctctccattctatactatcttcacttagcttcattcatacaactctgtccagttgaggcctcaggaacacacaggcctgacttatcatgactccgaagctataccacacacgacaaccattccaaataaacttcacaccggcgacactcattctcactactaacccagaatgggtctcacaacgtgacatggacctcaattacgctacgcttatcaacacaacccaactccgtaaccccaaagttgttcacgagtatcacaaaaacatctcactatctaccgcttacaccaccacaatgcaacacagattccccaatactaataaacctatttaaacacgggcaacgcaccttgcacacttggacaacagattcccccctaaagttaataaaaaccatggtacttccataggtacactctcgcaaaatacacgatcactatgcaacaccataactcacgtgcacataaaacacagaccacaacgacgcattcaaattcacccacacgatgaacaatcacggctgaaaacctcatgcccaaagaggcaacctcaagcgcgccaacacaatatcacacgagtaaaacgatagacacaggacacgattcgcacccccaaaataattttacaccccttatcaaaaactttggcccaccccactatagttaaacacaattacattaaataacccataataatctaacaggggataatcaccattggaacaaataaaggttccctacagagtgacaaacgttttgaacaattgagtagaacaaaccacatcataatataacaggtacaccca

SEQ ID NO: 544623 - DNA, 267 bp, Homo sapiens
tagtagtcccagctcctcgggagactgagtgcagagaatctgcttgaacccgggaggcagaggtttcagtgagcggagattgcccactgcactccagcctgggcaacagagtgagactctgtttcacaaaaaaaaaaaaaaaaaggaaagtgtttctaaacaccttacttaaaaaacagattatttgcattatgggatttaaccctggccataatttgtgttttttgggtacagacggggtttcaccatttttggtcaggctggtct

SEQ ID NO: 544624 - DNA, 339 bp, Homo sapiens
gatctagaggacccccacccaggctgagcgcggtggtgtgatcatagctcattgcggcatcaacattctgggttcgggcagtcgtcctgcctcagcttcccaagtggctggtactgcaggccgcataccaccatgtccagctaatttttgcattttttgtagagacggggtttgccatggtgcccgggctggtcttgagctggtctccaattcttggcctccagtgatccacccacctcagctttccaaagtgctgggattacagtaatgagccaccatgcctggcctaccataagttttaaaagacagtaatttttttatggaatgttgactaaatgt

SEQ ID NO: 544625 - DNA, 354 bp, Homo sapiens
aacgggtgatgcggttgtgtgtgtccctgtgtgtgtccgcgcgcattgcgtgtctgtgtgccgacttctgtctctctctcacgtctctctctctctctctctctctctctgtctctctcccttctcgctctttcggacgccctctctctctgtctctgtccgtctgtgtgtgcgcgcgccttgggacacatgcgccctgcgcgccggagggtgggtatctcgcacgtcgccctttcttcatggcagcgtgtccccgcgtctctgcctaggtcgagtggcccgttggcagacgtcgtccccggggttccagtttgggggtctgagaaggcctgcgcaacgttggcaatgggcgtc

SEQ ID NO: 544626 - DNA, 1013 bp, Homo sapiens
gcaggaaggaacacacaagtagttatctttcaggctgctctttgaactacttccaatgcacccctgaacactagcctgcaggcagagctttcaaccactgcctaacagctaactgacttctacactgcacgcttctggacactgcgtctcctacctggcgcaagctctgctggcgcacggactgacacaccacgaaagcacgctgcgagcttacctctcgacgctgaactccacacaatacacgcaacaccctactgcctacgccagcccacaccttgcacacaaagccactaacacgcaactctttgacactaactccgagctgcaactggcgcacgacttctgactactcagttcacttgcgcacaaaccttacataagcgctttatacaaaacactacatgcaacagctaccaagctagctaccccaacaacaagctgaaccattagcgcaacacgccggtagcttcaatgttcatacattccagccattacccaggctggaagcttcaacttcggacaggccgcttgcaaaacactattgaccactctatctttccaacacataacttggaacccttaaaggcgactttgcccaaaagcagtccttttgctttactattacgttcctggcactctattttcgctcttttcatatgcgacaaattgctggaccacttgcttccttgctgaaaaacccaaagcatttggcatcaacggtatgcggctacctgaccgcattacttctttaactccttggcccattatgcgggttaataaaaccaccctttacatacaccccttgggttcctttaccacgcgggcaatttggccttttacacatggggctacatttccgttgtcccgtggggccttttacgcaactgaaccgcggacttcaaggaaaggttacctaatgtgacaggcatgcataaccaagcactacactgatacggcatcgggggaccaccacggggtctgccctaccatgtgcccatgcggagaaccccagt

SEQ ID NO: 544627 - DNA, 154 bp, Homo sapiens
ttcccacgattataatacactcggcacagacagagtctgggagccatgggggcaccccttgccctccccaggcttcctaagtaacaactgcagaatattaaacataaaggctgggtgtggctcaggcaaaggcccttccctgcatgccaggggt

SEQ ID NO: 544628 - DNA, 1237 bp, Homo sapiens
  misc_feature (705)..(705): n is a, c, g, or t
aatacaggaccattgctcggttacgtgagagcatggttcccgtcggagttatcggtctacctgaatcgccctagaatgggccatctggaggcaacggcgtgaaggaacttaaacatcttaggagaattggagcccatccataggccgtgtactaccctcaccaaccattccctaggcgtagtacgaagggtttaggcaatagaatctctacatactgctgctgtggcaacgtcagatgagtgccgggcatccctagagaggcttagaactgaaataagcggacgggctggctcgcgagcaggcatgatgagccccatgtgggtccgattgaatagcgcgattgccgacatggggctgtcgctatgactagtagcgctaggatttggaagccagcggtaatcggctttggacgatcaccgtcacttacaatgacgtcctttcttagtagttgatatacggttgttagccgctgggtgtagtgcacgttgatgcgcacctggtcctgagctcgacttgtacaagttgcaccgcagatacgagttcgctcgtcagctaagcttacacgtgacactgcgtgagtcccgtatatcgcatgctcacctgcacacgcacagttgacgcatatgtaaaacccatatgcgtcacgtttcgtcaataggaaagaccgtcaagactatcgcgttaattgaagggcggaatcgttcnccaaaaggagacaaagctcaacacctaagacgcaacgggaggacggaggtcgggtccccaagaggcccatctcatttttcacagcgtttgaaacctcatggcttgaatgattctcgggtagcagttcccccaacgagaggtccaaggtcacgccttccaaaaggctcacgcgcgaaacgacgtttggtggccccgagagactttgcgacttccctaggatcaataccctcatatggcacgtcccctgttcggaccacgggatacccttcctgaaagtctccccaaggcgaggttaacacccccgtggtagtatccaaccaagaaccacggggcccatcgccacagccatctggcccctacgcagaggagaaacaggctgtagttctaccacctatgcaggagcacaacctttcttcgctcacacacagtgcactcttttctgaaattcacccacgtatagatagtatatataccatagtgatgtcaaaaagcaaagcagtatatcgctacctgaacagcactaactagacag

SEQ ID NO: 544629 - DNA, 231 bp, Homo sapiens
cggtccggatgtgagataggtaggtggaggtgcagggagccaagatcgcgccagtgcactccagcacaggtgacagtgtgagactgtctcacataaaaagagaaaagaaggaaagatatgtgaaaagctcttttagagacttaatcaacaagttaggctatcgtatctgttgggtttttcttccttggcttcctgaccacttgaagaagaaacctacctatttcacaatcg

SEQ ID NO: 544630 - DNA, 430 bp, Homo sapiens
  misc_feature (297)..(297): n is a, c, g, or t
  misc_feature (417)..(417): n is a, c, g, or t
tctcgacccagcgtccggtccctcttcttatggaaatgctttgagatggtgacagggctggatgaacgtgtgaccctgggagatccgggctggactgtggaccccgatgggccagagtccttgtggcccacagcatagcactggggacagtgcgctctatgcaggtgatgtttgtgagaacagcatggttatttttttttgaagtcacatttgttcaacttaaaggattggggggtattctgaagttatcccctcccttatttggatgataaaatttccttttatgtaatgaaggtnaaagtagagggcaatatttttgctttttgaaatgctcttggttgcaaaacaaaatgttggttgctgtttgtcaaccccaaaatttcttcttaagttcgcctgtctctgaaatcccaaagncacggaaccgcat

SEQ ID NO: 544631 - DNA, 917 bp, Homo sapiens
  misc_feature (16)..(16): n is a, c, g, or t
  misc_feature (179)..(180): n is a, c, g, or t
  misc_feature (240)..(240): n is a, c, g, or t
  misc_feature (254)..(254): n is a, c, g, or t
  misc_feature (283)..(283): n is a, c, g, or t
  misc_feature (313)..(313): n is a, c, g, or t
  misc_feature (331)..(331): n is a, c, g, or t
  misc_feature (336)..(336): n is a, c, g, or t
  misc_feature (340)..(340): n is a, c, g, or t
  misc_feature (344)..(345): n is a, c, g, or t
  misc_feature (347)..(347): n is a, c, g, or t
  misc_feature (357)..(357): n is a, c, g, or t
  misc_feature (385)..(385): n is a, c, g, or t
  misc_feature (390)..(390): n is a, c, g, or t
  misc_feature (392)..(392): n is a, c, g, or t
  misc_feature (413)..(413): n is a, c, g, or t
  misc_feature (420)..(420): n is a, c, g, or t
  misc_feature (440)..(440): n is a, c, g, or t
  misc_feature (635)..(635): n is a, c, g, or t
  misc_feature (656)..(656): n is a, c, g, or t
  misc_feature (665)..(665): n is a, c, g, or t
  misc_feature (702)..(702): n is a, c, g, or t
  misc_feature (713)..(713): n is a, c, g, or t
  misc_feature (726)..(728): n is a, c, g, or t
  misc_feature (739)..(739): n is a, c, g, or t
  misc_feature (742)..(742): n is a, c, g, or t
  misc_feature (752)..(752): n is a, c, g, or t
  misc_feature (757)..(757): n is a, c, g, or t
  misc_feature (760)..(760): n is a, c, g, or t
  misc_feature (763)..(763): n is a, c, g, or t
  misc_feature (768)..(768): n is a, c, g, or t
  misc_feature (770)..(772): n is a, c, g, or t
  misc_feature (780)..(780): n is a, c, g, or t
  misc_feature (783)..(784): n is a, c, g, or t
  misc_feature (804)..(804): n is a, c, g, or t
  misc_feature (806)..(806): n is a, c, g, or t
  misc_feature (814)..(814): n is a, c, g, or t
  misc_feature (914)..(914): n is a, c, g, or t
attgaagacacatctnaaaagaagggtttgtccaggcatgcctgcctcatccccttatattgccacttccattttcatcttcttttgtatcataaatgagaacttcagactgtgttaaagaaaattgaatctgtcctcttctccccacccaaaattacttcgtattatttaatgtctgnngtcatccttcaaagaaaagtcttgcccggggttattttatttaatttatttatgttatanagtgtatgtaagcnatcatgtcataagcgatgattctgtacantcattcctgcatgaaaattgttttggaganttcttggtaattgaggancagcngagngggnntncccacccgcnccgtaaaagtgcttacaatgaacagggnttctntnctttatcaaagagccaaaganacgtggncaaaaaaagaaaagcttgangtctcaatgcctaatgtgtgcgcataaaacaggcacgaagaaacaaacgtgtgtgtcctcttaattcctatatcacaaatatagcagaagcagcaatctgtacagtaaaatgcagtcatggaaaaaaaatctctctaaagcatctgaaatacttaaaaatgtttaactttaaaatgcatagtgatcaggaaaggnatacttaggcaagagaagcanctgaactcncacgttcacatgaagcatcccccatcgattcttaaancatatgtaaantaggacttaattnnntcacaaaccanaanaataatatanaactngcnaangggcnannntttaaatnatnntttttttttctattcatgcncnagtttganacagccaaaatccttacagtacacaaaaccattaataatgtagaaagagacaaaatgtaagagagaagatacatactgagtgtggataatcaagtcaggntct

SEQ ID NO: 544632 - DNA, 939 bp, Homo sapiens
  misc_feature (819)..(819): n is a, c, g, or t
tccggggggttttggtggtggctttttccccaaaataaaaggttttttttataaaacccggtttaaaaaatcccaaggcgtatgaattggttttggggttaacttttggggcttaacagattcgtgccgggggtatgaacttctcagttttgcttataggacaaacctcggggggcttataatccatagggtcccttttatgttgggtcagtgggtcacctcccattgccagtttatcagcaaattccaatcgaggtgtgtcctccgagacactctataaagtcgtggttataccctcccttcaagtgtccagcgtggttaccactccttgttccaacgctatatatttcacttcttcaccgtgaacttctgtgcaagaaaagtggtcgtggcgggtcctcggcgactcccacttcgtgcgcctccttataactcatggagcgggacgccggaagagggattcttttataaaacgagaaaacttcaagttaagggtgcacttcgccgtcggtaaaagccccctctggaaggggttccccattggcggctttaagaaaaaacacaacaacaaaaaaaaacgtgggcgccgggggcaagggggaccaaggggctgtaaaaccccagaccagtgtgggggacgaccccagggggcggggcaccccgcggcgggggtggatactgcaacaaccgtgtgtggccccagtggggaaaacccgtgctctcttactataaacccacaaattagccggggtggagagcgcgagggcggtataacccgcagaaatggggggggagtactcgaaaaaaacatctaacccnggggagcaggctggggtgggtaagacacccctgtcccagccggtcgaagagataaccctgcttaaaaaaaaaaacccctaaaaacgcttcggggggttccgcaaaagcaggcttaaccag

SEQ ID NO: 544633 - DNA, 259 bp, Homo sapiens
gttttttttttcccctcccccccccccccccttgggttcccctttttttttttggggggggggggaggggcccccttttctttttttttggggggggagggggatttttaaaaaacccggggggggtttaaatttaaaaggggggccccccccccccccccctttttttttgtttttttggggggaatttgggggggggggcgtttttaagggggaacccgggttttttttttttttaaaaggggtttttttttgtcca

SEQ ID NO: 544634 - DNA, 845 bp, Homo sapiens
aactcttgacctcaagtgatctacccacctcacgcctgtaatcccaacactttggggaggccaagacgagtggatcacgaggtcaggagttcaagaccagcctggccaagatgctgaggccctgtctctactaaaaataaaaaaattagctgggctacttgggaggctgaggctggagaatcgcttgggcccgggaggtggaggttgcggtgagccgagattgcccagcctaggtgacagagcgaggctccacctcaaaaaaaaaagaacagacctaaacctaaaatattaaacatattaccttccattttctagccaactgtgatattaacctgtgccatgagattctaagtagggcattattgtggggcatgctctgtgggaaagacaagaataccttttggaattctgagaaccaaaattattaaggttaaagggcaatccctttcaggcaaattccccaaactcatttgggaagtttacccaagagtattcggggaattgggtatcactaatcaatagtgttaacaactccattatagaatcaataggaagggtgtttatagaagttggtacctgtggccacaaattattcatgctgaaaagagcattagttgagaaacattggatctcttttatcagatattacctcttcaggtcgctcacgattcacatcactccgggttaacggcagggagcaaagcgtgactggatacctagttaaccattattctcacacatttgggcaggatttgacccatttttaagccacaccttatgccagggcctacaggctccagaaaacattcagacaggtcaaccactattactatgtacgctcagac

SEQ ID NO: 544635 - DNA, 526 bp, Homo sapiens
  misc_feature (71)..(71): n is a, c, g, or t
caagaaaaggtctggtttctggtggcctctatgaatcccatgtagggtgcagaccgtactccatccctccntgtgagcaccacgtcaacggctcccggcccccatgcacgggggagggagatacccccaagtgtagcaagatctgtgagcctggctacagcccgacctacaaacaggacaagcactacggatacaattcctacagcgtctccaatagcgagaaggacatcatggccgagatctacaaaaacggccccgtggagggagctttctctgtgtattctggacttcctgctctacaagtcaggagtgtaccaacacgtcaccggagagatgatgggtggccatgccatccgcatcctgggctggggatgtggagaatggcacaccctactggctggttgccaactcctggaacactgactggggtgacaatggcttctttaaaatactcagtaggatcaggatcatctgtggaatctgaatgcagatagtggtggctggaatgtcacgcagccgactcagt

SEQ ID NO: 544636 - DNA, 873 bp, Homo sapiens
gattgtatgagaagaaaaaccattagaactattcagccacaggaagcatgtgctcaggctttaagggctactgggacaaaagctgaagctccaacctagacatatgttaagctacgccatgtccacaactgtccactactaacaagcagtgtgcgtcacggatgagagtggcacaatgctgatctctgaagagataacacggacaagaagacacggtctgcggcatacgtgacgggaactattcttgatctaatgcagtacaggtgatttctaacctagaagcaagaaattctgggggccaagattagcacccctcctgcaggaggaagacagtcgcaccagcggcctgctcatggggcttgctggatctcatttgccacatcgtagaaaccgaattggaggaaacataatcttcattcctgtggttctccacgttcaatagtcgtggcagtgctgcttgaagtttgcagtttttcacatcatgaccaggattctggaagctacaaacagttgtgtattatacctctgtctcctggtttatcatactcatgtgacaccatcctcggggttccagtgtctccctttgcataacctgttgcattgcattgacagtggagtgtagcttcatcgactgaaacagctgtcataaggctcatgaaaagatctggataatacagacgaaaaatgagaaactgaaattcagtatcattggtgcggcttacctcggcttattgggcaggaagattcgaagactaagggattcaacctatgagtgctatgatcatctcgggaaacacgtgacgcgaatggtacagaactataagaaacagctcgaatcctctgctagacaggtcacgccagggaaattaggca

SEQ ID NO: 544637 - DNA, 631 bp, Homo sapiens
tatcaaaatcagcaactggggcatgttaatttcctccggggcctggcaggctggaaccaaaatataaacaaaggcactggggcacctgggtctggcacggtctggagcttggccgccgtgggttagcacaccggtgaaggggtgttgcccgggccgttgcagggacgtggagctcatctccctcccagaactgagagagggcccctcggggactgtggagcgcatcacaagtgtgctaggctttggccacagttacaggggagcaggttacggagttgggtgtgtgcagggccgtgggtggagaattgggagaaacccggttggacaaacgcttgctcacaacgtgctccataaacgccaggggagaacctcacaggcaagggcaaattgttgggcccgtgagatgttagaaaacgcgtgggataacaagctactgagaaaaacaaaagctgtggtgggctcagccaggcccccacaaagaagtgtgacatgcaaaacaggcatctggccctgtgtgagaagaccgaggcctcccgcgtagactcctattagcaaggcggctcagggggccgggctctggggctccagttcacggaactacattagtcagctgcagccacccctggattgc

SEQ ID NO: 544638 - DNA, 424 bp, Homo sapiens
cataataccagtattattgttcacactaagactactgaatggcatttacgactttttgctgctctttatttctcattatactacatttctagtaaggatgtacagacaaaatatcatattccaaagtcacttaaaataatcccctgggctgggcgttggctgtgacgcctgtaatcccagcactttgggaggccaagatgggcagattgcttgagctcacaagttcaagaccagcctgcccaacatggcaaaattccttttctataaaaattagctgggcgtggtggtgcttgcctgtagtcctagctactcaggaggctgaggtgggaagatggcttgagcctaggaggtagaagtttcagtcaactgagatcacgccacgccactgcactccagcctgggtgatagagccagacgttgtcta

SEQ ID NO: 544639 - DNA, 924 bp, Homo sapiens
tcctaaccccttggcatatatgcagtcatggactgtgtgtttttggctgtaccccctaagtcacctggtgctgattcaacacggtatttataaccatagtagctagagtagaaaattactgatcagctgtactacaggaacttcatagaagagtaaaaatctagttctttatatgatgccatgaatatattacgacactcgcgaaagagaatacattgatccgttgtatatgtgacttattgtcatcaggagaaatataatcttgcggaaatagtgtattcaaatatactttagtaatctagaaacaatgtacgtcatggattagtaatgtatttctaggttgtgagcaatatgtacgatgggtatacgaggcttcctaggaatttgagctactccacctaatttactcataggcaaagcctcttcgtggacagtaaggatcgccaaactcttctcttggattgaatacatataagccctattctctgttcaattcttcactataattactcttgcctccaacataccctagtactgcccatatggttccttccccttctattccaatcttcactagaggtcatcatgatgggggaagtaggagattcaggtgtaaatgcggtttacggcttacacgaattgttcgccatcgagtccctataaacgcacggacaatccgagtttaagggagaaatgtcccaagatcagccatatattattccacactagtcaacggacccgtgattacgaccgattatctaatgactaggctttaactcacagggccggacttactaggtttcgcacccggcccatgtaccatgaccacgaccgtttcaccggcagcactctacattgggcttctgctaacgcagacacgccacagggtcgcacagcatccctgactgggcgtccccacacacc

SEQ ID NO: 544640 - DNA, 456 bp, Homo sapiens
ggacaaggtccaccttttccaaccaggggaatttccaagcattgcacaggtggtacggttgtaaagggattgaaggtgctaaagtggaatttacctactccacgggatgatacattgagcaactaaagactcaaatgtctagctgtgtggctaaatggttacaagatgagatgtttcactcagactttcagcatcataacaaagcccttgctgttatggttgatgtaagtctgcaatagataaatatacatgtatttcagacatgtaaaaataccgagccctatgaaataatctgaagtttgcatgacttggaagtagaatatactatgttctctatttttagagctgtcttgttatttggtagaataaatgaatgtgtgtgtatattttttaggtcttaattgaaggcttaaaaatctgtcattttctttttgggctccaataaaatttaaaaga

SEQ ID NO: 544641 - DNA, 1353 bp, Homo sapiens
  misc_feature (709)..(709): n is a, c, g, or t
cttcaaacaaagtgccacacggccgcagtcccaactcaattcaagtgacaattgttagggacgtcctacgtcccggcccgggcacacgcgagaactcccgggccccctttcctaccattggcaccagcagctagcggggtaaccagacacccgcagcacataacactagagcctccgaccacccgcaagccagcaacgccgcagcagcatccagcccacaacagacagccaaggcacgcacacccgaaatacgacacgattacactgctgtatacacgaactgccttaacccagctacacacatattatctccgcgccctatccctaggctcacgtccgcacacccagacacacactgggccgcccctcagccatcagcgcacaggcatggcacccgcacgcgcctgcgtacagcgcaagctcagccccgcacagcccaagctccggggcacagctcaccggcagccggccagctcccgcgacacagccttggccccgccacacagcgcgccacccccaccctgcgcgcgccacagcggccagggcactagcgcccggcggccagtcactccccaatccccggccccacaggcaacatacccaagcgccccacggggccaccccggccgccactacgccccagccccaccagcaccccgccgcgctagcgcacttaccaccaacggccggcaaccaacgcgcgaccgtnacgacaacccagctccaccgccacatcggccccactatcccacaggccagggcatgcacaatcacacgtatgactcgacccacacacacggctcaacgactaggcaggctgcgcaaccctccgcacacacgtcggccacccccaacaccagcacccacagtaccccccacagacccactaaaccccacccagacgagcaacctcgcaccccaatagaggcacagcccccaaatggccccacgcgacaacaccgcgtcgaaaccaccaccgcacacgagtcagtgcaggctccctcacatccaccccacgaccatagagccccccatctgtcgggcaaaccccaggagcaactacgccgacaagtgggccccccacctctgggtgtcgtgcagcgtatccgctctacttcccgaagcgccacaattcggcgcggctgagcatcagcaatcgaatcaggggccacgcccatccgctccctccatcaactcttggcggcgatgctcgaaatcatgcggcgccccctacatcaccatagcgcactctattttcccgacaccctactacgccttggcggctcacgtcacctcagcacagcatggtatgcaacacatactagcgtgctagtatcttgcccgaccagcaag

SEQ ID NO: 544642 - DNA, 240 bp, Homo sapiens
ccccccggaacacacaatagctaagacccaaactgggattagataccttactatgcttagccctaaacctcaacagttaaatcggcaaaacttttcgccagaacactacgagccacagcttaaaactgaaagcacctggcggcgctctatagccctactagaggagcctagcgtgtaaacgagaaacctcgagcaaactcaccaccttttgctcagcctatataccgacatcgtcagcta

SEQ ID NO: 544643 - DNA, 643 bp, Homo sapiens
  misc_feature (464)..(464): n is a, c, g, or t
  misc_feature (483)..(483): n is a, c, g, or t
  misc_feature (502)..(502): n is a, c, g, or t
  misc_feature (545)..(545): n is a, c, g, or t
  misc_feature (552)..(552): n is a, c, g, or t
  misc_feature (596)..(596): n is a, c, g, or t
  misc_feature (611)..(611): n is a, c, g, or t
ctgccaagccttaccaccccagggtctagcatcacactacatggtgcctcaacccctgggacccaagttgctactgaaccctattggctcaggctcccaaattgtagcttaccctattacccaggcccaaactttcagagcacctctcccccagaattaggccagtgctgtgtccttccctccagtgatagaatcatagctataacctggccccctgaacctgagctgctagggggtaccccagagtcatagatcctggctgtgtgggtaacctacatccaacacagccacagagagaaaacttgtaccctaagacccaggtaccagaatagttttgtgagactctgagcctaggaccctggccccacagctgttccaaacacctgcacctggaacccaataccactgtggctgtttgtaggccatgtcagacctgacaccaaaagggatcatcttggctatgncccctttttttcccccaantttccggggtttaaaaaanttttttttttccccatgaaagagaagattcccaaactccttgntactaangacattaacaaacttacaccaattatggctctacaacaaacttntacaggcctaaaccnaaagaagtgcctacaggtattgcttgatgtgc

SEQ ID NO: 544644 - DNA, 957 bp, Homo sapiens
aatgcagctgtactggccccggatttctgggcattgctggtggacactgcgcaattttgcacttggagcgcttaagaagtacgggttgggtacgcggaccgtcagaggcgctgcagtcctgagaggaggcgagcttgtctgctagacgaatttcaagccaccattgcttcggcctggccgggagagcggaatgtggcctggtgttgcggagatgtcccttgcactggcaagacgtgtggccactggaagggagcccctgttatgacccctgtgcggctactgggtaattgctgtatccagtgttatctgttcttgtcttcgggaaccgctatcgatatgtgggaccctggagttcctgaggctcctgaaccgtcttcagttgacaacattcatgcagtcattcagttccacgcatggggcagagtgtgacgatgggcactggccacaaatcttatccattgggtgctgtccagcacttatgccaaatcccgagtacaccagatcctaaccctacaaattggatcatatagaagtggtgacagactgtcctggaacgaagtagctaggaagcatccagtattcaaagatcacctagtcgccaagtcgtccacatgtaagcggaaagacctaaagagacataagaggggcacctatgatggcgagaggaaccccaagccgataggaggcagcaagaaaccccatgatacgtccaacaccaagaaatggactaccaatagaggccaatggaacgcccataccaagatgggggcacgatgaggcatccgccgaggggcgcccgggaagtacaccgcgaaaaagtcgcaaacgcgaacaaagcagataggccggagagaagccatgagagggagtccaaatcgtcatgcgaagacaaaacattccaacacggcacaaaatgggcaggaattgcacgggaaggacaaagcgaggaagcaccca

SEQ ID NO: 544645 - DNA, 494 bp, Homo sapiens
  misc_feature (50)..(50): n is a, c, g, or t
cggtacctggtgaaccctatcgggaaacatggctcgtacgttcatcaggncaagaactgtgtatgcagtgctgtggggatccaggagtgaatggctgtcttttggcagtgtgcctggtatgcgtgtgtctagggcaaggattcacagaagtgagaacctttgcatttgtctccatttgcttctaattcattaggaactttaactttccctagggatttggactaaggcatcttcaaggtttcttttaggggaattaaaaatgtgacatgaagaacggttgaagaaacttgtctaggctggagagtaaagaagacatagaggctgggtgtggtgggtcacactgtaatcccagcattttgggaggctgacggggaggattgcttgaggccaggagttcaagaccaccctgggcaacatactgagagcccatctcattaaaaaaaaataggaaaaagacagtgggcaggaggtggggagaatgccaacatggtcat

SEQ ID NO: 544646 - DNA, 467 bp, Homo sapiens
  misc_feature (40)..(40): n is a, c, g, or t
  misc_feature (127)..(127): n is a, c, g, or t
ttacccagggtgtttgccaaaggacggcttttccaccccnaaggggtttttattcccaagggaactttgcctttttcctttctgggggggggcccccaatttgcccgggtttgttttccaattgggnaccccactgttggccccgggccccctttttttttccacgggggcaaaaaggttctgggccttttttgggggaggggtttccccctcccccctttttaaaaggggaaggcctttttgggtggtcccttccccctttgggggggggcccccgggggtgttgccccccccaatgtttctttttttttttgaggcccccctttaggtttaaacccaggaaaagggggggggggcgggccgggatttggggtttgggtttttttttttttcccccaaaaacccccccctttgcccgtttttttttccaaaccagggaaaaaagggtttttttttttaaaaggcca

SEQ ID NO: 544647 - DNA, 401 bp, Homo sapiens
cctatacacttccaggccctaggggggtcccatacgggtcatggatttgaatcggatggccactcacatgggagggaagaaggtggagcatacacaccctctggtcctataaggacaccccaaattccataatggttgatcatcttggcatccctgtcggccttggctctgattcttgcaggttgcatagcagtcaacagacgaagattgtgatggcagaacaaaaagctagtgatcaacaccgtaaatagccctgttgaggacacacacccaagcggacttaacggaaaggcactctctgctccagaaatgccgcattcggggaacatggactttgtctacacttcagaccagtttatgacacttgatgagaaaaggaacctgcagaatgtggacatgaa

SEQ ID NO: 544648 - DNA, 1011 bp, Homo sapiens
  misc_feature (228)..(228): n is a, c, g, or t
gcgctgccttggtctgcccaacgtggtgggtcccaaaatgtgaccagtgtgctccgctaccactggcaagcttggccaatggccaggtcgtgctgaaaccagtgatgccgatgcgagacgcctgtacaatacatcctcttcatgtgcccagcaggtagcaacccacgtatcagcaggggacaagatgcctcccgatgtcggagaaagtggatattaggtggacttgantgatgcaggacgcatgctagagctcagtcctgtacatagtgatctcaagatcctgagacactatcgcgtagacagtaggcctaccaatggcatgccagacgtccttgtcgacttgtgtgatttacctggaggaaccacgagcggcgccgtgcgcttgcgtgactaatggctactcaggcctgcttggcgtctgcacggcctgggcttggacgctggggcctcgcgtgtcgatcgatcgcgagtgccatcgcagaaggcgtatcgtgcagagtctgactatccctggatagtgctgtaggctcatgcacagactctatgcgtatcgcacgtatcctagttgagtcgcaggagcctttcctggggtaggctatgagctcgcatgcgcgcattggtgggtgtagcacatcccggcacttgtcccacgcgagcgagactctgttagtggtcaagggcgctcatgcgtgactcggtcagggacctggtggtcccttggcactctccgtgcctccttaaggaattgctgatagggaagtaaatgaatctagtaacgccaagagtccccggaagaccaggtgtgcgtccgacgtcaagtccccccggcgaggtccaccgagaagtcaagtggagggtggggcctgccatgcgttggggcccagtgttcgcccagtccctttcttccgcgtcaagcggcggaaaacctccgtccgcagggggccgtgtgctcgagccgtggggatttcttgccccccttgggcaggggaacggaggaccggtttgggtccc

SEQ ID NO: 544649 - DNA, 902 bp, Homo sapiens
gaaggcactgctgagctgggagatgtcggcgagggtgtgggaggaaccgtggggtctctcccggtcgggctttgcgaagcggtgctcctgtgtgacacgggcggttgctgggtttcattgcatctcatatgattgtctctttaggtggaacgagttatccatgactatatgatcataaatctagacaaggctggcattactgtgcgagcgttgaaagaatcttgtaaagcgattatctaggctaaactaggaactgagcatgatttatgagcaggggctggactatatgatggattctgcagattagtgaaacattgccttgtgttggaacacgagcaggaacaatgagactatgaggtactacaatgtgttgccgtgacaagaggcacatgtcatatcttgttcattggataacgtggctttgagtttacctatggttaatgtgtatggcacgtcaccgtttgggtaaagtgctgctcatgaagccaggagatggagaaagtaatgtatgtcagcacagatggaagtatatgggttggcagtcttgatcagggattgatgaatcttcacggcggaaggaatcttactaaatccttatgccgttcattctagaggcagggtgatgagtggttggtacaggtctttagtggggaacaatgataagtttaccaagtggttatcgcaaggaaagggaggaatgttatggaacgaagtcaactattccagaacagaggttatgcgcagaagtttagtaatctttggctgcagcaaaagtaggaactggttgggttgatggggtcagggtttcagcaaggaagcttcgtttaatgtactgatgttgtagaagcagtgatgggtgtctcaagagggaaacaggtaatttgtactggagcagttgaaag

SEQ ID NO: 544650 - DNA, 481 bp, Homo sapiens
ttccaataatgttggcattgatggtggtgccatgtcgatgtgtctcggcttactttacacaaaacaaacgtggccctaatatcaaaaccgaattcctggtctgtgccgcaacatccacaggagcaagatctatgatgggcaagcgtgcacattctgtgttctatattcaaagacagtcttgcccacatttccattccgcttagagcaagtgtcttgaagaacgatataccggaatctaatatttccctctgctttgatatctaagtcatttgcccctttgagaaccacagcttttttgaggttcttagcttgatcgtccatgtatcctacactgtttttacagatgttagtgatgttctgggaggcttcttttgataaaaggcgcaaaaaagtcatctgagtaatggctgtattaggtgattggtggtctccataagcgaactgagaccctctgttcatatcaatgaccaacaatttattg

SEQ ID NO: 544651 - DNA, 472 bp, Homo sapiens
tttttttttttggctgtgcataagtttattatctatatctgggaaaaatcatagaacaattgcgcgggatttaggcgtcgcagccagagcagatccgggagcactgagtgaagacggcgctagggaggcacaaccgacatgacgtatctatcagtgaagacgacggcgaccaattatgggagacagagatagcaacagacgaacatgactaggagaaactcgacgtaacattggggggaccacaatcagataggacaaggcataacgacctgcgaagtacccacaagaacatagaaaccaccattacatagcaaacatcactaaccaaaacaagcgcacaggaagtgaacgccaagaacaaacaaatgaaatcgaacgacgcaaccgaaaaccataggaaaagaaaatccaaacacacaataactcacaaaacaagaaaaagcgaaaaaggagaccaagaaaaaacaaacaa

SEQ ID NO: 544652 - DNA, 445 bp, Homo sapiens
  misc_feature (415)..(415): n is a, c, g, or t
tttttatcggccaaaacccttttgcgatttgtgtcaaaagaacattgggctcccaccggtcattgcgcttgtgattagcatgactttgcatatcacacgcgcgagcttttgtatctcacggagcgtgtgggaaaagcagcagactcttctcaacagaggatattagaatactcgggcttctcgagtgacaatgtcctcgcatctaatggccccttcctcatcggaagccggagtgcctgtggcgagacaacaaggaggagtacggtggctacaatcactaagaggggggcaagcagcagtcagtggctctcaggaggcagatagttccccccgaatttccctccgccaagagacgatgcggtccccacggcgtagagtgatcacgccgcgtgtgatgcgtgccaatcgacggcanaaaccaccagaacaacaatagacgaacaac

SEQ ID NO: 544653 - DNA, 962 bp, Homo sapiens
taatttccataaaccggaaatttaatgggtggaggatcagtacagactttccaattggtccacaaatcttaacatacgtaacgaaattctaaaaagccaggtatggtaattctttttaaaagttatcccagtgacttcccagctataaaattgggaagcaaatttccctataagaggctatcaagtaccagtatctctcacgtgggtcagctgttacatacggcccaccagttcacaactcaacgagcacgttacactacagtgttccaaatcgtggtaatcttctcacgagcacgagtaacaaagtttattaggaaaacgaggactaccacaaagaagtgttccagaggtgccacacaatttcgtggcagaagaagaagccagtgatcaaagagggggtttccttataggaaacaatttctactaaaaaacaccatgggttaattagaagctactttaaaagtgtccaagactttaaagtgcgaggacgtgactccattattggccatttaatatgcttggtatcatgggatataaaaattaaccccccatctggggcgaatggtcacagctggacacccgaaacaagtcagagcctcccataattcaatatcccacgactatttctgggtggtcccaaaaatataaacaaccagcaacaggatttcacctctaaaaaaagggcattaccccttaaaaacggggatgaggggggatccctccttctaaaaaaggtgtctagagctacttaaaaaccttgccttgacaaactagtggataaaatatcctcgggatggtcaagaggggagaccgcgccccctgatacaccgggcatacgggaataaccaaaatgggtacaagctcaccgggaaaaccagaggggaatccccaagcctcgtccccgttccgcagtaggactacaagactggtacccatcggcggttccttggccccttcctttg

SEQ ID NO: 544654 - DNA, 1627 bp, Homo sapiens
tggggatgaattacccttcccttttactcgggggtgtgacaaaccataaacaaaaaagaccaaacgtgtgttaaaacacccgagggttccgtagaaattacaagacctcaaattcatttacaatttcaagcttcactccgaaacccgggtctcacaaacccttaggtggagggtgctgtgtgtggagccaccaagatctcgggggagagagagggggcgaggaagtgtggactctcgtggaggccaaacgagaagagagggtgtgggaagaaggggactcctcccttaggtgtcccccggggtgaaatcaaccccccaaaccacaaacggggggttattcttccaacatatttcctcaatgtgacgcatatgtaaagagacttttacccagggggcctctgtgcgtccctttgtggcggcccccacaaccccacattcccctgtgggcccaagagggctttccaaaaaggcgcacagagtccccaaaaaaggggggtttctttcacccccccttccacgtgtgtggccctccgccgggcggtcttctattaagcactgtctcccctctttatctctcccctccctatttctttcgtcaaccatttttttcccctcctggcgagcactctagcggtaccgcccggagttcgacggggggtcccgcgggggatataaagcgcgcgcggcaattgtgaagggccgtgggcgcgggcgccccacaagcgggtgcgggtgggcgcggaataacccaaaagcttggcgcactttgaacaaacaaagaacggacgaaaaacaaccacggcccccacagcgcatacccctccgaaccactcacaccaccaggcagcacactcccacaaaaactgtctaacaacacgcacaagccacaccccctactaccacgagcagaactaccccacacacggggcaccaccacgaacagaaaacccgccgccccctagcgtccgcgctcataaaaaccaaccccaccaaaccccacgcaggaaaacaccccacgcacaccgcaagcaccttcccaaccacaaacccgccggagacacgggccgccccaccaggcgccacacccccacactgggcgcgagggacccgagacatcgacaaaacaacacaacaccgcacaaggcgcaacgacacacgcatcctccccccacgggcggtcatcccgtgcctactcatcatcacacagaccacaaaacaaggcgaggtgcgtaaagctccatgagagaagggccccaactagtaatcaaaggacgcgcaccccacaccccccccgaccactccggcagtccaagcaacacaccctacacgtggtaccactgacggcccagtaccaaagtgtaagacaaaaacagacggcgcctcactacaacgatcaagccagcataccagcggtactacgcgcacatccaacacacgaacacaaactacaggtcgctaaacgtaccaccaccacgtcaccccgcctgacgtcagccatgccagtcatcacacgacacctgctgcccacgaaacagcataaaataaatcgagacgacacagcgcgccacacaacgctctagagcttcacataccttgtccggcatcagctaaaatgagcagacagcat

SEQ ID NO: 544655 - DNA, 956 bp, Homo sapiens
tcgccgagggtgatcgaaagcggggcttctgggacgcaggtctggagacgcggctcggagcagccatttcggtgtagaagtggcagcacggagactggtcaaacaaatggatttacagaggcttacgcggacacgtgctctacagtaggacttgctgccagggaaggcgaactgttccacgtcttaaggaaactgctcaccaagggccgaagtgtcgatgttgctgataacaggtggatggatgccaattcatgaacgcagcttatcagcaactctgtagaacttgtttgcacactgtcaactctaatgcacgattcatctgaaaactacattaagatgaagacctttgacaggtttctgtgccttcgcatctcgcctgccagtcaaggaccttggaaaatcgtacagattcttttagaagctggggcagatcctaattgcaactactttagaagaaacgacaccattgttttttagctgtcgaccatggcaccgatacgatgtgttaacggctgttgccttcaacacggagcacatgtcacatggctcccattctatgtgtggatggcactcctttgcaccaggctcctttttcaggaagaatgctgccgatcctaaacttgcttcttagacaaggagcaaccaaggaatgccaggcatgatttggcatcccacctttatttgtggctgctcaagtatgcagctagacaggctgaagcatacgtaattcatcggggtgcaactgtccatgtcagcttgcacaagcttaccctgttccttgctgtcagaggccccccactggtgaggtggctcaccggcaaccggacttatgcagagcagccgagtacctatccggcgcgcgaggcaccaagctgccctgaccttaccggcgccggacaatacccccagccggcgacacgcaacgcagcgccgcgtgcacgcacacgactatgaca

SEQ ID NO: 544656 - DNA, 416 bp, Homo sapiens
caatccacagcgtactataccaacaggtttttgttttgttttttgagactgagcttgctcttgtgcccaggctggagtgcaatggcacgacctcagcccaccgcaacctccgcctcccgggctcaggcaactatcctgcctcagcctcccgagcagacaggaccacaggcatgcgccaccacccctgaccaattcttgtattcttagtagagacggggtttctccaagttggtcaggccggtctcaaactcccgacctcaggtgattcacccgccctggcatcccaaagtgctgggatcacaggcgtgagccatgctgccccagccataccatccatcagttttaagatacttaaccaaaacatttgtgctaggtgtcaagatatacttctaaatatttagctatagtgatggaag

SEQ ID NO: 544657 - DNA, 157 bp, Homo sapiens
gacctggaatttgttttcgtctgttcagtagactccgatttcagaatatgtcggaatttcagactccggaacttttgagaatgtcattacaggaactttgtttacataccgagctgttagccccagtcactgggtccgaaattacgccgataccgac

SEQ ID NO: 544658 - DNA, 354 bp, Homo sapiens
aaggctgctacgtgacctcgacccaggtggtcacgcactgcaaaccgtggatgtgcacgaatcaccgccacaagatgtacaaggacaagtatatattgaagaatagcgaccagaccctgaactgcgaggggactgtctccactgactatgcgctaaacgtcaaactcgctgaaagtgcaaataacatactgtgcattgttaaacaatgaacaggatcttccgtggatcgtgctgcgagacctactatcttagaacaagtgataaatcaaagcagctattctaacaagttttggagcatagacaacatcagattacaggaacatcaatgtgagggagcttagcaagcatctactg

SEQ ID NO: 544659 - DNA, 430 bp, Homo sapiens
  misc_feature (145)..(145): n is a, c, g, or t
cgggagcttacctgaaggaggtgctggagtaggtgatggcatgagatgtcacttgaagatcttgcctgattgaaggctttgccaatgctggaaggcccctcccaggaaaagtactctcgaaccaggggtctgggtctcctcgctngcaggatccagtttcgtgcatgtgtatgactcgtagtccacctgccaatctggactcagcggaaaggcaagctcctggcctcggaagacccagattccagaaatggagctgctatggttggttccaaaaaggatgacactggggaaggcattcttcctcagctggtccagtcgctggaacattccagtgatgagattgcagctcatgaaggtctgagtgagttcttcagggaagcgatactctgagtaccacagggaccagccgtccctatcaaagtgctcccag

SEQ ID NO: 544660 - DNA, 253 bp, Homo sapiens
ctaaacatatagtcgctatcttcatcattaacatccctcttttctattgcttggctgtaattttgtaaagataaattatactagtcctgtatgtgtgtttgtagtatatgttcagaaggcagcatcttcattttgctagctttgcagaatcttaaaatgtgtactcgttatttctaatgatgtacaaaaaaatccctagtcctgtttagcatttgacttttttatatgttttaaatgttgcagtgtgcttccg

SEQ ID NO: 544661 - DNA, 515 bp, Homo sapiens
gaagtcccacagaggaagtgcccaggctcactcacacacagcatgcacttgaagctttctgtggaaatcagaaacctccggggctcaggcgctgtagtggtggcctggtgactctgaccccttgaaggagaagcatctgtgaaggtgctgtccaggacaagtagggtgctctacggtaaaggacatggtggcctgacctgctccagagcagggaggcctcccttgaggaaataagataaacccagactttaaggataagcagaaaccagctaggtgaactggagtgggaacagcacgtgaaaaggccctggtttaggaaggagcaccactccttcagagcacagaaaggccaggatggccgaagcatagggaacaacaggaaagtgacataaattgaggctgcagaggtagaagaagggccttattggtcgtgctaggaatttggaattctgcaaagaagcctgggaaacagattttggtgacactcgccttctctttaatgtgcagtttcacca

SEQ ID NO: 544662 - DNA, 425 bp, Homo sapiens
  misc_feature (83)..(83): n is a, c, g, or t
aagatgacttaataagccgtgaacaaatctttcagcaatctggttctatatccatcatgagactgtggcattaaaaatggccnttatcatacagataaagctaagagaattcatggctttacaagcttccaattagtggcagaaatgagactaaagatttagtcctttgtacaaagggctggaaaatcatttaatatattttaataagtcaatttaattgaccatcctattttcaggctcagtatagctggcaagtcaatattatcaacagtaatcaaaactgccagcaatgtgaaagaaatcagtctgataaattgtatacaattaaactcttatttaaatgattttctaaaattatcaaaaatgatagaaaaaggatgggaacatttactgaaaagtggtaaaggacaccgcctccttccact

SEQ ID NO: 544663 - DNA, 282 bp, Homo sapiens
actccctgggagcaggccctggggtggctccgcccagtgtcgttctacctgaggtctacttgtgtctccccccttgttctctgcccccagaccatggccaaagcctttttacttcgggttttctgagagccttatggatgggctcacagtttttttgtaggaggagaaagaggaaggggcatggtgggcacccagccctgggggcatctgagggcacagccacgtccccagcaagggcacgctccagtagccccgtgggtgaaggcctctgttgaggctgcg

SEQ ID NO: 544664 - DNA, 179 bp, Homo sapiens
caagaaaatatttctctccaaccaaaacctttacatgaccctgtgtcatgaactcccgtcgtttggcacaaaccatgtagacccaaggcctggtggccgacagcagggatgtgataggcctctgctgtgtgatggggtaaacgatgggacccgaaagtgaacccggtcaggggtctcca

SEQ ID NO: 544665 - DNA, 646 bp, Homo sapiens
  misc_feature (58)..(58): n is a, c, g, or t
  misc_feature (72)..(72): n is a, c, g, or t
  misc_feature (103)..(103): n is a, c, g, or t
acacaaacataaacggtcctggtattaccataaacagtgcagccaagaaacagtttanagaaaatttaacangattcagattatatccattctgtcctctcgncctgagaggtaataattcccatatgggtcctatcctccccaatggttttcccatctctgatggaagagtccttttacaaagtggtgttgggcgataatgatgttatccccaacactttgggaggccgaggagggtggaccacttgaggtcaagagttcgagaccagcctggacaacatggcgaaaacccatctctactaaaaatataaaaatgggttgggcatggtgtagggcgatattatccccaacacgcaggctggagtgcagtggcacgatcttggctcatggcaacttccacctccagggttcaagcgattctccttcctcagcctcccgggtagccaggattacaggcgcgcaccaccacgcccagctcgtttggtatttttagtagagacagggtttcaccatggtggccaggctagtctcgaactcccaaactcaggtgatccggctggctcaagctcccaaagtgctgggattacaggcatgagccactgtgcccggtctacttctgtgattccatttaacaaagggaatgccc

SEQ ID NO: 544666 - DNA, 410 bp, Homo sapiens
  misc_feature (15)..(15): n is a, c, g, or t
  misc_feature (69)..(69): n is a, c, g, or t
  misc_feature (146)..(146): n is a, c, g, or t
  misc_feature (406)..(406): n is a, c, g, or t
  misc_feature (408)..(410): n is a, c, g, or t
atacctttgaaaaantttcagaaaattctccctaaattgtttccagcaaccccaggccaaaaagagagnccctggaatccccaaggtgagaggaaactttaaaagttacaccttatggcccaggcacggtggctcacacccgtaantccagcactttgggagactgaaatgggtggatcacttgaggcccaggagttcaggaccagcctggtcaatatggtgaaaccccatctctactaaaaatacaaaaattagcctggtgtggtggtgcatacctgtaatcccagccacttggcaggctgagacatgagaatcacttgcacccaggagacagaggctgcagtgagtgagatcatcccactgcactccaacctagacaacagagtgacactctgtctcattttgntnnn

SEQ ID NO: 544667 - DNA, 316 bp, Homo sapiens
ctacacggatccccacatactgcgcatatgggtacagaaataggaagtgagtaaatactgtacccatctggggtggcttcacaccgtatggtgcaacactagcagacatcacagatataaagatgtctaaggtctcttttacctttaatatactaatatagaaagaagctaattcaaggtagatcttccggatttgaaaactttaattgggataagaatgattaataaagactttcaaggcctatacttatttaaccaattttttttttttgtgagatagactctctctctttcccccgggggggtgtgcaatgtg

SEQ ID NO: 544668 - DNA, 464 bp, Homo sapiens
ggtcaggcatgcatgctggcggggcgtcgtttacatagaaacaagtattagcatattcacagatcacatctagtatcatagctataggcaccattattagaaaacatgatacctcaagagccagaaaaagtgtccatgtaataaaaagtcagctgagtatcttaagatgttttttctttaataaaaagtcaagaggtagagttaaactaccaaatattcgtttgttcactccagcaacaccatgtatttcatcttctgcaccatttgcacagggcatagacactcaggcattggcagcatagaaagctgcaataagatcatgaatggtccctgcacaagaaagtgcttgtcattttagtagaagcaggcaaatgtgaaaaaaaatgaacactataaagtctgtgtacaaagagatgtcttctttacctgccatcctctgctcagcccgttgtttccaccacacc

SEQ ID NO: 544669 - DNA, 719 bp, Homo sapiens
taatctagcagagtcttgaaccatacgatgcgaatataaacaggaaactggaaccctcgtattgaacatgaccaatgatacattcctcgacacatcaccaggcagatccacgatatttggaacgcacgattattgccctcgaggaccgattgggactgacgctcatggacaggttcccatggataaatttgtcgaaggcaccaggtccaatgcagtggtcaagtcggacgcgccaacaactcaatgtttcgtgggaaccatgcctgtggtttgcccgcgatcccattttgtgtaaggcagataatcgaagggtgctaaggcctcacactgagcgccatgccaagcttttgagtcaaggtggtgagcatcgaagcacaagttatggtgatcgcgcttatcgggtccgcccgggaagctttggcggaatcaccaacggcgccatcccaaagaacacgctccagattggccactcctgtgcccgcggacgggaacacagaaaagcgctaaccagcctgggtctgactcagcacggcgccggctggccatttgctgtacctgatttttttatcaaattcctgacagagcccggcgatttggtcgctgatattttttcaggccgggccatgaccggtcgagcagctgaagagaatcaacgtcgctggatctgcgtcgagagtgcattgcagtacgtgcgtggagccgccgagctcttccgttca

SEQ ID NO: 544670 - DNA, 129 bp, Homo sapiens
tagttctagaaggttcaatagcaagcaaacgatcagtatgcgtatatccgtcataaactctaatttagttcctcgagatattgccagcgtttatgcgagacctgttagagttaagcctgtgtattccca

SEQ ID NO: 544671 - DNA, 1094 bp, Homo sapiens
gaaatcgcctcatatggaaatcctcgcttgcctcctcgtcttggtgctccaacatatgcacaaggcctgttctactatttacacgacaggctaggcactcattcatcagtcgtagaagcgactagacaatcacaaactagagtgacatatggcaattgtcattacgtgcaaggtgggggctcagcccatggagatgcagcaagtaccgttcgaatacacattcatgcatactgacatccgggggatagtagcgagactatgatcctctcagagaagttacgtcagacattcagtatggttccactgcctatcgcaactcatgtcgatctagtttggctcccattggtgccaagagagataatcttcgcacatgaagtcaatctcaataggaatgagagggttggtgacacaacagatgcgatagagatactaactcgcaaagaaagaggatagttccactcggagcaaagagcgagctcatatcaacaatgtaaaagcgacaacatacacgaagctatagacaatgtgtatacactagcgctctttctgtcagggtaggttcagagcttggacccaatgccagggtaaccggatttataacgacaggccctccgcaagttatggaaaaggtgatggacgcttcgaattccccaactacagaagccaatcaatcataatatgaacacggaatggatttaccaactcattaatacgagatcgccattcagatgaccataaaccgaagggttgtcaagaggccatacagcggctttgggcactgaaaacttccaaatagcgttaaggtggatgcttttaaatctatacaacggaaactacctgattgattcaccaagggtagaacccctcgaagcgaacaaaggagagtttgccgacagtgaagaacagtgcctatggccccctacttaggcgcttttcgtgaacaacgcaaaatgattggcttggagaacgagggacgagagattaagaacaagtagacactccgacacagggacccagagaagcaacattgaaattgagccaaagagaagacagagagggtacaccaaacacaatatgaggggagagttaaaaca

SEQ ID NO: 544672 - DNA, 212 bp, Homo sapiens
ccggcccttacttcccacgatcacggggttggtgtaaataggcgtgtggtgtgtgttggggtgtgtgtgtctggggtgtggcatgtgtgtctggggtgtggtgtgtgtctggggtgcggtgtgtcgggcgtgtgtatgtgggatgtggcgtgtggggtgtgtgtctgggatgtgtggcatgtgactgggatggtgtgatcgtggggttgtaa

SEQ ID NO: 544673 - DNA, 248 bp, Homo sapiens
tggcgaattcggcacgagggccccctcttgggtcccctcctctgccatcacctgaagacattggcgccacacactgaatgccacctgtgcctgccggattagtccaccttgcggcccgagtttgactcagcttaacttctttatcgctaatatttacggcaaaatcccatgcttgggttttgtctttaaccttgtaacgcttgcaatcccaataaagcattactagtcgaaaaataaaatataaataa

SEQ ID NO: 544674 - DNA, 365 bp, Homo sapiens
gtcggagaagagaacaaacaatcaaagataagagcctttacccactgatagatgtcaagtgggtgggcagacaggtgcagtgactttagctcgatgctctggtgcttgacctgatacatccgtgaaaagtttgaagaatttactgggaaaatcctgtgaatggtttgaaccatcacctcaagtcactgctacccatgatgggggctttttaagtggggagtgtgagattaaacttgcccccaaacgatctcgtggggagactagggctggagaagaagatgaaggagaagaggattctgattctgattatgaaatatctgccaggctcgctacttgggttatataaaacagggcctttacttggt

SEQ ID NO: 544675 - DNA, 603 bp, Homo sapiens
cgacaagacggcggggtgagagtgcgggggggcggagggggaggcgggagcggtgtccgaggggtggggcgcaaccccggtgcgggcgttcagccaaaaaccgccgagaggagcggttcccttcaagtgggaaagcccttcatggcctcccccgccgaagagaggttctctcccctccctacccacctgagtccacgttgcctgctgaaaatggtccgaggtaacgccaaacgcccagggagtcggttctgcccggtcgaccacgatgagtgtccctccggagaggtaccctgcacagggacacccgcgcatctcccttagaagaagccccacctctctggattaaaactgctcctccagagcttcctaagtcaaggcccagtattgaaattggagggctaagactgagtccctccatcttgggtggaatgattgtgcgcacttggcgagaaatatgttgacaatgtctgtcaagacccagagatcagaaggctgggcacgggctaattcgggaggatttgtctaaaaagtgttggttttctgccacacccatgaaatttttaacttggggcaaccattaaaaggttcccaaactaaaataac

SEQ ID NO: 544676 - DNA, 894 bp, Homo sapiens
gatacgggcctagcaaatgtatatgctcctcccttctgtacatcatagttggatgttaaaatctgcacagcaacagtgacatacatgcagatcatatgaacaaaatgtagtttccctctgtgccaagacaacattagaatgaatatcgtctagcgatagtggtgcatgcatatcgtgcctttgtggtccgaatctgtagattctagacggtgagtaactcttttgtgcatacgttggtaattgtggcctgttaattttgttaatcacttggtacgaccatcaacaatggacgtggcatgttccgtacatcctaccaagtacgtaatagatcgttcacccctcttatagatctctcagcgaacaataattctttggaagcaggaataattgctcatacatagcgatcgatagcctgtcttttcgccgtgaaagcagtatttggcgccgtatatatagcctggcttgaatatcgtgtcatcatataggagctgtccacataagacattctgttgcatgagcgtaacacatcgaaatcggtggattataagtaataagccatcagatgccacacaacagggtctctgattgataacctttgaaggctctatagtactggtcctgcaccaggaagatgtctgtccttactcattgtctaaaaaatgtgttagtacagacactgcactaggagttaattggtcctacaagcatgcaacagtttatggctctacgtttggtgtttcccatacagtcagactcgtatttgaattacccgtgccatctgaatttcaccgttgcgaggtatcctgccttagttttccatgctgcttcaggtcgaatgttttgcgtcccgacaagattgttcaaggcctttcccagagacgtccggccttacgg

SEQ ID NO: 544677 - DNA, 546 bp, Homo sapiens
gacaagggtcgcctgtttctgcttaatcacatgcaggtccacgaaatccagtcttgaattggaaaccttgagacggccgacaagtaatctgtgcccatagttgttcacgaaattccctggagcataaactcacatgttcccgcatttgaacgatagcggtgccttttcaataagggcccctctctcaaaaagctgcatgacataattcttcttgaccagtgaaggagtgatggcccgcacctgtatactgagctcagggaccttcaacatcggctgcatgccaaggaacggactgagacacaacgagatgagcttctgaatcacaactctgccaataagggacatgacacattcatacctttggtcgaatacatgtgttgcactcataccttcagtggaggcacactggggtggatacctcataattgaggggcccagcattaaaattggctgtagcccaaagactgaccttttatgtgactaggggaaaaaactttaaattgccaacttgctggcatcgaccacacagagatgcaatcattcaaa

SEQ ID NO: 544678 - DNA, 173 bp, Homo sapiens
cgtgttagcggctctatggggagcatagggctagtgtgaactaggcagcgccgcgatcctgagccaagccgcattggggctgaggtctgttccccgagcacagtttccctttgcagaatgcagctcctcgaagcgcgttttgggccatttggaggctaggctctatgtgtgtc

SEQ ID NO: 544679 - DNA, 349 bp, Homo sapiens
  misc_feature (192)..(192): n is a, c, g, or t
  misc_feature (284)..(284): n is a, c, g, or t
aacatcaggaagtaacactatatggtctaaaaaggagaggaaccctcagttctggtaattgctcacacctttcccgggaaacttatgaataatctaccccttgtttagcatataatcaataaataaccataaaaataggcaaccagcagcccttggggctactcttcctatggagtagccattctgtatttntttactttcttaatattaactactttcactttgtggactcgcccgaattcttttcttgagcaaggtccaagaactctctcttggggactggntcacggccgctttctggtaacaggagcaatacaaatgggtattagtaaacggacggtttagtaac

SEQ ID NO: 544680 - DNA, 218 bp, Homo sapiens
tggctgtctagaggatcccgacgcaatactcgggaggctgggcacgagaatcgcttgaacctgggaggcagaggttacagtgagctgagattgtgtcagtgtactccagcctgggcaacagactgagacactgtctcaaaaaacaaacttttttttagaattggggagttacacacagtaccctaaaatacagtctttattcagatttggccaactgt

SEQ ID NO: 544681 - DNA, 129 bp, Homo sapiens
cacctgtcactcggataagccaagcgccatcttgataatcagtcatcatcagctgtgagatggattcctatgacgcctgcgaaagtgtctactacacgggcacagtctgtgagggggtaccgacgctcg

SEQ ID NO: 544682 - DNA, 302 bp, Homo sapiens
gaaaaacaaggtcttgctatgttgcccaggctggtcttgaactcctgggctcaagcaatcctactgcctcagcctctcaaagtgctgggattacaccatgagccaccatgcctggcctttattgttagatgaattgttttcaaaacaaggtcttgctttgtcacccaggctggtgtgcagcattgtgatctaagctcactgcagcttcaaactcctgggttcaagtgatcctcccacttaaaccttctacaggcacgggccacagagcccagttaatttgtaaattgtctgcagagacagga

SEQ ID NO: 544683 - DNA, 1631 bp, Homo sapiens
  misc_feature (1422)..(1422): n is a, c, g, or t
  misc_feature (1460)..(1460): n is a, c, g, or t
  misc_feature (1472)..(1472): n is a, c, g, or t
  misc_feature (1496)..(1496): n is a, c, g, or t
  misc_feature (1531)..(1531): n is a, c, g, or t
cttttgtggtgatctccgctgggtgtgtcttccttcctctcttcacatggctggttggtggtttctcctcctccgtcctgcccctcttgtatgctgtggcggcggctcgtccttttatataccactttctttgtctcggggggcgtccccccaacatcacctcgccaatattttttgttttgggccgagaggccctcctttgctcgagaggggtataattttctttggccgcccccccttccctcctcacccctactggcgggagggggccatcacgtgcctccctgctctttcttgtgggggcgcccggtgtctgtcacaaaaagggttgttgtttttgtacgcgcgcgtcagtattccctcctctcgccgccgctccttcttgctgtcgtccccaaggtgggtatatacgcctcggtgaattttggtggtgggggtttttctacctgcgccgttggcgcccgccgtgtcaaaaggggtgctctctgtgcgcgtttccttggttaaaggccgccgtttgcctcccaaagagaaaaaagttgttgtggcccctcaatattactttgtgggggcgcgcccccctttgtggcgcgttctacaaccgaagaggagttttttgggtccgtcggggagaatggtgtattccgccctaggcgcccactaggtgggagccactgcttccacccccccccctggggaagggtgaagagataaagagggggtgaaatagagtggataagcctccccaaggattctctctcgtttacccctgcggtgatagattatagagacacacacgcgttcttcataagagggggcgttaacaccgggagacacacacggcccccgagagaaagatcacacgtgtgcgagagaagagaagaagtgtgtgacccacataagccccacgagaggtttctctctccaggaggcgccctccggagactctcctcgggtgtcttgaggcccccccgaatgtgaaagagctctgtgtagagtatgtcgctctcactaggcgtgtgtgcctcgggccctcttcgctcgccactactggtgtgggccccctcggagataagtaacgcgggagaccccacagggggcacacgcacacgcacagtgtcccacagagtgggcgcacacacagtgcacaggcccctcggggacacacaaaggagaagctcgggggagagacacacaggagaaaagggtgtcttatagtgcacctgcctctcccgagaagtttgcttgagaagcgcacacttcggagagaaaattgggccacaggtggtcacatttaatctattgagcccaatataggagaagaggcacacaccacgttatactaatgagagtgaaaagggagagccacgaaagagactgattggagaggccctatcttgtgagtggggccatctgttgganctttccaccctggtccatatactctgcacagctgttangaatgtgccagncaccttggggaccacgccatgagncttgctgttgtacacccagggtattttttagaacnccagaaatagactgggaagatgccaccacccaggggttaccggcatcgcccctgctcctcaccctgtattttgtaatccagaaataaattgccttttaaa

SEQ ID NO: 544684 - DNA, 410 bp, Homo sapiens
  misc_feature (12)..(12): n is a, c, g, or t
  misc_feature (41)..(41): n is a, c, g, or t
  misc_feature (78)..(78): n is a, c, g, or t
  misc_feature (171)..(171): n is a, c, g, or t
  misc_feature (182)..(182): n is a, c, g, or t
  misc_feature (204)..(204): n is a, c, g, or t
  misc_feature (221)..(221): n is a, c, g, or t
  misc_feature (383)..(383): n is a, c, g, or t
cagcgatattgnccgctaatggctacagcatcgctgtgtcnagtgtacattgggcacgccgacacgcgtgagagtaangacatcaaggcgctcaatcgtgacattgcccgcatcgttgcaagacaagccgaattgaggaagcagattgatgccatcgtggctgatctgganaggggagccantgactgagtggccaaggccgcngcgacatgatcaagccnagggcgttcttctttgggggcattgatcgtgagggtgtccggcaacggtcaagacaacgccttgcaacgtgcacgctgcgggcagtttcagtgatcagcaagaagttgttcatgcctgcagcggcgtacgcaaaagacgctgcgcaacgccgcggccagcangcttgatgtggtagcagtgtctctaac

SEQ ID NO: 544685 - DNA, 755 bp, Homo sapiens
  misc_feature (546)..(546): n is a, c, g, or t
  misc_feature (584)..(584): n is a, c, g, or t
  misc_feature (596)..(596): n is a, c, g, or t
  misc_feature (620)..(620): n is a, c, g, or t
  misc_feature (655)..(655): n is a, c, g, or t
caagaaagttgcccatctggggcgcctggctcacgaggttgcctggaagtaccacgcagtgaccagcccgcctggaggagaagagcgaaagaggagcccagagtccccttcccgggagaagaaaccagctccatgaggctaccggaaaccaggcccgagaagaacctggagaagggaaattggccaataccacccgaggtcctccagacccccggctcctggtctgagccccattaagagctgttattcctcactgcgttgcctgcccttcctcccttgttgccctggaaatgtacgggaccccaggggcacgcagcacagtcccaggtgccaccacggcagccctgggaacactataggaaactgggagccaaggaaagggtcttagtcacctgcctcccgaagttgcttgaaagccctcggagaattgtgcacggtgtcatttatctatgacccataggaagagccacccgttactatgagtgaaagggagcccgaagactgattggagaggccctatcttgtgagtggggccatctgttgganctttccaccctggtccatatactctgcacagctgttangaatgtgccagncaccttggggaccacgccatgagncttgctgttgtacacccagggtattttttagaacnccagaaatagactgggaagatgccaccacccaggggttaccggcatcgcccctgctcctcaccctgtattttgtaatccagaaataaattgccttttaaa

SEQ ID NO: 544686 - DNA, 243 bp, Homo sapiens
aatgggactgtgagaagaaacatttgtcatttagcattattgggggatgcctgatacggttctgtatgaatagaaaaataaaacgagtaagagaaggagaaaaacaggtataaaaggtctaaagaattgggagggactaggacatctataagagtgcctaaggaaatacagcataatcctgtcagcgaagataatttatttactatcaagagtataagagtaggcagtctagggagataggca

SEQ ID NO: 544687 - DNA, 880 bp, Homo sapiens
tgactactcatctggaaaataggctttatccaaggtccgattggggtggatgacgtatgatataatcgagatcccagacaggaaattggacaagaactatcagaacttactagactaagtgtaatagcatacatgaccagtcacgttccagtccatgagaacaacgtatcgctgcggattggatattaggcaagagtatcttgattactgtgcttcttcaacaaacacaacattgagacagtcgtggaccacgccaattcattacaagtctagtatcaatcaaattcgtgatagttggaaacctgttagttactgacaagtcatcaaatgggcatatagcatagttttccttgcaattgataagcgctattgtgaactttacctatcagaaaaatgaatgttgtaaaacgaattcaagtgcagacgggccatgtagttctgagcagtatcagaatatcgatggcctcagtatatcagagagcgtacataggcccagttatggtagtgaaggtttgctaagctgaaggcctctactggtggtgatactctctatccaccaatgttgctagaatcgtgtgaagcagatacctctgtgggtggacgacatcgtttgcattggtgttaatacatacatgaggaccaaggttgacaaaaaccagtatccgagcatgtggtggattggtttacaaggattatcatcgtgtatgaacgagtgtctttgacacgaaggcattgacaattaattggggtgtaattcttgatcccgttgcggatcagtggtactagggaaagcatctgagagatggtcttgatccttaagcgagattcctttttcctttgtagaggttcgattgacgattgttcaggagtcaggtttcca

SEQ ID NO: 544688 - DNA, 347 bp, Homo sapiens
  misc_feature (126)..(126): n is a, c, g, or t
ctataatagcgacgcatcgtggccccctaagtcttcccatctttgtctgaatcacccccatctctcactcacacctcacacaaggtgcccagagggtctcacccttctgctgacatttatatgganggactcaaagctggttggtgtccaccttcagaggcagaatgaggctccaggggctgtgacctgcccagctcccttgcagctgctgttccctccatgctgaccctcgccaggccccaacatggctggctcctttggatcagtcacgtgtccattcagaccccacttgctaagaggattttccagcctgtgagaccaaacagacctccgtcggcttaaatttt

SEQ ID NO: 544689 - DNA, 1172 bp, Homo sapiens
gaagaaattgtcttatgtgaacctctactatgcattgggcggtaaggcacttgtgttggactattatggtagtaagatgtgggcgtcctatcaggaattcgtgtggattattgtctagtgggattgtagatgatggtctgagaaggaagacgaaagagttccagtgatgctacttgtgaatgataggggatgtgtggatactggagaaaagtagaataactctatgggtggttggagttgtcttacagaatgtggtgaacaatgagggaagcatgtgtgaacagtatggtagacgaattgcaattggttagaactatgacagtgaaagtagaattattggggtgaaaagtggtggacgttataggagcaagtagaatggtatagcgcatagagttggacgctcgaagggcaaggacatacgtattgtggggtggatataagaaatgcacgtgtgcgaatagcgtcgttgatgggggaagaaactacagggtttgtaaggtaggtagggttatgagtaggaggtgcgtgatgcaggtgtgagaaaagtataggttcacgttaggggttgagtaaaatagtatgggattcttgtggaacaattgtccatcagggaagtttcccgaattggcatatcagaaagggtggatagaactttagggaagacgtgttaggactatgtgggcggtttgcatgaaaggacataacggtgagcatagagtcagggagtgaaagcgagaattgctcaacatgggaagtgggcgaaactgatggttgccgcggaaaataaagggaggttggaagaggacaactcgaaggtaggtagaggttgttgtgtacttggataggacatggcatggtttgggagagctattcgaattcagaagtgagtgccaaggtgagctactatcaaggacgacgaatagaggcttgaaagcgaagaaggaattatgtgtcctatgtgactttgtaacatatgtgttaggaggcaaggtgaaataacaggaggtagatgtgaatacgtatgtggaatttagtgggacccacttggggtaggaaataatgggattcacagtggaatgtaggtattgttggttggactattgaagaaagaggggcagtcatctcagaagaggttttttgaccgaatctgtggtaagcggcagatagacagg

SEQ ID NO: 544690 - DNA, 1480 bp, Homo sapiens
  misc_feature (299)..(299): n is a, c, g, or t
  misc_feature (421)..(421): n is a, c, g, or t
agcggggcggcgcgccagcaaatccactcctggagcccgcggaccccgagcatcgcgcctgacagacccctgactggaccgtgcgcgcggcgtcgccaggccatgcgtatggcccccagtacccgggtggcctgccgacgaccgcgggcgtctagggatactaccccggcagctacattcaaccgtaggcgacggaggtggagcccaaacgcctcaaggggatgatgaggtagacggtgtgactagtggtagtctcgagcgtaacggtggtacaacgatcaaggactgatgtttgcacncgcgtcacgggcgaagtccgaagggggccttccacgggggggtcgattgcgaagcccaactagcggccgcggtgggcaggggagtggcgcgatcgcgaatctcgcggtattgctgagctctntatcgcataaagtcaaatctatacgggagcgcaaaaggttgcatacagaataggctattagtttcgaaagccttcgttcctttcccttgtactgtggtgtgagggcaaagacatcgggttcttccctatgtaagaaccaacgagccttctatagccttggtggggaacgaccgcccgaggcacaaaccacggaagacgctaagcagaaagacacggccttagttaggcgaagcgcaaatttgtagggacttttgcacccgcggcgaaatgtccttgccttgggggggactatacccacccgtttaggtggacggcgccgaggtaagtgcggggatggggacgtttcaccttcggacacacaggcgcctttagcacaccagttttgattcgtgtgcacgatgattcctccacctgtgggcgctttgtgctatattcggcacttagagcactactggacacaaggccacaactttctggtttcttcggcggatatatgggcattgtatgcaggacgctatagatgcgtgaagtcccacgacgccccactaaggacgggtgcttacacaaacgcccaacattgaatatgcgggtggatgtcagtaatagctgcgggtcgacacccatgtttcgccattatcgagaatagacgggccctccattattcgccatcgccgcgtttcggtttagattcgaacaagtggatatagacgtatcgccgattccaaacagtctggggtgccaccgcccaattccaaaagcgggcccgctcgcacattggaccaattggggcccttgtgaggcgcttggacacatcagtgtaaggcttgacaatcatttgtaaggggagcgccaaaacaagcgtagggagtctcagggagagtaccatttttagcaagcgccgcaagtctccggtaacaaaggcatggacttaggcagacaaaccgcgcgggaagtactcgttcgggcacctacacccaaattgccgccatttccacaaaggagtgaggacacttatagggggtagtccacaccccccccttggaaacagacagatgggcg

SEQ ID NO: 544691 - DNA, 739 bp, Homo sapiens
  misc_feature (2)..(4): n is a, c, g, or t
  misc_feature (9)..(10): n is a, c, g, or t
  misc_feature (174)..(174): n is a, c, g, or t
  misc_feature (177)..(177): n is a, c, g, or t
gnnnaccannacccacgaacgaaacgcgcgcggcacaccagcaaaaacaggaaacagggaaacccgcacaaccacaccaacaaccacacacgggacccgcaaacaaaagcccgagaacacaacaccaccgaaccaaaagggacaccaaccgctttttaccggggggaacccccnaanaaccgccaaccccacaaagaagggcgaggcaacactgagaggcggaccaaccccaccccacaagtagcacaccagccaaacacacgcaacccccgcaacaaaaccaacaaacgaggacgggcaacaagaaaaacccaacacgacgaagaagcccgaaaaacaacacgcaccaactgcacgagaagggcgcgggacaacgaccaaaaaggcagacccaaaaagagcgcacacaggcggaaaacgccgataaaacaaaaggcccaacacggcggaacaaaaaaaaggccggaaaaaaccacgaagaatgaacccgaaacagaagagcctcaaaagcccccccacaccgaaaaaagggggcctaaacccaaagaggcgaacaacagaacaacccgtgccaaacgccggagaaaaaacaaaagagagaccccagaccaccgaaaagtaacaacaaccccgcacaaagcgccaagatcacaagaaggaactaaaagacaaagcgcacacaaaaaccccaccaccacccgggaacacacgacaaaacaagaacaaccgcccaccaaaa

SEQ ID NO: 544692 - DNA, 506 bp, Homo sapiens
ctggttggggggcttgccctggcgagcaaaactgtgcccctttcgatttgaggggtggccaagtcaaccagctccttaaaattgaaaaggaggtgggcagcaaggctaatttttccggcaggaacttcaaaaaccccttggccaagtaaaatgtggggaggcaaaccctttggttccctgttgggtacacaaacccccccccttgggttaggttagggaggttgggggcccccaccaaccctttcagggggccctgttagttagggccccccccccgtggggtttgggccgcttcctttaaattttttcaaaaaccaagctccctggggccctgttgggagctttaactttgcagtgggggaattgggcccaggcattgttttttttccccccctttcccccaagggtttaaagttatgtgagccccgggttttttccgggggggccccagggtaaatccccggggggtttggggtcaaaaaaaaaagcccccggggccccttgga

SEQ ID NO: 544693 - DNA, 275 bp, Homo sapiens
agacagggagacttggtgcattaatatccaaagcttagtttaagctggtgatgattagaaaagtggctttcatttgtgttctctggagattctcagtagtcctgtgggcatgttaacagagcatgtgtaatctccaaaatgtatgtcttgttagcagaaattgtctaggcatttctgaaatggggggatgccctgaggctactgtttttgtcttacagggcccctatatgtttgtgagaactgagcttctccgaaaagttagagttctcggggct

SEQ ID NO: 544694 - DNA, 2434 bp, Homo sapiens
  misc_feature (2198)..(2198): n is a, c, g, or t
  misc_feature (2267)..(2267): n is a, c, g, or t
gaagcccacattcacatctacccaccccaatgccttctgtcctcttccctctgcccggggttcttctcaccccttggcttctgagcaaggctcttcctccacccacagatcagtgctgcttccctcgggggacagacccagatcctggggtccctcactacagctccagtcattaccagcgccattcccagcatgccagggatcagcagtcagatcctcaccaatgctcagggacaggttattggaacccttccatgggtagtgaactcagctagtgtggcggccccagcaccagcccaaagcctgcaggtccaggccgtgaccccccagctgttgttgaacgcccagggccaggtgattgcgaccctggctagcagccccctgcctccacctgtggctgtccggaagccaagcacacctgagtcccctgctaagagtgaggtgcagcccatccagcccacaccaaccgtgccccagcctgctgtggtcattgccagcccagctccagccgccaagccatctgcctctgctcctatcccaattacctgctcagagacccccaccgtcagccagttggtgtccaagccacatactccaagtctggatgaggatgggatcaacttagaagagatccgggagtttgccaagaactttaagatccggcggctctcgctgggccttacacagacccaggtgggtcaggctctgactgcaacggaaggtccagcctacagccagtcagccatctgccggttcgagaagctagacatcacacccaagagtgcccagaagctaaagccggtgctggaaaagtggctaaacgaagctgaactgcggaaccaggaaggccagcagaacctgatggagtttgtgggaggcgagccctccaagaaacgcaaacgccgcacctccttcaccccccaggccatagaggctctcaatgcctattttgagaagaacccactgcccacaggccaggagatcactgaaattgctaaggagctcaactacgaccgtgaggtagtgcgggtctggttctgcaatcggcgccagacgctcaagaacaccagcaagctgaacgtctttcagatcccttagggctcagccctggccctgtgttctagcactttgtccatttcccgtggcatccggctgcagccactgccatgacagcacctgtcattttgccacgtgcagctgtgctcaccccaggtcatcagactccaccgtgtgcatgtgcatcaatgtccctcttttctcccacacatctcacatcatggggaggccagagggggccacacgagagctccaggctctgggctggtcactccgaagaagaggatttgtgacgtcacttagagaagcaccttgctagcatggtttctgaagggtgaattctggtggggaaccagaaactccctgtctttggggcagggctaaagcagctcctaaggaccactggccattagctcttgcttttgatggcattctctttccaccttgtcttctcctttgctcctctgtgttagtgtggcaggtatgacaactcatccagtggaaacacagcctcacactgcccttccgccccccacactttgcctgcaggtgcaccgaaaggacctgggagataaaattcaaaaaagtgtgatgtgctgctcagaaggtcagactccatgtctgccttgacctcaaggtcagaaggttcccaaacccctggggctggaacatgggatctcctcttccacctcttcctggttcctttgcggggaaaattgcactaaaacagaaccttttcttaatccatgttggaaggaagcaacagtgaactctacctgttctggagttctcctgggtctgcagaaggttgggaatttagaaaataaggctgttctttcatattttaatttaatctctgtcaatggccatccctcccacaaaaaaacgtgggttaagagaacttgcagactggatatgcaagcaaacgggcaactctggagaaaaataaggaaaggaatgctgactttctctttctttctcttgtccccacacccattcccaacccaatactggggccttctcaaaaggagcaaattaaacaataaaccagacagcaaggccctgggggaaaggacaacatcctgaaataaatgatggagcccaggaaggtctcttgtggaagttgacttaactctaatttnctttgtaactttaagccttggatacgggaggagaaatctcattttgtcgagtctcagaccatgtctgtntgtaagcaatccccacagtgtcctctgagccaaggacacccccagatcagattgagttttgcttctagacggggtagctatggtaccttgggggttagctctcatccaagctgttaagtgagtttccagcctcactgtggctggaaagcccctaaaattcagtatgt

SEQ ID NO: 544695 - DNA, 2395 bp, Homo sapiens
  misc_feature (2159)..(2159): n is a, c, g, or t
  misc_feature (2228)..(2228): n is a, c, g, or t
ccaagccagtggacaccccccccacagatcaccgtccagcctgcagcgttcgcatttagcccaggaatcatcagtgctgcttccctcgggggacagacccagatcctggggtccctcactacagctccagtcattaccagcgccattcccagcatgccagggatcagcagtcagatcctcaccaatgctcagggacaggttattggaacccttccatgggtagtgaactcagctagtgtggcggccccagcaccagcccaaagcctgcaggtccaggccgtgaccccccagctgttgttgaacgcccagggccaggtgattgcgaccctggctagcagccccctgcctccacctgtggctgtccggaagccaagcacacctgagtcccctgctaagagtgaggtgcagcccatccagcccacaccaaccgtgccccagcctgctgtggtcattgccagcccagctccagccgccaagccatctgcctctgctcctatcccaattacctgctcagagacccccaccgtcagccagttggtgtccaagccacatactccaagtctggatgaggatgggatcaacttagaagagatccgggagtttgccaagaactttaagatccggcggctctcgctgggccttacacagacccaggtgggtcaggctctgactgcaacggaaggtccagcctacagccagtcagccatctgccggttcgagaagctagacatcacacccaagagtgcccagaagctaaagccggtgctggaaaagtggctaaacgaagctgaactgcggaaccaggaaggccagcagaacctgatggagtttgtgggaggcgagccctccaagaaacgcaaacgccgcacctccttcaccccccaggccatagaggctctcaatgcctattttgagaagaacccactgcccacaggccaggagatcactgaaattgctaaggagctcaactacgaccgtgaggtagtgcgggtctggttctgcaatcggcgccagacgctcaagaacaccagcaagctgaacgtctttcagatcccttagggctcagccctggccctgtgttctagcactttgtccatttcccgtggcatccggctgcagccactgccatgacagcacctgtcattttgccacgtgcagctgtgctcaccccaggtcatcagactccaccgtgtgcatgtgcatcaatgtccctcttttctcccacacatctcacatcatggggaggccagagggggccacacgagagctccaggctctgggctggtcactccgaagaagaggatttgtgacgtcacttagagaagcaccttgctagcatggtttctgaagggtgaattctggtggggaaccagaaactccctgtctttggggcagggctaaagcagctcctaaggaccactggccattagctcttgcttttgatggcattctctttccaccttgtcttctcctttgctcctctgtgttagtgtggcaggtatgacaactcatccagtggaaacacagcctcacactgcccttccgccccccacactttgcctgcaggtgcaccgaaaggacctgggagataaaattcaaaaaagtgtgatgtgctgctcagaaggtcagactccatgtctgccttgacctcaaggtcagaaggttcccaaacccctggggctggaacatgggatctcctcttccacctcttcctggttcctttgcggggaaaattgcactaaaacagaaccttttcttaatccatgttggaaggaagcaacagtgaactctacctgttctggagttctcctgggtctgcagaaggttgggaatttagaaaataaggctgttctttcatattttaatttaatctctgtcaatggccatccctcccacaaaaaaacgtgggttaagagaacttgcagactggatatgcaagcaaacgggcaactctggagaaaaataaggaaaggaatgctgactttctctttctttctcttgtccccacacccattcccaacccaatactggggccttctcaaaaggagcaaattaaacaataaaccagacagcaaggccctgggggaaaggacaacatcctgaaataaatgatggagcccaggaaggtctcttgtggaagttgacttaactctaatttnctttgtaactttaagccttggatacgggaggagaaatctcattttgtcgagtctcagaccatgtctgtntgtaagcaatccccacagtgtcctctgagccaaggacacccccagatcagattgagttttgcttctagacggggtagctatggtaccttgggggttagctctcatccaagctgttaagtgagtttccagcctcactgtggctggaaagcccctaaaattcagtatgt

SEQ ID NO: 544696 - DNA, 2138 bp, Homo sapiens
ccaagccagtggacaccccccccacagatcaccgtccagcctgcagcgttcgcatttagcccaggaatcatcagtgctgcttccctcgggggacagacccagatcctggggtccctcactacagctccagtcattaccagcgccattcccagcatgccagggatcagcagtcagatcctcaccaatgctcagggacaggttattggaacccttccatgggtagtgaactcagctagtgtggcggccccagcaccagcccaaagcctgcaggtccaggccgtgaccccccagctgttgttgaacgcccagggccaggtgattgcgaccctggctagcagccccctgcctccacctgtggctgtccggaagccaagcacacctgagtcccctgctaagagtgaggtgcagcccatccagcccacaccaaccgtgccccagcctgctgtggtcattgccagcccagctccagccgccaagccatctgcctctgctcctatcccaattacctgctcagagacccccaccgtcagccagttggtgtccaagccacatactccaagtctggatgaggatgggatcaacttagaagagatccgggagtttgccaagaactttaagatccggcggctctcgctgggccttacacagacccaggtgggtcaggctctgactgcaacggaaggtccagcctacagccagtcagccatctgccggttcgagaagctagacatcacacccaagagtgcccagaagctaaagccggtgctggaaaagtggctaaacgaagctgaactgcggaaccaggaaggccagcagaacctgatggagtttgtgggaggcgagccctccaagaaacgcaaacgccgcacctccttcaccccccaggccatagaggctctcaatgcctattttgagaagaacccactgcccacaggccaggagatcactgaaattgctaaggagctcaactacgaccgtgaggtagtgcgggtctggttctgcaatcggcgccagacgctcaagaacaccagcaagctgaacgtctttcagatcccttagggctcagccctggccctgtgttctagcactttgtccatttcccgtggcatccggctgcagccactgccatgacagcacctgtcattttgccacgtgcagctgtgctcaccccaggtcatcagactccaccgtgtgcatgtgcatcaatgtccctcttttctcccacacatctcacatcatggggaggccagagggggccacacgagagctccaggctctgggctggtcactccgaagaagaggatttgtgacgtcacttagagaagcaccttgctagcatggtttctgaagggtgaattctggtggggaaccagaaactccctgtctttggggcagggctaaagcagctcctaaggaccactggccattagctcttgcttttgatggcattctctttccaccttgtcttctcctttgctcctctgtgttagtgtggcaggtatgacaactcatccagtggaaacacagcctcacactgcccttccgccccccacactttgcctgcaggtgcaccgaaaggacctgggagataaaattcaaaaaagtgtgatgtgctgctcagaaggtcagactccatgtctgccttgacctcaaggtcagaaggttcccaaacccctggggctggaacatgggatctcctcttccacctcttcctggttcctttgcggggaaaattgcactaaaacagaaccttttcttaatccatgttggaaggaagcaacagtgaactctacctgttctggagttctcctgggtctgcagaaggttgggaatttagaaaataaggctgttctttcatattttaatttaatctctgtcaatggccatccctcccacaaaaaaacgtgggttaagagaacttgcagactggatatgcaagcaaacgggcaactctggagaaaaataaggaaaggaatgctgactttctctttctttctcttgtccccacacccattcccaacccaatactggggccttctcaaaaggagcaaattaaacaataaaccagacagcaaggccctgggggaaaggacaacatcctgaaataaatgatggagcccaggaaggtctcttgtgga

SEQ ID NO: 544697 - DNA, 558 bp, Homo sapiens
  misc_feature (102)..(102): n is a, c, g, or t
gcctgtctggaccagagttactgtggatttttaagagactcagttaaagcaatttcaggaaatttctgattcatttaaaggatttacaaattcatcaacccnctgaaaactaaagcaaattgaacaggaaaaaaaaaaagaagatgggttttttaagtccaatatatgttatttccttctttttgggagtcaaagtactatggccaatatgaaacttatcaggtgggatgaagactatgaccaagagcccagatgactgattcccaaacaggattcccatttcgtacaaaagtgttagactacggagttcccttttcatcgagtattacttataggcctgtgttcagtgaattgcttctgtccaacttaaccttttccattcattcaagtgttacgtggtgataattcgcaaacttcaagacaattcccaaatattccgatgcacattcagcaactctaccttcagttcaatgaaattgaggctgtgactgcaaattcattcatcaatgcaactcatcttaaagaaattaacctcagccacaacaaaattaaatctca

SEQ ID NO: 544698 - DNA, 99 bp, Homo sapiens
cttgtgatgtaattattgtagaatgggggcttcaatcgggagtactacccgttgtcaacgtcaaggagtcgaggtcgcctggttctaggaataatgggg

SEQ ID NO: 544699 - DNA, 2400 bp, Homo sapiens
  misc_feature (2164)..(2164): n is a, c, g, or t
  misc_feature (2233)..(2233): n is a, c, g, or t
taggcactctaacagatcacggtgaaactgcagctcgctatttagcccaagaatcgctcttcctccacccacagatcagtgctgcttccctcgggggacagacccagatcctggggtccctcactacagctccagtcattaccagcgccattcccagcatgccagggatcagcagtcagatcctcaccaatgctcagggacaggttattggaacccttccatgggtagtgaactcagctagtgtggcggccccagcaccagcccaaagcctgcaggtccaggccgtgaccccccagctgttgttgaacgcccagggccaggtgattgcgaccctggctagcagccccctgcctccacctgtggctgtccggaagccaagcacacctgagtcccctgctaagagtgaggtgcagcccatccagcccacaccaaccgtgccccagcctgctgtggtcattgccagcccagctccagccgccaagccatctgcctctgctcctatcccaattacctgctcagagacccccaccgtcagccagttggtgtccaagccacatactccaagtctggatgaggatgggatcaacttagaagagatccgggagtttgccaagaactttaagatccggcggctctcgctgggccttacacagacccaggtgggtcaggctctgactgcaacggaaggtccagcctacagccagtcagccatctgccggttcgagaagctagacatcacacccaagagtgcccagaagctaaagccggtgctggaaaagtggctaaacgaagctgaactgcggaaccaggaaggccagcagaacctgatggagtttgtgggaggcgagccctccaagaaacgcaaacgccgcacctccttcaccccccaggccatagaggctctcaatgcctattttgagaagaacccactgcccacaggccaggagatcactgaaattgctaaggagctcaactacgaccgtgaggtagtgcgggtctggttctgcaatcggcgccagacgctcaagaacaccagcaagctgaacgtctttcagatcccttagggctcagccctggccctgtgttctagcactttgtccatttcccgtggcatccggctgcagccactgccatgacagcacctgtcattttgccacgtgcagctgtgctcaccccaggtcatcagactccaccgtgtgcatgtgcatcaatgtccctcttttctcccacacatctcacatcatggggaggccagagggggccacacgagagctccaggctctgggctggtcactccgaagaagaggatttgtgacgtcacttagagaagcaccttgctagcatggtttctgaagggtgaattctggtggggaaccagaaactccctgtctttggggcagggctaaagcagctcctaaggaccactggccattagctcttgcttttgatggcattctctttccaccttgtcttctcctttgctcctctgtgttagtgtggcaggtatgacaactcatccagtggaaacacagcctcacactgcccttccgccccccacactttgcctgcaggtgcaccgaaaggacctgggagataaaattcaaaaaagtgtgatgtgctgctcagaaggtcagactccatgtctgccttgacctcaaggtcagaaggttcccaaacccctggggctggaacatgggatctcctcttccacctcttcctggttcctttgcggggaaaattgcactaaaacagaaccttttcttaatccatgttggaaggaagcaacagtgaactctacctgttctggagttctcctgggtctgcagaaggttgggaatttagaaaataaggctgttctttcatattttaatttaatctctgtcaatggccatccctcccacaaaaaaacgtgggttaagagaacttgcagactggatatgcaagcaaacgggcaactctggagaaaaataaggaaaggaatgctgactttctctttctttctcttgtccccacacccattcccaacccaatactggggccttctcaaaaggagcaaattaaacaataaaccagacagcaaggccctgggggaaaggacaacatcctgaaataaatgatggagcccaggaaggtctcttgtggaagttgacttaactctaatttnctttgtaactttaagccttggatacgggaggagaaatctcattttgtcgagtctcagaccatgtctgtntgtaagcaatccccacagtgtcctctgagccaaggacacccccagatcagattgagttttgcttctagacggggtagctatggtaccttgggggttagctctcatccaagctgttaagtgagtttccagcctcactgtggctggaaagcccctaaaattcagtatgt

SEQ ID NO: 544700 - DNA, 556 bp, Homo sapiens
taggcactctaacagatcacggtgaaactgcagctcgctatttagcccaagaatcgctcttcctccacccacagatcagtgctgcttccctcgggggacagacccagatcctggggtccctcactacagctccagtcattaccagcgccattcccagcatgccagggatcagcagtcagatcctcaccaatgctcagggacaggttattggaacccttccatgggtagtgaactcagctagtgtggcggccccagcaccagcccaaagcctgcaggtccaggccgtgaccccccagctgttgttgaacgcccagggccaggtgattgcgaccctggctagcagccccctgcctccacctgtggctgtccggaagccaagcacacctgagtcccctgctaagagtgaggtgcagcccatccagcccacaccaaccgtgccccagcctgctgtggtcattgccagcccagctccagccgccaagccatctgcctctgctcctatccaactcagatcagccctgttcccgaaatgtcctgctcgagggccaaattccct

SEQ ID NO: 544701 - DNA, 492 bp, Homo sapiens
  misc_feature (15)..(15): n is a, c, g, or t
  misc_feature (30)..(30): n is a, c, g, or t
  misc_feature (100)..(100): n is a, c, g, or t
  misc_feature (123)..(123): n is a, c, g, or t
  misc_feature (217)..(217): n is a, c, g, or t
  misc_feature (246)..(246): n is a, c, g, or t
  misc_feature (283)..(283): n is a, c, g, or t
  misc_feature (437)..(437): n is a, c, g, or t
  misc_feature (462)..(462): n is a, c, g, or t
tccccacctcccctncccctagaaaagccnaaccctttggcccctatcatcaaacttcacctactcatatttcctcatgtaaggggaatcataaaagtanttgccccttttgtgactggttcnccttagcataaagtctttaagatgcatcccatgtttcccagtgtttcggtttttttagaaaaactcatacgtgattgcagccgggcatagtgtntcacgcctgtaatcccagcacttgggagnccaaggcaggcggatcacctgaggtcaggagttaaanaccagcctgacaaacatggagaaaccccatctctactaaaaatacaaaattagctgggcgtggtggcacatgcctgtaatcccagctactcaggaggctggggcaggagaattggttgaacccaggaggcggaggttgcagtgagccgagattngccactgcactccaccctgggcaanaagagtgaaactctgtctcaaaaaaaaaaa

SEQ ID NO: 544702 - DNA, 659 bp, Homo sapiens
ggctcgaaaccgcgatcgagaatgacgaggaatccctacgcgccgctctggctcgactccgcggctacagcgtccaggcaaccatcttgctggcacaacgagccaaatccgttgccatcgcatcccagcaacgccacggcgacaagctggtctctgtcatcgcagggcaccccgactcccccgagtcaccaattgtcgcgatcgaccaagcactgggagcccgtctagccactaaacacctcatcgaacagggctaccggaatcttctccatgtccctggcgacctggaatggcaggacgcgtcagaacggctttcctcctacatcgccgtctgcaaagaggtcggcatcgaccctgcatggatgccagccaattcctggggagccgaagccggggcagccgtggctgaagaacttatcgccggacatctccccgacgcggttctcgctggcaacgatgacatcgccattggcatgtgtcacacattcctcactcatggcgtgaggatccccgacgacatcggcattgtgtgattcgacgacatccctctgcttcgctggatgaccccatcccttaccacggttcgttccaggacttcgaagcacccggacaccaagctgtcgagttcaacgttggtcagcccgtattctgcagatatc

SEQ ID NO: 544703 - DNA, 1067 bp, Homo sapiens
ttaaactgacacttcccttttaaaagccacctttatgtctatctctggcctgccacgattctacctagtgctccataggaggacccattggacccccgggactggctgcagggcccacacctgggttagacctcgcacagggcacgctgctgccactgtcactaaagcgtagcctacacgctatctgcacactggtgtaaggaacaacctcagctctctgtgcaaaggcggacgcagcaggacaagaatctccgtggacatctgtctgcgagcgagcacacatcaacctgcagacatacatacaagcaccccaatctaatcgattaccaaagggtgtccatcgcgtcttccttcactgccttgatcatgtcgagggtccaccactgtcgcgagatacgtcctgcagaccctgactcaaagacgcgcactgactaatgtacactgacacacatcttctgctcgcacagacctgcatgacccatccagggccacaccttaccagcacctccaacgaagacggtcctgtaaagccaccggttctgacttggtagggcctcccggcactctatttagccaatacatttaatggaccgaacgcctcaggctggacacacacatctacatacgatatcactaacaattgcaacaatactaagccacatagaaacctactacgacaccatacagatatccaacaactgacccactaccaggaagctactctctgatcaatccctccgcgacgacacgatccaactacctgcctggaatacctgaactacgatttatccaagattcgagaggacctatatgctcgacggtcatatcaacaaatatatataggcagttagccacagacatcgtgtccacaagtagacatcgcggccagcgatcccgccgcacgcgtcagaatgggtagaaacgcgccattatatagtcgtggaggatagagtgacatgagatgatgacatagcagtgcatacactctttgggagaggaatctatcatgagagtaattatacctgctcggctcgtcctacagcgttaagctaaccgatgcatattag

SEQ ID NO: 544704 - DNA, 1102 bp, Homo sapiens
gtatgcgatgggtattttaggataactactatattagacactactcttattctcctgaagatagacgctagaacggattgccgtgatgcgctgaattttataactggtcgcatagaactacatggaaccgtctggctgaatcggtagggagagtaatgccggattagcctccgcgcgcggttgtgcacgctttgggtgctgggcttcctcagctcctggtgagctctttgaggtctctgagggtcccactactgatgacgtaagtggttctggtacactacattgcttatcacgctatcttctggagtgcacgtactacagtgacattatgttcccaggcaacgatatattcatcgtaggcacgtgaccatgtaccctttctcaaaagtcccgtggtaatggtgactcagtcacaattcatgccacgagactacactatactgagtggctagtgggctctactgatatgaagggccagattcataggaggatcctatcggagtggcgggtccgactttcctctgtgggacaacatagaccgcgcgcctgcgtcgatagtctcagacatgagtcgtcgatctccatagtctgtcacccatgggtgggtggcgctgaggggtactaaatccacgcggaaagggctcactgaccgaagacacaagtctcaacgatctctattctaactccaccgatacatggtgtgcgtaaagcttctaacgattcgttgattccacctgagcccttcccataattttatggtctgggttccgagcgccactggtcaaagctgtgttgggtatgagctggtgctgaggggtatgggctggaagggttacccgcgctcccgtactctcgtgtctttccctcttccgggtccttccgcttgctcggggtcctccgtgacggctgggggccttccgccctgggtgtcggaggggctcggtgtccctagctggcttgtgtcccaacgattgcggtgtggggggggtccggcaacgtgggtggtctgtgtgttcctgcggcttgcctgggtcccgtgccgcacgaaaggcttaaattcgcttgtccggatggcgtcttgccagctgtttgttcgcccttg

SEQ ID NO: 544705 - DNA, 151 bp, Homo sapiens
  misc_feature (70)..(70): n is a, c, g, or t
tgccgacatggctgtttccaactataccaaagcgccagcgatggccgccgtcgcaagttggaccggcttntatgccggcctcaacgttggctatgggttcaatgatccggttgcgacctttacggcgaatgacgtcgtctccaattcgatc

SEQ ID NO: 544706 - DNA, 123 bp, Homo sapiens
gttttttttttttaaacccggtttaaaaaaactaaaacgttttttcaaaaaggggatttaaatgggttcctaattttgtaaagggggttgggttttgtaacccataaaaaaaggggctttcca

SEQ ID NO: 544707 - DNA, 310 bp, Homo sapiens
  misc_feature (19)..(20): n is a, c, g, or t
  misc_feature (35)..(35): n is a, c, g, or t
  misc_feature (74)..(75): n is a, c, g, or t
  misc_feature (82)..(82): n is a, c, g, or t
  misc_feature (86)..(88): n is a, c, g, or t
  misc_feature (121)..(125): n is a, c, g, or t
  misc_feature (171)..(172): n is a, c, g, or t
  misc_feature (239)..(241): n is a, c, g, or t
  misc_feature (245)..(245): n is a, c, g, or t
  misc_feature (268)..(268): n is a, c, g, or t
  misc_feature (279)..(279): n is a, c, g, or t
  misc_feature (298)..(298): n is a, c, g, or t
gacgtggttcccaaagatnncaatgctgccattgncaccatcaagaccaagcgtaccatccagtttgtggattnngtgcccnactnnnttcaaggttggcatcaactaccagcctcccacnnnnnggtgcctggtggagacctggccaaggtacagagagctgtgtgcatnnctgagcaacaccacagccattgctgaggcctgggctcgcctggaccacaagtttgacctgatgtatnnnaaangtgcctttgttcactggtacgtnggggaggggantggaggaaggtgagttttnagaggcccgtga

SEQ ID NO: 544708 - DNA, 325 bp, Homo sapiens
gatatgggcacagaaatcgtgagcagacagtagtttgataataatcaaagaaggcaatcacaatttaaatatatcatgccctctcacaggttagtgtatataattagtaagcccatattacttgatgttagtggtttagtctctactacgtaacataatgacagtggtgtaaagtttctgttcaagaaacatatgtagtaaagttactttatacaagcatcacctgccaaaggaaatggtcttactttcaaatgacttagacagcctgtctaattgaaaacagagcaggagacgactttaatcagaattactgtgcccaatttca

SEQ ID NO: 544709 - DNA, 212 bp, Homo sapiens
aggatggaccatctgcatggacgtgaccatattaccctgtctcgcctcacatatatgagtgggcggctggtacgttcagactgtcccatgacgggagaacattacactgagaggtcttgtccttccagtgggtggaattcaagacagggtgctggcggcacacagagcgggactgaagcaagtcattattcctcggagaaatgaaaacgacc

SEQ ID NO: 544710 - DNA, 540 bp, Homo sapiens
  misc_feature (86)..(86): n is a, c, g, or t
cgagtttcctgagatagctgtgattacctacatgtgccaccacgcccggctaactgttgtatttttgtagaggcgggtgtattctnccatgtatggctcctgtctggatctcgcaactacctgacctcaggtgatctgcctgccttggcctcccaaagtgctgggattacagggtgagccaacgtgcccggcctaccgcagtttttttttaaagggcatatggttcattttttccctctgccaagagggatgtgcagcatgagtgagaacaaagtctgttttgaactactgaggtttgagtttgttccagcagcataacctagcacatcctgactgataaggatcataaggaccataactgcccttggagttggagaacaggagcagatttgagaggtagaggattagaaggtgatatgttgcatgtgaaggtggggagaaagccagaggtctcacaggcgtgtctggtttggaccactatgtagttgatgatgctgtttacaaaactggaaatggaatccaaaagattcaggagagatc

SEQ ID NO: 544711 - DNA, 199 bp, Homo sapiens
cgtgttgcaattcacccaggctgcagtgtgcagtgggcgatctcggctcactgcaaggctctgtctccgcgggttcacggccgaatccttccttgcctcagccacctagcagctgggactacaggcacccgtacacgcctggctaattttcctgtatttttagtagagacaggtttcaccattgcaacagggtctctca

SEQ ID NO: 544712 - DNA, 399 bp, Homo sapiens
  misc_feature (48)..(48): n is a, c, g, or t
attgaaaagttttgagcagggcctcagcaccatcaccaatgtgcatcnaccatcaccgcgctttcagattctatgtgcaccgccatggcagggagcgatccaggcctccagagatccgttaggaggtggtacagacggtgtaggacgaggtgtttgacatccacttgtaatagatatgatggttggatcaaggactcattcgtgccttggagaaaatacttcaaccagagcagggagcgtgggggtgtcggggcagaaggctcagtatcggggtgggatatgagggtggcatgcatctcagggcagggccagggatggtgtccataaggttgtacacactcttgtgaatatttgtattttccagatggaataaaaaggcccgtgtaattacccttcaaa

SEQ ID NO: 544713 - DNA, 501 bp, Homo sapiens
  misc_feature (462)..(462): n is a, c, g, or t
cggtcctatgagacgtttgccgcctgctgccagatgcagtgacaacatcgtatcccgatgcagctggaaattgcaatcgcttgacgtgataatgcctgaagtgcatctatgacactgctggcttctattgtgaccggtgcaaatacagattttttggacatcccctggctcccaatccagcagacaaatgcaaagcctgcaattgctatctgtattggaccatgaagcagcagagcagctgtaaccccttgacggggcagtgtgaatgtttgcctcacgtgactggccgtcattgtacagcttgtgaccctggattctacaatctgcagagtgggcaaggctgtgagagagtgtgactgccatgccttgggctccaccaatgggcagtgtgacatccgcaccggccagtgtgagtgccagcccggcatcactggtcagcactgtgagcgctgtgaggtcaancactttgggtttggacctgaaggctgcaaaccatgtgac

SEQ ID NO: 544714 - DNA, 362 bp, Homo sapiens
tctccataatgtgtgccagatggagtgcagtggtacgatctcagctcactgcagcctcgactttcccagttcaagtgatcctcccgctttggttcctcaaatgctgggattacaggaatgtgccactgtgtcagcctaagacaagttttttaaaaaaggaagtcatacaacctgataactgtttatatcaattgcaattaggttcagctgcttgtaaacccaagctactagtcatttaagatagaggtgcatctttctctcgtagaaaataaatgttgaggtaggtagcgaagggcttgtatgatattcatacagtcatcagtggctcagctttacctgcagcatgggcacacattatggag

SEQ ID NO: 544715 - DNA, 964 bp, Homo sapiens
  misc_feature (945)..(945): n is a, c, g, or t
gataggagagagtataagccgcctctgtgaatttgcagggtatgacgtgcgtcaggttaagtcatgtaggagactgggggacccagtgctggcatgctcatcgctcagctgcaagacaaactgtccagattcatctaacagttttctccgtcctattgggtgatctccagggtcgtttgataatggaatctacagactgaggtatgactacctgagggtaggaattatctatagtaccgtcgtacgtcatattcagtgctgttggttcttggctccaggggataagaaactcttacgaatattatcacacatagcattggcatagcctgtatcctgtgatggtctctcagtcacatgagttatagatgaataatctatgaatgcagttgggacgtcatctttaattagatgagagggagaatcctttctgactgaacgataggagagtgatatggaatagttgtcaagagtggaatttcgaagcataagaaaggaattgggggagcattgcgatggcgcattggcaatcgcgtccaagggaagagtgtaaggccgttaactaatttagtacccccctgagagagagtcgacgatctcccaatcgcccacacggcccaaccacagataacgcctaggattgcccaacgacattgggcccccgtgttaaattcgctctaaacttaagggccaacctgaacttcgattgcaacggtgtacttagctatatttgtccctaggcggggacaggagcacttccctatcctgttagggcggatgggcgcacgggggcgaggaaactcatttggacatcaaaatcgggacccgatttgggctagaggatcataaccggcaggaaacaatgcactaggtgtgggaaacggtcttctccacggaccccaaggactaactcttctagggccatggacgggcggtttccgattaacntaggacttttgggtatgtg

SEQ ID NO: 544716 - DNA, 263 bp, Homo sapiens
ggaggcaaattcgggggagtggtaaccgacacgagggcaacagcgcgagggggggttttctaattgtgccgattaggcgacgagaacccgaagcccctagatttaggaccacaaattagatcaatcaattctggctcatttaagcccgttacgtctttttccggaccggaacatagtgctaggaaaaagatctccggtggaccttgttccagctttcgcttgcgggcttttcgcttcggggttctggcagagggtacctttag

SEQ ID NO: 544717 - DNA, 264 bp, Homo sapiens
caagagggacgagcattaagcacgtcgcattgctccttaaacgcttagcctagccacaccctcacgggaccacagcgagtattaacctttagtaatacactagtgtttaagctaagctattacatcacccgcggttcgctctatgtcttgccatccaccgcgctcacacaactgactcgcgtcataataagccgcttttgccttgtgtaccgtgctcgaagttctctatctcatggttcatcgcgtattgtccttgctgtacaa

SEQ ID NO: 544718 - DNA, 177 bp, Homo sapiens
gactctagagtatcccaagcttacgaggctgcctccctcgtcagggagaagtgcaacatttccagaaaggggctccgagtcctccggggaagttgatttatgaagatttactccctttccctcagtaaagctgttagcagaaagtgctgactggctgctgcaaagaatttcctcgtt

SEQ ID NO: 544719 - DNA, 1487 bp, Homo sapiens
  misc_feature (1095)..(1095): n is a, c, g, or t
accatgatgataccgacacatactctcgccaaaaccattctacccgctgagtaaagaatagttgttgagtatgctatgtgtataccgggtgacaatagatatatctcccgatacaggtaaagattaagcatgatttatagcaccacgtcgtaactatattcatgttacatagcccctattaccttctcagctgtaagtgtagtaccatcttagataatacatctgttagtcaaggaagatgactctgtgctaagactctctccgagttggcacgacgatgctatccttaatgataactagcttagtagtatgcagcactcgccgcctagttgttcgcaagaactatggtggcgaactactatactatggatgggaaggccgacgaagaacttaattcagacgccttgggttccatgagctctcgggtttgctcccgagaatttggacatcattaattgcgagccgtttgaagatataagcccctagttaggaacactcatcatatagtccgctcgttggttcacattcctgatgcttggatttggattcgccaagagcaggggaacctaagcttcctttgcgtgaacggaccgaacgctgtagacatatataagccccatgtggttatgaggcacccaatgtgtaatttgggaacttttcctagcgagcacaccaattttggggtaaagctgtcccctgagagaagaggccctttccccaaccccaagattctcccaggaaaaacgcgcggatttccaagggcgtccagacatataccgctaattatattccctatagagaagaagggatgtccccccaaaaaaataattatttattctttgaacacggtggcacattcagagcatcgccctagatttccggtgtacctcgagaggtacgtaacttcgacgccccttattttggagagtgaaagctgtcccccttggtgtgcagggtagttaacttgcttccatcctattggtagaacacccaagtttcccttccgctttcccagaaaataaaacgccccatggggcggatccacgaagtttcatacattagaacccataggacatttttggacctaggggttangaaccaagggcgcccgccatatattcaatttccataaagcataaggtgccgagattcccacaaccccaataggctgcaactgtcaattgtaggccccgcatactatcatagggtctaacaaactccccaatacctaagcatggaggctcaacttcgccttctcagagttcaggggggaaaagcatggtcttcagggggacacaagaccatattagtcacaacatatatgggggtgggcccgcccctttgtaagagtgttaaatctccccctcactggattggtgggtccctcaatgcccgtattcggcctagaacctcaggaggttttttggtagtttcccaaacaaggggggtccccataataggtcgataggcccggatataaatacagg

SEQ ID NO: 544720 - DNA, 318 bp, Homo sapiens
cacgaggctccagtcgaactggaaggcctcacccggaccgaaggccaggggaacgaaggtgccgcggccggttgtctgctgagccaccaggcgctgctcttgccagaggcgggcaaaggccgcaacgcggttgtaggagccggtgtagcccagggcctgcagatcggcgtgcatctgcttgacggtgcgccgctgcttgcgatagcggcccgcttctgtcttgagccagcccgagagcttcaaggcgaagggatcgatcttggttggactgacccgcttggcatagtgcggctcggactcgcctgcccgcaggtactt

SEQ ID NO: 544721 - DNA, 328 bp, Homo sapiens
acttctcgaagatctcggtatcgaccacttcggcggcacgcttggcctgttcctggcgctcggccggaatctccacgttcatgccgtcgatcaggattcggccggtgtcctggtcctcgatgcgcgacagcagctggcgcagcaggcggaagctggacgggatcacgccggaggcatcgccggaatgcacgccttcgttgagcaccttcacggtgaagttgccgccggtcaggccgcgcagcgaggtggtgcaccacagctggtcgtagttggcgcagcccgaatccaggcagaccaccagcgacggcttgccgatgcggtcggccgg

SEQ ID NO: 544722 - DNA, 248 bp, Homo sapiens
  misc_feature (87)..(88): n is a, c, g, or t
  misc_feature (121)..(121): n is a, c, g, or t
  misc_feature (123)..(123): n is a, c, g, or t
gaattacactgtgagcagcctgatcactagccagatctattgtgtcagggatgcctcagaagagtgtgtgttatcttcatactggcnnaaaacttggaggcacaatgctggtgtaccagtngncttagtatcactgtatcataggctgggtgccaccatgtaaaaactggacaaaaagcttagaatagacaacgcgatctttgtttattttgctcacacacgtgtgccccttgattgttggacacaga

SEQ ID NO: 544723 - DNA, 263 bp, Homo sapiens
gctagaggatccgaagaaatggaagatagaaacagaatagaaaatgaaaataagtcagagtttcagatagaaaatgaaaaacaagctaagacaagtaaggagaagtatagaagatagaaaaatataaagccaacaaaaggataaaatagcactgaaaaaatgaggaaattattggtaaccaatttattttaaaagcccatcaatttaatttctggtggtgcagaagttagaaggtaaagcttgagaagatgagggtgtttacg

SEQ ID NO: 544724 - DNA, 218 bp, Homo sapiens
tactgctcaccttccatgcctggatcatcaggccacttggtgacccccaacaagtggctccacaccctgttttacaaaaaagaaaagagcagtccatgagggaggttttaagggttgtggaaaatgaaaattaggatttcatgattttttttttttcagtccccgtgaaggagagcccttcattgggagattatgtactttcggggagacgctgaagg

SEQ ID NO: 544725 - DNA, 896 bp, Homo sapiens
  misc_feature (1)..(1): n is a, c, g, or t
  misc_feature (249)..(249): n is a, c, g, or t
ngtgagagcgtggaagactgaaagagacgaggcgaagacacaacagcgcgtcgcgtatgtgtgcataacggcgtcccctcgggaaacagttgtttgccgtggtccaatccttgtggtgatacccccgccgttttctcggagagacgccattgggccattaccccggtactggccctatctccgagtttccggggtttagctctgtgtcacgggcagcttttaaggtcgcccgcatggcgtcaacacttncgcgaggtgtctccccctttctccgggggggcacccttcaggccgtgtggaactgtcccacaaccaacgacggcgccaatttttcttctccgtgttgcaggagcccccctcttccgttgttggggccaaccggccttcgatacccacagcgaggggccctccaccttcggggaagaacttgggagcgccgtcctcttgcggggtcccccccatcggccccctcccccgatctaggcgcccccctttctgggggcctccgttcttcaggcaccctccgcacctctgttgttggcgacgcgcgtggatgcacgcccgcctcgatagatgggtggcgactccctgcccccattgttgctcacgagtgggtggcgccgtagtatgcgttctggcgggacaatccttctttagcgaagaccccccctcgcggcggcccgcgtggttatcgcgagactctagccgcgggcggtcattttccccccaaccctccggggggggtatctctcgtgtgatgcccaacgcccgggctaaggctcatgttgggggtctgcccctgaccccgttgtacgagcgtcggcccccaacccaccctcctagtggttgcaggttggcccccccctcccaaaaaagaattgggcgccccacatgac

SEQ ID NO: 544726 - DNA, 459 bp, Homo sapiens
  misc_feature (15)..(15): n is a, c, g, or t
  misc_feature (70)..(70): n is a, c, g, or t
  misc_feature (170)..(171): n is a, c, g, or t
gcgtgacctgatccnaccaatcctcccggtgaaggtgctcccttccaccgatttcttcgtaccccacttntaggacctggaagggctctgatgagaggggaaagaaattgctgaggccccctctaactggaaactctgccttgtgcgatgcgatttccttgggatccttnngagtaattattataactacaaagcactggagccttggagctaataaagatatctatggaaaccctagttatctacaaaaggtcaatggggtagtagtaagggtgagtagaggagatgagttatagccatctagctctatgggagtttgaaggcttctcctttaatgacaagtttctgagatattgtaaaaacctctgaaataagaacaccctatatgtattgctttccttttaatatggaatgtttcatgttgcttacctgaatgtatactagtggaatctgaaagac

SEQ ID NO: 544727 - DNA, 1162 bp, Homo sapiens
cacttagctgggctatctcttatctgcagctgttcgcttttgctacgcacacagaggatgtggaggacacggaggaggctgggcaactctggcttgagttgtgctgtactccatcattcccttgctatagctctgccgttagatctcactggagaccactttgcggactagctgctatggctccactgccacagccaggcacacgggcttctgcctgcttctgaaagtctggctgcttctgtactctgcgggcctgctggcgcttccctgctgctctagcctgcatcagcgaaactcttgagcaagcattccactctggggctgtaaacccagctactgagctttgaacattcaagcgcttcgtaccatgagcttggggcagcagaacttgcaaggcactactttctctgaaagtaacagaaccacttcacggctgccatgcttattaaggaatctgaactgttcgcatagcagttaccttatgggtgatacaactgggaggcggcaaaaacaactacctgcataggagaccctgccctttgtcaagagctgggagcacatttcatcagagtagcaggcccacctggtgccagagggcctgcccctcctgcttcatgtatcctttgccttgcagtctcctggaagagagactctccttatcctgtacagccttctgggccaaaatgccttctagcttctcaaagaagatccgagtttaatctccattcctaatgactaacaagcacggtaccacgcgcatataccaagcggcacgcaagctagggcgccacagcacgcgcaaggccccctatgtactaccccctaccgtatggccgagaaaaccatttcgcagcgcgtgcaccgaaaacacccagccctgtgggcccacggagataccaacaaatggaccgcaacaacactagaacataaggcgggacgcgcacgcggcgaatagtagggcaaacggcggcgtgtgccgcctcgcttgatataaatgcacgagggcggacaccgaaggcagctagcaaagcgggactgttacaaccgcgcggaatgttcgtgagtctcgcccagcagcacaacaaaaatgaaaaaacaacgtggaccgcaccgccgtgcaccctcaagccccagctacgacatcacaaccagcccgtcgcag

SEQ ID NO: 544728 - DNA, 382 bp, Homo sapiens
gcccttataacccacgatcacccaggtctatcaaacttttttttttgaggcagagtcccactctgtcgcccaggctggagtgcagtggtgcgatcttggtcactgcaacctccgcctcccaggttcaagcgattctcctgcctcagcctcccgagtagctgggattacaggcgcccaccatcacatccggctaatttttgtattttagtggagatggggtttcgccatgttggccaggcttgtcttgaactcctgacctcaagtgatccacccacctcggcctcccaaagtgctgggattacaggcgtgagccaccgcgcccggccaagcttctttctttatatggactttgaaacatttactgtgactcgtgggattgtaa

SEQ ID NO: 544729 - DNA, 1343 bp, Homo sapiens
tggcaaaagcccctggggcgggggcgggaaaacccttgtgacccccggggggtgtgtgcgcgggggaaccccagagacacccccccgcgtggccccccacccagaggcaacagagaagacacctctgtgtgtctctcaaaaaaaaaaaaaaaaaaaaaaaccccgcgagagagaaaaggaccccatatttcgcggagagggggagacgcggagggggtgggagaaagacaccacaccgcgggtgtacaccccaccagagggcgaaagagcccaccacagcagggtggagaaataagaacaagagagagcggcgagacaccacaaaaaatatttcacacaaaaaaagagagaggcgcacacgaggagaggggcgcgccctgcgccacaccacgaggtgggtgtggagagagaaaacccccaccacagagtgtggcgcgcgcgccgagagagaggcgcgcgcgcgccatgtgtggcgcggtgtgagccctccgagaggggcgatccacccccccccaccccgctgtgtggggggggggcccccatcaacactcttctctcttcctctgaagagaagaggagaaccctctacattctcgcagaacagagactaccaacaacaacccccggacgaaagaagaacacatcctactgccggcagagagagaggagcagcaccctaactcttgatggactgatggaacgcacaagcatgagaatccgcgcatgcccaacccccaatcagtgagcgccccacgttcagcgcgctcctacacccgcacactccgcagctccacgcgcggcccaccggccgccgccgttcgggcctcgcgcacgccggcgcgagcgcagcgacatacacgagcggcccgcccaaccaccggaacgcacaaaagacgacgacgagcgcgacggaagcgggcgaggcggacccgggaccacagacgcggccaccccgacaagccgcgcagcacgccggacgccgacgccggggaccgcagcacgcgaacgtctggcacgggaacgggagcacaacacataaatagaaggaaagcaaagtagatcagagcgacgataacgactcagcagaacacacaaacaacgaccaacaaccaagccacccacaacaccccgccccacccgcaacgacccagccaccacaaagagaccccaaacgaacgcccctaaatagaggaacacaaacaaagaggaaaccacccacctaacacaatacaagaagagcaacacaagaccgcaaccaccgagccccacatagaacattaaaaaggccaaaacgaccataaaaccaaaaacccatacggccaatgcaataaggaatgagacag

SEQ ID NO: 544730 - DNA, 426 bp, Homo sapiens
  misc_feature (5)..(5): n is a, c, g, or t
  misc_feature (24)..(24): n is a, c, g, or t
  misc_feature (79)..(79): n is a, c, g, or t
  misc_feature (142)..(142): n is a, c, g, or t
  misc_feature (218)..(218): n is a, c, g, or t
  misc_feature (319)..(319): n is a, c, g, or t
  misc_feature (360)..(360): n is a, c, g, or t
  misc_feature (392)..(392): n is a, c, g, or t
  misc_feature (397)..(397): n is a, c, g, or t
tggtnaccccaagaaccgtgcccntgcactcccaccccgggcaacaagaccggaaactccgtcctcaaaaaattaaatnaataaggcttatgtgcagttattcctcaatgagcctaaaaagccttccctgaggcctagaaantcttgtcatttttggctgggagcagtggcttacacctgtagtttcagcattttgggaggtcgaggcgggcagatcncctgaggtcagggatttgagaccagccctggccaacatggtgaaaccccgtctctactaaaaaatacaaaaattagccgggcatggccgtgggcgcctgtnatcccagctactcgggaagctgaggcaggagaatcgcttgnacccgggaggtggcagttgcagtgagccgagntcacnccactgcactccattctggcaacacagcc

SEQ ID NO: 544731 - DNA, 107 bp, Homo sapiens
gctattatcccagggatggactatttgggttctcggcaatacgtcaccgggacttggcagcaagaaatgtgcttgttgagagtgaacaccatgtgattgttcccctt

SEQ ID NO: 544732 - DNA, 566 bp, Homo sapiens
agcggcccgttccctccccatccatccccgtgagctggacgctagcacgacgccgtctgtctcgctttgtgtcttattttatcgccactcgcatataatcctgtgccttaaatcgtgatcattatcttatgtacagtcacatcttgctaatgtctattttcctctattcggaaggtagcagatcgcggtgtcaccgatgtgaggcccggctaggtctcgaacgcctgacctcaggtgactccacccgccttggcctcccaaactgctgggatatacaggagatgagccaaaccagtgtctggccacaaatgctcttctgtgttgttaacacttaggaaaacaatcttacggaatgggttaacaattagggaaaatacatttagcgtgacaatttgggtcactgtgctagcctagcgtttagaggaacagacattagttctacacagtgactacacttataaacttacattgtactaggagtgcctgacaaagagcgtattttgcaacattgcccaacaactcgggctttcacattcacaaaaaccaaagcgacccaagcacaccgg

SEQ ID NO: 544733 - DNA, 1192 bp, Homo sapiens
ctcgttgttccttgtgtgtcctcacacgctggtgagcttcatttccggtgtcctcacccttgtgcactccttcttctatgctgtgagctctttcttccgggtctcttatctcaggtgtcccctcttccaaagtgtcttgcggatttcccccgttgagagtttctccccccgggttttccacgagcctctggggccaactcccccgggttttccgccctttcatcagagacccccgagtgccacaaacggggtattcccagatcccctggccacccccccccccgggacctgtacttgatggaacccacttagaacttggacccaggtcggccattcccattcgctggtatacaggtcccgggtcaacacacaagctgggctatagctgtcaaggagaccactctttactggaaaccacccctgggcctctcattctggcacatttcacccacgagttaatgttgcttgctcgttagaagatgtacgcacctttgatcctctcctactccagtaactggctcccgcgggttacagaactccctggtttctctcccacgggcttaccacgtggaacactcacatcacgcttctctcgcctttataaaaaatattcttaatgtccctcaatgtcgcctcttctttgtacccgtcgagactttgtgacaccctcttggttgttcttttgaaatttctcttaagggctcgcacataatatatatttatacacactgcctcttgtctcttgtccacatgtaataatacccacgcgtatttggtgtttattggtgttaaaccaccatatatggaatacccggggtgttgtttttggcaccacacttgttataataagtcacatgcacctacacactaaatgatgtttgtggtcgcatgaccacgagccaccgtaataatgttggcacgttctcacataaagagattattaatatctgtattttttaactaagaccctcttttctatgtttagataccacaataccacttatgttaccacgttgcctaccacgtattcacgggcacgtaaccactgatgtacacacggtttgtagcctcgttttgcacttttttcttacggttgtatgcttctttctgttttaaaggtttgaatcaccagcatttttgtgatccaaatcctatttagaaaaaataaaactactttctgtttatctctcta

SEQ ID NO: 544734 - DNA, 402 bp, Homo sapiens
  misc_feature (13)..(14): n is a, c, g, or t
actcactgataannggatattagcccagaaacttagaattcccaagataaaagatacaatttgtaaaacacatgaaactcaagaaggatgaagaccaaagtgtggacactttgccccttctcagaattggaaacaaaacacccatgaaggagttacagagacaaagtttggagctgagacaaaaggatgaaccatctagagactgccatatccagggatccatcccctaatcagcctccaaaggctgacaccatttcatacactagcaagattttgctgaaatcaccctgatatagttgtctcttgtgaggctatgcagcggtctagcaaacacagaagtggaggctcacagtcagctattggatggaacacagggcccccaatggaggagctagagaaagt

SEQ ID NO: 544735 - DNA, 255 bp, Homo sapiens
acagaggcgatgggaatgtaagttagttcagccactgtggaaagcagtttggagatttctcaaagaactccagccaatcccatcaggagtgtatatcaaaaagaaataaattattctaccaaaaagacacatgcactcatatgttcattgcagcactattcacaatagcaaagacttagaatcaacctaggtgtccatcaatggggtactggataaagtaaatatggtacatatacaccatggaataccattcag

SEQ ID NO: 544736 - DNA, 350 bp, Homo sapiens
gagacggagtcttgttctgtcacccaggctggaggggagtggtgttgtgatcttggctcactgcaacctcaacctcccgggttcaagcgattctcctgcctcagactcccgagtagctgagagtacaggctcctggcaccatgcctggctaatttttgtatttttagtagagacagagtttcaccatattggccaggctggtttcaaactcctgaccttgtgatctgtcctcctcggcctcccaaagtgctgggattacaggcatgagccaccacgcctggcctcaaaatcttacataattatggctttgtggttttcttttaaagcgagtccccttctgtcgtcttctc

SEQ ID NO: 544737 - DNA, 207 bp, Homo sapiens
  misc_feature (36)..(36): n is a, c, g, or t
  misc_feature (115)..(115): n is a, c, g, or t
atacactgttaaatattttcttccctttgcttttcntcattttgtcaataaaagattttattttttttttttttttatttttggcacagtctcgctctgtcacctaggctggagncagtggcacaatctcggctcactgcaacctctgccttcccaattcaagtgattctcgtgtcctccgcctaggcaacagactgagactcagtc

SEQ ID NO: 544738 - DNA, 449 bp, Homo sapiens
  misc_feature (2)..(2): n is a, c, g, or t
  misc_feature (144)..(144): n is a, c, g, or t
tngggcccctgtttttttaaaagtaggaagagagaacctttttggaatcagtcgttgcgcctcaaaacttcataatttttgtcgagtttcttcatgaggagggcagcccattggctcccctttgaacccctttgcctttgaaanttaattacatccaaaaagaaggccccttgtttgctagtctatggcccgttggggaatatgcctgtttttataggcccctgtaaccccaaggccccaaataaatgggctttttttttaaaataattttaaaagttgggaaaagggttattttttggccggcttaaatattgaataagtatttttcccccgcctttaataaatggataggccgaggtaagggaatttttgggttttttgagaaaatgtccaaatcctgaatttttccaaataaactggggggttttaaaaatccccctagggattta

SEQ ID NO: 544739 - DNA, 361 bp, Homo sapiens
  misc_feature (32)..(32): n is a, c, g, or t
  misc_feature (57)..(58): n is a, c, g, or t
  misc_feature (246)..(246): n is a, c, g, or t
  misc_feature (269)..(269): n is a, c, g, or t
aaaaacttcccaaggacccaaggacccatttncctctctatctgcctaaaataattnnttaataactcctacaacattcccccctgtggagatgccacactaactgctgttagggagttttgggcgacgactccttctggctacttcttgttgcaaaagggcgtcgaatggggaagagcagctagggctcctcctggggtcaatctaagggtcctcagaagaatgatgtgtctatgtgtggttctntttacagcaccatttggagtttnattgcttctagatgagaagaaacaatttgagttatagtattgtgtatacagggtccaatatccaatacaaggacacataagcaagagagggg

SEQ ID NO: 544740 - DNA, 413 bp, Homo sapiens
gttggcagtcgctgctggccgactgctctgccgctggagctgctggagcccctcctgtcgaggccccccagacccccaggagtggagcggcccatctctgctattctcaggaaacgaactgattccagatccgggagccgcccggtgcccgtctgtccgtccctccactcctctgtttctcccgttctccctgtgcccatccaccggttgaccgtccatcttacccatggatgggctgtggctacgccttcccgaagggaccgccacacgtgggaagggtcctcaggtcctcgcctctaccgggaggtgtttgcagccccctcaacacgcctcgtggctgaagcctaactcgtcattgcttctacatgctactatgtacatcgaccctcagccatgcccctgccccgcttccc

SEQ ID NO: 544741 - DNA, 357 bp, Homo sapiens
cctcagtaggaagaacagatggacctaggaacaaaggagttaaaaagcaggagtgtagactgtgagtttcttaagaaaaaaagtaagagtggctcatttgccatcactcccaatgaccccctgggtgaactcgtgcttcccatccctgcacctctgggctccacaaagtcagaggtcttggtacccaaatggggctcacttatcactacgacgaacaggggccagactgttgattatgtgaagataagatgaggaccagcatctctgcagccttcagattcttaagtatggcattcatttccacctttcccctcagaatgtgatagatactgtttttgatatactgttaaaaaaaaa

SEQ ID NO: 544742 - DNA, 178 bp, Homo sapiens
tacaggacacacagctctagtaaggatgtcactaacggaaattaaaatcatttgttgtagaatactttatgaatcaatgcagtaagaggaggtttacacttctggtgaagaatagggaatgaatttgtgataggcatgtagaaaattatgcaaacaaataaaataataatcaactcct

SEQ ID NO: 544743 - DNA, 152 bp, Homo sapiens
  misc_feature (59)..(59): n is a, c, g, or t
  misc_feature (123)..(123): n is a, c, g, or t
  misc_feature (134)..(134): n is a, c, g, or t
tgtgttacgtgaagtgtgcttcttttcggatggggtatatgaagctgtatgacatgaanctactacacaagaggaaagtctagagctgctaggccaagggtgtgaacactgcgtcctcgtggnatgctagtcangattcgtttacgcctgtg

SEQ ID NO: 544744 - DNA, 556 bp, Homo sapiens
  misc_feature (168)..(168): n is a, c, g, or t
  misc_feature (430)..(430): n is a, c, g, or t
  misc_feature (449)..(449): n is a, c, g, or t
  misc_feature (470)..(470): n is a, c, g, or t
  misc_feature (490)..(490): n is a, c, g, or t
  misc_feature (497)..(497): n is a, c, g, or t
ctgataagatgcaagaagacaatctctcttttgtggtgttcttgccaaaaaggtccaatctgaatctaataaaaaggaaacatcaggcaaacccaaattgaggaacagtctacaaaataactgacctgaagtgttcaaaaatgttaaagtaattaaagtcaagaaagncaaacttcttttaagagtggtggagactaaagagacgtaacaaaatgcaatgtgagcacttgactatgaaggacactgatgggacaactggcaacttgaacggggtctgtgggttagatggtaatataccagtgttaatttcctggttttgatcactgtgttgtggttaagtaaaagaatgtccttgtttgtagaaattacacactgaagcctttaagatcatgagacagcactggctccatggttcagggaaaaaggttcnttggaccttaacttttccnggtaagtttgggattatttcnaaattttaaaattccaaatnggatccntaaaagtaataatttttccataattaacccaggggtaacccttggttaaaaaatccgga

SEQ ID NO: 544745 - DNA, 294 bp, Homo sapiens
atttttacatttcatccagcaatcagattccactatactctattaactacagtcacatagaacttaccatggagttgcttggttctatgcttagcagaaattattttctcctactaaagtgtcatgtatgtatgattctgcactcctcttctagcttctctttttcacccctaacacgtagaatatgtttcctgacttcgtctttcaaaaatcctgtttatctaatacccctttgtgaagtcttatatgacttctcagatcagctgttggctcacgagtactgctgctggtgta

SEQ ID NO: 544746 - DNA, 794 bp, Homo sapiens
  misc_feature (18)..(18): n is a, c, g, or t
  misc_feature (62)..(62): n is a, c, g, or t
  misc_feature (68)..(68): n is a, c, g, or t
  misc_feature (106)..(106): n is a, c, g, or t
  misc_feature (133)..(133): n is a, c, g, or t
  misc_feature (187)..(187): n is a, c, g, or t
  misc_feature (190)..(190): n is a, c, g, or t
  misc_feature (203)..(203): n is a, c, g, or t
  misc_feature (210)..(211): n is a, c, g, or t
  misc_feature (217)..(218): n is a, c, g, or t
  misc_feature (220)..(220): n is a, c, g, or t
  misc_feature (223)..(223): n is a, c, g, or t
  misc_feature (230)..(232): n is a, c, g, or t
  misc_feature (234)..(234): n is a, c, g, or t
  misc_feature (247)..(247): n is a, c, g, or t
  misc_feature (250)..(252): n is a, c, g, or t
  misc_feature (260)..(260): n is a, c, g, or t
  misc_feature (264)..(264): n is a, c, g, or t
  misc_feature (273)..(274): n is a, c, g, or t
  misc_feature (288)..(288): n is a, c, g, or t
  misc_feature (290)..(290): n is a, c, g, or t
  misc_feature (294)..(294): n is a, c, g, or t
  misc_feature (314)..(314): n is a, c, g, or t
  misc_feature (342)..(342): n is a, c, g, or t
  misc_feature (346)..(346): n is a, c, g, or t
  misc_feature (373)..(373): n is a, c, g, or t
  misc_feature (394)..(394): n is a, c, g, or t
  misc_feature (396)..(396): n is a, c, g, or t
  misc_feature (400)..(400): n is a, c, g, or t
  misc_feature (434)..(434): n is a, c, g, or t
  misc_feature (723)..(723): n is a, c, g, or t
  misc_feature (772)..(772): n is a, c, g, or t
  misc_feature (776)..(776): n is a, c, g, or t
ctatttattgataacatntttcgcttcacccaggctggttaagaggtgtctgcattattggnccgaancccttctgctgtgggctatcagcctaccctggcaactnacatgggtactatgcaggaaagaattnccactaccaagaagggatctatcacctctgtacaggctatctatgtgcctgctnatnacttgactgaccntgccccnnctactnncnttngcccacnnngnatgctaccaccgnacnnncgcgtccnattnctgagctgnncatctatccagctngnggancctctagactccacctctcntaccatggatcccaacattgttggcagncgancattacgatgtgccccgtggggtgcanaagatcctgcacggactacanancccnccaggatatcattgccatcctgggctatggatgnaactttctgaggaagacaagttgaccgtgtcccgtgcacggaaaatacagcgtttcttgtctcagccattccaggttgctgaggtcttcacaggtcatatggggaagctggtacccctgaaggagaccatcaaaggattccagcagattttggcaggtgaatatgaccatctcccagaacaggccttctatatggtgggacccattgaagaagctagtggcaaaagctgataagctggctgaagagcattcatcgtgaggggtctttgtcctctgtactgtctctctcnttgcccctaacccaaaaagcttcatttttctgtgtaggctgcacaagancctngattgaagatatatttcc

SEQ ID NO: 544747 - DNA, 908 bp, Homo sapiens
gattaatacccctgtgcccaaccctgttcatctactactaccatactttgcagtgcacactacatacacagctgctaaagctcgcactgatatttttacctgagctaggcctaagaaataaaacattgctaagcttttattaccagttctaaaccaaaaaaataaaaccctacgttccacagaagcttgccatacaatgtaatttcctacacgcaagcaacctgcataccataaataccttactaataagctaatacctacttacaacaataatactactaccggacaattgaaccataaaccaataactaaccaatacaataactacatacatataataaatacataaattggctaataagcaataaaaactaagtgaataagccccctttacacttactagagtacccagaggttaacccaaggcacccctacttgacatacctgtgccttgtcttactattctacacattgacaaaaactaagccccctatactacaatacataataaccaaaatactactaccctacactaaaactgtaaagccttactacctacactactactacaatacttaataccatacataagcatggcagttgaggttggatataaaccaaacccagctaacgcaaaatacttagcataactacctacaattacccacataaggatgaataatagcagttctacggtacaaccctaacataaccatatcttaatttaactatttatattatacctaataactacgtatttcctactactacaattaaactacagcaccatgacctaataatatattgcacctgaaacaagtaactatgataaaaccctttaatatcattcacctctatacctaggagggctgcccggttaatggttttttgccaaatgggcatatttg

SEQ ID NO: 544748 - DNA, 162 bp, Homo sapiens
gccctgaagcttgatggtcggaaggccatgtgcagatgcattccagaaactgttgattgtagttgtaggtaagactgtcttgatcatccttgacgtacgtcagtgtcagtaagcaagtaaattctctttgaaaagtgatttgaatgaaaatgttgatcttga

SEQ ID NO: 544749 - DNA, 717 bp, Homo sapiens
aaggaaacctaggtaatactattcaggacataagcatgggcaaagactttatgaataaagcaccaaaagcaatggcaacaaaagccagaattgacaaatgggatcgaattaaactaaagagcttctgcacagcaaaagaaactatcatcagagtgaacaagtaacctagagaatgggagaaagttttgcaatctatccctctgacaaagggctaatatccagaatctacaaggaacttaaacaaattcacaagaaaaaaaaaaacccatcagaaagtgggtgaaggatatgaacagacacttctcaaaataagacatttatgtggccaacaaacatttgaaaaaaaagctcatcagcactggtcattagagaaatgcaaatcaaaaccacaatgagataccatctcacaccagttagaatggcgatcattaaaaagtcaggaaacaacagatgctgaagaggatgtggagaaacaggaacatttttacactgtgggtgggagtgtaacattagttcaaccatgtgtggcaagacagtggtggtgactcctcagggatctagaaccagaaataccattgtgagtcaacaattccattactgcgtatatacccaagggttataaatcattctactataaaagaccccacacaccgtatgttatgtgcgccggtccacaattgaagacttgaaaccacccatgtgccattcaatatatga

SEQ ID NO: 544750 - DNA, 422 bp, Homo sapiens
tagagacagggtctcactctgtcacccaggctagagtacaatggtatgatcacagtttgctgtaaccttgaactcctgggctcaagtgatcctcttgcttcagccacccccgcaagtagctaggaccacaagcctgcatcgccacgcccagctaatttttattttttttaataaagatggggtctcgctatgttgcctagggttgtcttgaacccctgacctcaaccatcttcctacctcagcctcccaaagtgctggaattacaggcatgagccactgcacctgacccaaactatgtattttaaacaagaatgtttaaggttaaatttgaaattccatttaacaagttatttattgacccctactatgtgccagacaccattagaggtcacagattatttgtcctcctggagtttatattt

SEQ ID NO: 544751 - DNA, 381 bp, Homo sapiens
  misc_feature (1)..(1): n is a, c, g, or t
nttacgtccattttgatggctttgtactgtagactcccacctctttggtttctgcaccgtgggcactaactccgtaacttccctgtggcatccagtgggggttcccagaggttaggaactcctattctttccataatgcagcatgggcatgtaggattagataagcatacttgttatctgtatacacatttattctttttccctttcccagttctaaggctcgggaaagtgccactagttctgctaactgggcactggtccctgggggaagaggcttgctttcaagtatggttacatcactaactatggcataacctgcccttcgtatcccattctccacaaatgaacttccatcggtatataggttaaagtcaggattaa

SEQ ID NO: 544752 - DNA, 211 bp, Homo sapiens
ttgatcagaacggcttcggtcgatggacctgcacctcctgtgaggagacaggccagtgcctttcaagtgcatgcagtctcactgattgtcatcctcaagtttccgctcagtggccaccacaagttatgtccgacaatgcctggacagaacggccgatgcattcatagtatctcattgtccatgcccggggctaccgagcctcgtacatttc

SEQ ID NO: 544753 - DNA, 1236 bp, Homo sapiens
  misc_feature (778)..(778): n is a, c, g, or t
tggcaagaaaaaagagggtgtgtggcccaccacaagaagcggtgtcactcttatgggtgtataaaattcggctgtcacccgagagaagggcaaacgttttgaaactctgtcacccccttgggggttttatcaccacacagaccacgcaacacttttgtattttggggaggtataaccaagcgccacttttggggaatactttttagagacgttggccccaaaaaaggggtcaattccctgggaaattaaaaatagtcctctgttccaacgaggggacaattcattttttgttccgaaaaaggttttttgggtgttacaaaggaaaaggaaaatggtgttttgaaaggcatgttggtgtgaaaaagagagctttccacgtttctccttaaagagggtgttagccctgtgtaacccccctttttcgtggcaacttgcggaggaaaagtttctacttgttgaccccacgacacaactggggctgtgccacagctaagaacacttgttgtataaagagtgggggaatattccacggcacacacacacctctgcacaacggagaggggccctgcggtgttatatacacatatatgtggtataccttgtggtgtttatgagagacctcttatagtgtgtgttctctttgtgggctagatataatatgacaacatagtgggcttgtcacatttatatttgtagacacgccacatgtgttacacacactactagcacacactatgagaaaaggccacgctatatatactttcacctcgagatggcnttgtttttgtggggtatattaaaatacacactttttgtgtggtgtatataaatgggagcagagtttttttgtgtgagatgtatatgagaacacttgggcttgtttataataataataaaatgaggtaatatggttatagtggttggtggtataatgcctggttttcgaatctgtataaataagttaaagtgatatggaacaccgagggcacactaacttcttgagatttattgcacaagtgtcacgtgcctaaggttttaacttttatatttttaaagcacttcacgttttgctttcacaattttaatgtacccttatagttttgagagttaagagacctcgcacagaatgtgtaacacagagaataaggtcaaatttatgtattgcacattatcatgctattcagcattgatgctatattgtattaagtaaataatataaaaccatgtacagaggga

SEQ ID NO: 544754 - DNA, 655 bp, Homo sapiens
ttctgagaaattgtaagcggatcgaaatcaggatgatatgttaatgtcgcatcctaaacagtgctggcattagttcaaaccgatggatgcgcattcattcgctgatacccaagacattctaccatcagatctcctcgtgcagtcagcatgtctcattccgtcgtgatccccaaaatcagagttaggctctcatatcatgacctcgttgactgtgtggtagtcgtgtccagcgtgtagttatcatagtggcaaaggatacagtgctcgattactttgctgttggagagaatacatgtaacttaatttctcgaggctagctaacatagtgcaactgggtcctatagaagagggttaaaattgcatggacgcgatctgtctccagcggtggtatggacagctctgcggtctcaatcgttgggccaggccatctttttgatcgactgcttccagcagctgccaagacattggcgcatctgacgggcaactgggccagaaattgttgtgtccagagagctacactttggcgataatgcttcacctactgtaaggtgtgaacttacttagacaactgtatggctgtagttcgtgttccatgttgtgtctaccagagtaggtctaataccacaggtaaacacctatgtggataatgatataa

SEQ ID NO: 544755 - DNA, 120 bp, Homo sapiens
atcctagagaccacagtagagcagcaggcccatcccgcaggacgccaggtaggctcatgtaatataccaggtgagccaatccattgggggcgcaaagtagcggcggaaggtggtgtaccc

SEQ ID NO: 544756 - DNA, 793 bp, Homo sapiens
caagggtgttgggcctgtaagtgcacagaaatcaagaattgaggtttgggaatctctgcccagatttcagaggatgcatggaactgcctggatgtccaggcaaaaatttgctgcaggggtggagccctcatggagacctctgttagggcagtgtggaagggaaatgaggggtgggagcctccacacagagtctccactggagcactgcctaatggagctgtgagaagagggccaccatcttccagaccccggaatggtagatccactgacagcttgcaccgagcacctggaaaagccacagacactcaatgctagcccatgaaagcagccaggagggcagctgtaccctgcaaagccacggggtggagctgcccaaggccatgggagcccaccttttgcatcagcatgacctggatttggagcatggagttaaaaaaatactattttggaactttgagatttaatgactgtcctattggatttcggacttgcatggggcctgcagccccttcattttggccaatttctcccatttggaagaggtctatttacccaatgcctgtacccccattatatctaagaagtaactaacttgcttttgattttacaggctaatagacaaaagggacttgccttgtctcagatgagactttggacttgaacttttgagttaatgctgaaatgagttaagacgttgggggactgttggaagagtgtggtggtgttttggaaatgtgggactgagatttgggagagacaggggtgggatgatgcggttggctgtgtctcacca

SEQ ID NO: 544757 - DNA, 176 bp, Homo sapiens
ctggcgtaggtggcagttgggcctggtaagggttaggacttcagaaaccagagcccaagccccccaaagggggaacagccagccccgctctagctggttgttgccatcccggaatgtgggcctagtgttgccagatcttctgatttttcgaaaaaaactagaatgctggattctta

SEQ ID NO: 544758 - DNA, 160 bp, Homo sapiens
ataacgtgacaaaagatcagccaaatcatctgaaatgtctaccagtgcctatgaggtcagcatggactaacaactaaagcccatttgcatcaaacccacagagtaagccaggtgcttcaggtgccagctgtgaatttgcaccccatcaggccatgacggg

SEQ ID NO: 544759 - DNA, 522 bp, Homo sapiens
  misc_feature (443)..(443): n is a, c, g, or t
  misc_feature (516)..(516): n is a, c, g, or t
tcatgttccagttttagctggactactcctgtaaacagatgcttcccttcatgtgctcttgtgatttaattaccaggaaatagcagatcaatactgggtggtttccttgaattttctaattttcaggataataagctaactagtgtgctatcattctccaaaggatttttggggaaaaaaaaaatgagtatggacccatgatggaagccactccgatgaggttggatcctcggcaatttttatcctgggtggaaactcaaattttcccatctctggccagagggaaaatgaagtgggctccggggtccttgtggcccagcccttgtcgtctttcacagctttcttgctatctgaggtgacgagatgatccagcctcattttacacttgtagtgcccaagaccgggaatcaaccatttctccaagaagtctgggattggtattnctgtatgggtttcccatttattttcatcggaatatatgcggggagatgagtctcgctctgtcacccaggctgnagtgct

SEQ ID NO: 544760 - DNA, 1019 bp, Homo sapiens
ggccgcagacgcggggacgctggctcgctccctccggacctccctcgacgcgatcaaatgatgccaaaggggaaaatttcccacgacagtttgtgtggcgtaaagagaaactcccatggtcatgtgactccagatacttctggggctggttgaatgcagtgtttaataaggtggatgatgatcgtcatcaggaatgtaggcccgtgtacagggtcggcaatccagagtagtgttgcctgcagcgtgtggggcccatggttgcgcctaatctagtggtctccaggcaaaggtaggcatgaaggacttgactagatccacgcgtatccaatcgatggcccatcgtgtggagccaaatgcataagatatcacgggcgaatccgagcgtccagcggatctcgtatggtgatctattgtacgccactttgggatttgcatccactgttgggaaaacctcgaaggtatgtgtttcgttatgagtgagtcttcctggagaataggggagacaaacagaaaactctggtcgcaagccttggaaggatcagcactggccttctctggaagctagaaagtgaagctgttgacagtagatgagtaacctggtgtctgtactcttcaggtatacagggactcacttcgcaaagactggttgagttgccaggagcgatcgaacttacttatgttatactaggtcattccagagtagagatcataagggactggccagtgaatcaatgaagcacttgttagaaagatggagagtgggcgttcactcatgttaggaccactatctatcgcagaaccggtggctcattaaaatgtccactacagtgtgcgaaagctgcagaaattggcgtggaacacatctagtgcctgggggcacccgacacaaatgttgcagtacccagagtgcgagatgggggtcagggcctggtcagtcctaagcgactttggggaaggacacaaaaggggggagacatcaacctggaagggtcaggggaggttccacagaaccaaccatg

SEQ ID NO: 544761 - DNA, 458 bp, Homo sapiens
ggaaaggatcctttgtacactcgaggaatcaacaaataagaaaggcatgacccaacacccaaggaatcgagaaagagctatcactctgtcactcctgtctccacaactccacacagggacatcctcgctgttacactcaggtccccccagatcatcctcactgttacactcaggcccacggataatcctcacttttacgctcagggccccccggaataatcctcactgttacactcaggaccccccagataatcatcactgtaacactcaggcccccggataatcctcactgttacactcatactctcgggacctgcaaatgtctctctgtccaccagccaagtacagaaaagaactccagagcatcactcagcaatgggttgagctgcactgaccacactcgagtcccgtaccagccagattgaccaagctcgtagtcaagcagcaccagcaccaga

SEQ ID NO: 544762 - DNA, 218 bp, Homo sapiens
tctggatgcaagtgtcactgcatatgtatatgcaagttattaatccagtctctctttgttgttgttgttgttgttatgatacggagtctcattgtgttgcccaggctatagtggtgtgatctcagctcactgcaacctccgccccctgggttcaagtgattctcttgcctcagcctcctgagtagctgggattacaggtgcccaccaccacacccagc

SEQ ID NO: 544763 - DNA, 245 bp, Homo sapiens
ctggcgtgagtgccacccgtaatctactctaccatctttgctgtgcacagtcatcactgcgctatgttcgcgctgatctgataatcgcttgagtaggcctagaagtaaacatgctagcttttattaccagtttctaaccaaataaaatacaccctctggttccacagacagctgccatctaagtatgtccgtcaccgccaacgattgtggccttcaggcacgatacgggatacgcgatgcgtcga

SEQ ID NO: 544764 - DNA, 1070 bp, Homo sapiens
gaagacaaaaaaaaaataagcgtaacttccctcaaagcaacaacccccccccccacccttgcgccgcggtgtgccttcccttcgtgcccagccaagcttggtgccgggggtttggtgggcttgccctgtgcgcccgggcccttccagagccaagcctttcttgccgggccctgtgccggcgaaagtgggaggtgccccaagccgggaagcccggggccagaggcctcggccctcttcaactccaagacgaggcggtgttgggggtgggcgcccagagggttccggggccaacctctccggcgggccctgtccgtgcgtgggatatcttcagcagtggccttccgtggggtctccccggggtggcgggagtgtgccggcttctccttcggccggggccaaccaatcctcttcaaccccatgagacctattggcgacggacctctcgcgccggggtgcctcgggggagatgcgatgaaaacccccaaagaagagtgtcaaagggataggagacaccgcgtaggagtctatcccgcggagagagtccggcgaggacgcgccgtggaaggccaacctataatcccgagagaacctcgacagcggggtcaaatttccgtgaatctccctcccccgtgttcgattctgggaaaaactcgcgtcgcgaaaatctttctgggagtgccgaggctccttcgtggcagtggggtatttccccccaaacccctataggggaaacccgcgcaacaattgggagtgggcaagtgacagaacgttttgtggaaacaggcgcgcaaattccaaaggggcaaagccacatgaccctggagatctacaatttgccgagagaacgaggaagaccgaagttttgcgcctcaaatacaaaacggggtctcccaagggtagcaaaatagcgcacggggtgagaaccggcttggtgcgggggccaacaaagcccccccgagggcacccgagaagacagccacgcaaagatccccaaggcagggcacaagatagccggcaaagaaaagaacacagacgactcgcaaaacgcagctcgcaccagcccactccgg

SEQ ID NO: 544765 - DNA, 774 bp, Homo sapiens
  misc_feature (334)..(335): n is a, c, g, or t
ggtgctggaggcgccattggagccggcttggctggcgagcccggctgaggagcctcttgggccgcacttactgccgcgtccgctcccggtccctggcccctcagcggcatggcgtgcggggcgacgctgaagcggcccatggagttcgaggcggcgctgctgagccccggctccccgaagcggcggcgctgcgcccctctgcccggccccactccgggcctcaggcccccggacgccgagccgccgccgccgtttcagacgcagaccccaccgcagagtctgcagcagcccgccccgcccggcagcgagcggcgccttccaactccggagcaannttttcagaacattaaacaagaatatagtcgttatcagaggtggagacatttagaagtggttcttaatcacgagtgaagcttgtgcttcggaaaagtcaacctcactccttcagcacttcacagcaccttagctctccaggttcctcatggatgacagaaggaccagcccacatttacccctccgacaagttgcgcctcctcatgtgaagcgcctctttacacagactactgaacgcattcacgattcgggaggcagtactgagcccacatcctccataacaacagacttagcacaaacaactatgaattcttcggtgacacttcacacatgatcagattcatgccgacggcatgcgcccaagggccaacccacgctatgtcggtcatgacgccttgtcccatatctggggtaccagcgtcccgccctccacgagatgcg

SEQ ID NO: 544766 - DNA, 275 bp, Homo sapiens
acccaaggggaaaacatggtcgtgggtttggggttataggaacaggggggctttggtgaaaaagcaaaatggaccaatggagaaaagccctcttctggaaacatgggactcaaaaaaggggaaggaggataagtggtggccttaaagatcaagataaactttccggacaggggtaagaactttatagtatgaaaaagggtgaaacttgggggcgggtccggagaatctccaaatttggcacgtggtttgaagataatataaagctagggagaaag

SEQ ID NO: 544767 - DNA, 301 bp, Homo sapiens
  misc_feature (281)..(281): n is a, c, g, or t
cacgcgcgtaccaagcgtcgcgtgaacttctcgccgaagaggtatcgacgtttgaaccgaagattcggacttactaagggtggctgccatgtgaaagtcagtgtttatcgctacaaccctgatcaggacgctgcgccgttcatgcaggaattccaggtcgataccggtggtaaagacctgatggtgctggatgtactggcactgatcaagagcggacgagggttctcctatcgtcgctcttgccgtgaagtgtgtgcgttccgacggcatgacatcacgcnaaaacgcctggcggtaccgg

SEQ ID NO: 544768 - DNA, 359 bp, Homo sapiens
ggaacaaccaactccagacacgccacctttaagagctgtaacactaactgcaaaggtctgcagcttcactccttaagtcaagtgagaccacgaacccatcagaagggagaaactccaggcatatgtgaaggaacaaactctggacacactatctttaagaactgtaacactcactgcaagggtcggtggcttcattcttgaagtcagggagacaaagaacccactggaaggaaccaattccggacacagtagcatttgagcactgtctttgggcaaggagcttaagaaatgagaaaagcaacagaaatcattcagtgaaaggcagatcatcataaataaatgttgccaaatgaaaaaaa

SEQ ID NO: 544769 - DNA, 200 bp, Homo sapiens
tgttttacgtgaagggctatgtgtgatatgtgacatatgcaaatgagacagcatgcaaagttagcttatcatagttgattcagacctgaggtgatgctacgtacttgatttgcggcagtggcaatggacaggcatgcgctgtgtttaaaggtgatcacttaggaagtgatcagacaccgggaacgggtacggagctcgaa

SEQ ID NO: 544770 - DNA, 102 bp, Homo sapiens
atagctatttgtgttattcatttgccagaatgattcactcattccatgcctgtctctcccagtataactttgttgggtgggttttctggggcattataggcc

SEQ ID NO: 544771 - DNA, 390 bp, Homo sapiens
  misc_feature (22)..(22): n is a, c, g, or t
  misc_feature (41)..(41): n is a, c, g, or t
gtttaccttccctgccagtggnattttgaataaatggaggnaaatgcattgtctcctaacttggaaaatggcttctttttttgtgggcctttctctggtttttaggttttccattaatgttaaagtccaaggtcatagagagaaaaaggaaaaaagcaatagacatgtattttgtctgtctcagaaaaatgaagggggaaaaaaataagcaactgattagcaagttagtatatttagaaacctgtaattaaagtatagctcaaaatgacagctggcctgtggtctgtcttccatttctcagtatgtaactgaatgaccactacatggttttgttttttttttttaaactgaagtttgtacagtgttccaaaataaagttaattagataca

SEQ ID NO: 544772 - DNA, 142 bp, Homo sapiens
aaaaggggtttttgggggccccccccccccctggggggttttcccccccttttttggggggggggaatttttgggggcggggggggggggggccccctttttggcccccccttgggggttttatttttttttttttttttta

SEQ ID NO: 544773 - DNA, 162 bp, Homo sapiens
cgccacagcgttctcggcttcagaaaggctctgatgccctttcggtccccctagtcctcctagggggaagatgagtgttccaaatcctcagggtgttcctccagcaggattgtgctctgctatggagatccatgtccaggcatgtcctcagtgaagggatcg

SEQ ID NO: 544774 - DNA, 736 bp, Homo sapiens
  misc_feature (590)..(590): n is a, c, g, or t
gctaaacctagccccaaacccactccaccttactaccagacaaccttagcacctctttcataagtgagttactaagatttctatacctggaatatcatgtatgtttcatttactggatgtttacattttaggaaggaaaatagtttgtttatttaaacaactgaatacttataaactgttgttcctggaagttatttattccataaaaaatttgttcttttctcatgaatttataattcctaaatgaagaccagaaagtacaaatgctgggaggaagaataggctttattaatcaatgatgtcttgatttttctaaatgggaagatagtttatttttaacactaattatgggagcagattcttagcaaacttctttggaaaagttaatgttatgatgtgcattaggctgccccatcgtgtatataaatgaagcagatttgattttgtattcttacgtttctctgcttgtagttgtggctgtacttaaagaaatacagaatttcatatatttaacaatgtttacaatgtgacccacagaacatgtaaatgattaaaaacttaccatgaaaatatctacaactaaaagaatnctttaatttcacaagtgttttacttcgacgaatgtgcctttgatttaattggggacacttttttagaaggatacattattcgtgtttgcacggtctttgaagaggttggaactaaattctgcttaatcatcaattttctatgacgc

SEQ ID NO: 544775 - DNA, 397 bp, Homo sapiens
  misc_feature (33)..(33): n is a, c, g, or t
  misc_feature (77)..(77): n is a, c, g, or t
cccagtccagaatgggccctattattaaaaaangcccccaaaaggtaaccaggatacctgggcaagattggtgggangaaaaggggaaccaccttaccaccccggctggtgggaatggtaaattaggttccaacctattgtggaaagcagtttgggtgatttcctcgaagaaccgtaaaacagaattacccattagaccctagtaatccccattattgggtatttacccaaaggaatataaattgttctatcataaagaatgtgcacatgtatgttcatcatagcactattcacaatggcaaagatgtggaaccaacctaaatgtccatcaatgatagacgggataaggaaaatgtggtgtatatatatgccatggaacattatgcaatcattaaaa

SEQ ID NO: 544776 - DNA, 188 bp, Homo sapiens
tgtttgtagcttgtgcgtacttgaaaaaagagtcagaggaacagacaccgcagcacagaaatcatgctatattctatctgttgtaatgattctggtctagaattggcacatgtgcacatttaaggaccttcagactctgaacggagagaatccctaattcccgaagctgctggttgttgctacccacg

SEQ ID NO: 544777 - DNA, 459 bp, Homo sapiens
attaattgggaccctgggcctcaaatctcagggccactttgaagtcacttagggttaccccatctctccgggaactgcgcattgagggatattcgcttacaccttcacgttgtttaacaatttaacgcagtatttaggggccagactcaatttttcccctcaaaaaatgtactccgaactttgccaaggtccttgaaaaaaaaaccaaaattcagcctgaatccgttgtttgacacctgtattccttggccaccaagcggaaacccaccccttacaaaaaattccccaaattaggcaggcgtggtgcctgcgcctgtagtccacctacccgggaggatgggaggtgaaaggatcacctgagcctggggaggttgaggttgcagtgagctgtgacagcgccacttcactctagcctgggtgacagagtgagaacctgccttgaaaaaaacaaaaaaacaa

SEQ ID NO: 544778 - DNA, 163 bp, Homo sapiens
tggcgttctagaggagtcccggctccttatcccggctgggcgtcacgatgtacgtgtgcgtcggcagtgtggatgcgcgtgattgtggcgccatatggagcatcgagcgacgcaattcagcttaacaccagcgacgagattccctttgagcaccagacacaga

SEQ ID NO: 544779 - DNA, 643 bp, Homo sapiens
aaaaaaaaaaaagtaatatccaggaaccctgcccagagtaatactgtgggtggcataagagaatcaagccattctcaagagataacttcataaccagaatggtctgtgggctagcagctgtcacagataggcagggcactggggaatatgacctttctgtccaggtgattcacagactagaacctttcttatcctcctcctagaagtttggactggggactctagtgttaagatgatgagcccgtgcatcaggtccttctgcacttgggtggaagtctcccagggtaggtttcctatttggaaacagtgggaatcatgtttccagtgataaagtttaatggacctcatcctttttttttttcctcatctggccattggggtgtctaaaaggggttaaatggcttgaatgtggctaaggtgggttctcagaattggcgccagtatgggcccaacaatagcttctggctcggtctaactggactcaataccttaaggattggtatcagagttgggatactagtgtaagggggggtgtcaccattacttaatggggagataatgaacccaatcagggatgcggttaatggggcatgtcatctaagagaggagaaatagcggggtagggggtctaattttgaatacc

SEQ ID NO: 544780 - DNA, 828 bp, Homo sapiens
  misc_feature (771)..(771): n is a, c, g, or t
  misc_feature (786)..(786): n is a, c, g, or t
  misc_feature (798)..(798): n is a, c, g, or t
aatcaaacatagacaaatgggattacattgagctaaaaagcttttgcacagcaaagaaaacaatcagcagagtgaagagacaacctacagaattggggagggggaggaatatgcaaactatccatttcataagggattaataaccagattacataaagacatctaacaactcaatagcaaaaagccacaaataatttgatttaaaacagggaaaatgatctgaatagacatttcacaagagaagacatacaaatggccaacaagtgtaggaaaaaatgttcaacatcattaatcgtcagggaaacgaaaaccaaaacctcaatgagatattatctcacctgttaaatggctactttcaaaaacacaaaaagtaataaatgttggcaaggatgtggagaaaggggaccactcatacaccgttgctgggaatataaattagtatagccactatggaaaatagtatggaggtttcccaaaaatctgaaaacacgcctaccatatgatccagcaattccactgctgggtatatacccataagaaaataagtcagtacatcaaagagatttgcattctcatgtttataacagcagtattcacaatggtcaagatatggagtcaatctaaatatttgtcaatggatgactgttaaagaaaatgtgatatgtatacacagtggaatatcattccttcacaaaaaaggaataaaatctgtaatttgcagcaacatgaatggaaatagagtcattatgttaaagtgaaataattcaggcncacaaaggccaagtnttacacgttctnacccaaataggggaactaaatgatctcaag

SEQ ID NO: 544781 - DNA, 793 bp, Homo sapiens
cctagacctgtactctcaggtgtcctgtaccgtccgttgttggcatttgggcggtcatatccccagccatgacctatgggaaccctgctctcagtggcctcatagttacccagtgcgttcgacttggggctccgcgtcttgggtaatataggaaatagtacgagagcgaatagaagtgtattcttagtacttgctggtcatatttgtgagatacagagatgatgaatgttcaatatggggataggtataatgaaccgtactctatgaatcagatcttctggtgaacggttacactttgttgttcatgtttttaaacagaatgtcacagatgtgtgcttgataaggttctgggtatactagacaagtcaccatgatttatttcggctgaaagtcaaacagttggatcaattcagtggctcaaatcttgctggacatatgttcccaaagagccaggaataacacctgtgattttgtcattcgagaagcaacacacacttgtaaactagttcattttctgccacctctggtttatagtggtaaacggaatcctgtcagctgccagtgtttgaactaatgaatatcgatacttgtatcatcaatgctgatatttgaaatgagttggtctgttaggtttaagatggataaatgaatatcactacttgttctgaaaacatgtttgttgctttttatctcgctgcctagattgaaatattttgctatttcttctgataagtgacagtgaacaattatatgagtaagctccctgttgtcatttatacaccggttgtgtatt

SEQ ID NO: 544782 - DNA, 205 bp, Homo sapiens
gccctgttttgccggggggtacaccctcagcgccccaggagaccctaaagtggtttccttttcccaaaaaatcagacagggccccagccccctcaggcagccaggtcttttgagtttccttaaaagtagtgatgggaagattccagtttgagggcccaacgggcctgcttcctgtttttgtaaataaagttttgttgggccccca

SEQ ID NO: 544783 - DNA, 391 bp, Homo sapiens
ccaggaatgaaaggaagtaaagtacacttgaagagggccaggcgtgaatgacttgacagattcaagtccctggtttgacctttgacttggggtttcatatgctggcatgcttccagggatttacggtttgcatctcttctcccctgattcctaccttggcatgggctgtccacatgcacggtggcctgccagcacttggaggggccacaagcacagtgtgttcagtatactgaagtgcacatgctcacttaagacgttcttccctgcctcttggtgcataagcttgagcccatttacccaacttctgagatcttatcgagaagctgctgatcatcagtttcaagtgttttccatctatttggagactgcctttccctggtgctggctgcaa

SEQ ID NO: 544784 - DNA, 940 bp, Homo sapiens
  misc_feature (9)..(9): n is a, c, g, or t
  misc_feature (91)..(91): n is a, c, g, or t
  misc_feature (301)..(301): n is a, c, g, or t
  misc_feature (512)..(512): n is a, c, g, or t
  misc_feature (600)..(600): n is a, c, g, or t
gcatattgngcattggatctatttaagcctagaagtataacagataatcagttccttaagtgtaaatatgttcttaaatgtttggcctttntatctgttattcaaatgtattagtaattctcatattttgcaaacagatccttttgtgtatattataaaatatataccaaatctagttttccttttgctgtggaagatgtctttatataatattgagacttcccttgcaaatgagagacgggactctggtcacgtatagtgtgtaggcctagccccatgtattacgaactcataaactcanaaatccaaggattaaacattgtatgtctccttcatttatgcaagtcatgctttcattctacatgtacgtaaaactacaagtatgacaaaaaatacaactttccattggaattttgttcaatcaagtaatgttttaacaactttaaatcatcacttaatttgattgtattacctatcacagaaccaataaccctttctttttctgcactaanaacatgaatattctttactgtgcaaatgtatgaagcacacaatgcatataattattgaaatataacatactgtataatggatcgtaanaaatgtgaaatatacctctacattaatacatactacgtactaatgtacttaatatctgacgaaacacataattagattacccgttcttaaaattggatactcttaacttaggtctatattccttgcacgtctaactttaaagaaccattccttacaataacataggatctactaatctcaattcctttcaatattcttaatatccttgtattattgccattactctcttcaaatctgttactttaactaaggcactcccgaatataaaactgtatcttttgcacactaaagtgtattaagtcactagcttgtacatactctaccctatttactttctacg

SEQ ID NO: 544785 - DNA, 342 bp, Homo sapiens
ttaaagggcaaaaaacactgtatcagcataccctttctgtatttacgaaacataagcagccgcgcatggtggctcacgcctgtaatcccagcactctgcgagtccgaggcggatcataaggtcaggagatcaagtccatcctgggtaacacggtgaaaccccgtcttgaataaaagtacaaaaaataagctgggtgtggtggtgggcacctttagtcccacctactcgggaggctgaggcaggagaatcgcttgaacatgagagtcggagtttgcagtgaaccaaaattgcaccagtgcacactgcactccatcctgggcgacagtctgcgactttgtctca

SEQ ID NO: 544786 - DNA, 137 bp, Homo sapiens
tgaggtcgattagaggatccctatatcacataagtgtctgtagtgccatgctgagtaatctgcgctggtacttgggagctagacaggtctctaattcattcagcaagtcaagaagtgcctcctaggatggcactgtt

SEQ ID NO: 544787 - DNA, 250 bp, Homo sapiens
gggcaaatgcttctggaaaccccttccctaaaaaaaaaaaacgtgggggtgtgggtgggggttccccccctcccatccttcctgcctcctgccccaaaccccgggtttctgggtttggaagggccttctttccaagctggggggtcctgggccccccccattccctttttgtccttgctgctggcaaacagtaaaaaaactccctttccctgggggccgttatgcttcagaattaaaccaatgaagttta

SEQ ID NO: 544788 - DNA, 168 bp, Homo sapiens
ctagcggaatacctactgctgctagcatggttagatgggaacggaagtaggcatagggcggctacgtaaccccatactacagggggtaggctaggtacctgcaggacggccacatactagtatctacacaggctagagagacgcagggatatgggctatagaccatac

SEQ ID NO: 544789 - DNA, 418 bp, Homo sapiens
attataagggagctgccctatagaggtgtactattttttcttttataccgtatttttattgtatctttttggttttcaaacacaaatacttaccactgtattataactgcctacgatattcagtacagcaacatgctgtacaggattgtagcctaggagcaacaggtcataccatatggcatagatgtatagtaggctattccatctaggtgtgtgtaggtacactgtatgatgctcacacaacaaaatcacctaaagatgcatttctcagaaggtatgcccgccgttaagcaatgcatgactgtaataaaaaagaataggccagctgggcgcagtggctcagccaaaaactttaaaatagcctatgttttaaagttcttccttatctccaacatcacacttcgtatatatgatggag

SEQ ID NO: 544790 - DNA, 100 bp, Homo sapiens
tcaagcttctaacgatgtacggggacatgtgttgactctgtaatggatttatgtagcccacttcagtctgcaaataaagcaaagtaactggaaaaaaaaa

SEQ ID NO: 544791 - DNA, 106 bp, Homo sapiens
atcgggttgagccctacagcacggactccccctttggcttgagtattgtacggtatacatagtccccccagacgaaagatgaggcagaggcaccgtcccacgccgg

SEQ ID NO: 544792 - DNA, 154 bp, Homo sapiens
taggagttcaaggttgcagtgatctataatcaccactgcactccagcctgggtgacagaacaagaacctgtctcaaacaaacaaacaaacaaacaaaaatagtggagaccctccagtgtgagcctcctcatcatctctgatttcatcccccatg

SEQ ID NO: 544793 - DNA, 95 bp, Homo sapiens
ataggcatcaccaatatttcgtcctcccaccagggtcaccacgccatcgacagtgaaacttttattgtgcatacggcgattaagacgggaaaagt

SEQ ID NO: 544794 - DNA, 159 bp, Homo sapiens
gccgatcacagaatttaaaggaatcttcagtaaaagtagataatgaaagctgttgttcaagaggcaacaataaaatccagaatgccccatccaggaggtcggttttacaagacccagctaaactaaaaaggctcaacagtgggcgagccttcacacaga

SEQ ID NO: 544795 - DNA, 241 bp, Homo sapiens
tcttctgcccaatggtaccttggtccatcacatcaatgccaactacttcttggatcatcacctccgtgaagcccgaggaaatcgagagcaattctcttcagcttctcatccacctctgaagacccgtccacggccacctacatgcagttcctgtatggagggactccgtccgtggcctgccccatcctccagccctagagtgcctggacgggatcttattaaacagaccccacgcctaaga

SEQ ID NO: 544796 - DNA, 842 bp, Homo sapiens
  misc_feature (31)..(31): n is a, c, g, or t
  misc_feature (70)..(71): n is a, c, g, or t
  misc_feature (75)..(75): n is a, c, g, or t
  misc_feature (82)..(82): n is a, c, g, or t
  misc_feature (84)..(88): n is a, c, g, or t
  misc_feature (95)..(96): n is a, c, g, or t
  misc_feature (100)..(100): n is a, c, g, or t
  misc_feature (107)..(107): n is a, c, g, or t
  misc_feature (204)..(205): n is a, c, g, or t
  misc_feature (240)..(248): n is a, c, g, or t
  misc_feature (254)..(254): n is a, c, g, or t
  misc_feature (257)..(257): n is a, c, g, or t
  misc_feature (273)..(273): n is a, c, g, or t
  misc_feature (295)..(295): n is a, c, g, or t
  misc_feature (313)..(313): n is a, c, g, or t
  misc_feature (369)..(369): n is a, c, g, or t
  misc_feature (834)..(834): n is a, c, g, or t
acctcaaacctcctttcctaataagtgtgcntgcctgtggatgggttgggggggggtggagggggggggnnaacnaaatggntnnnnnaaaaaanngggnaggggcngtgggctcacaactgttatcccagcactctgggacgctgaggtgtgagggtcgcttgagcccaggagtctgagatctgcctgggcaacatagggggnncccccacctctacaaaaaaaaattgaaaaaaattnnnnnnnnntggggngcncacctgtggtcctgantctgactgtggggggctggggnaggggggtcacttgggcngggaaggtcaaggctgcgatcagctgtgattgtgtcactgcactaagccttggtgncagagtgaaaccctttttcaacaacaaaggcaaaatcttaaaaacaggaaacaggctattgaggaaaaagggttataaaactgcctaagaatcttcactaaagtaatcttctagtccttccatatccatttccagagagggatttaaagaggccagagcagatgatgcatccttggttttctggacacttggtttgggttgaggagtttctggttggataggttccttctttatgtctttaccaccatttagaatacgttggctctcacaaaagaactgattaggatgattcaaagaaaagccacaatcatccacattgtgtatcatctcaaagtatttttgacaggctacctggtaatgtgtcccctttactaaatccaaaatctggcttatccctccaggagagatcttgtatgactgccacttttgcttcagcagctctggatcactgtgacggaatgggcnccatgata

SEQ ID NO: 544797 - DNA, 356 bp, Homo sapiens
  misc_feature (312)..(312): n is a, c, g, or t
  misc_feature (331)..(331): n is a, c, g, or t
taggttcatgattcattttgagttcctttttgtgtatggtgtgaggtagggggccaactacatttttctcctgtgggtatgcaggtgtcccagcaccatttgttgacataaataggatcttaaaggacacctgggagccctttaaaacccaccacctgggggagcagggaggtaggtgggagcacctaggcgtggggcctgggctgggggaaagtgctcttgggaaaatgccctttcctgctgggaaggagcaccagtgagcagctccccagcccctgcttcttcagccttttgtgtttgatattgttacanttcttgtgttgttgttgtnaactttgctgtttcactagacccca

SEQ ID NO: 544798 - DNA, 158 bp, Homo sapiens
gacgtgcggagcaggcaccaggggagtgtgcacggtgctggctcagagcggccaaccccggctcccaggctgaagccgggcgtctgcccccatttcccttttctctaatccacccttcggcaggccctgaaatctgaagggcttagttagtaccttgc

SEQ ID NO: 544799 - DNA, 378 bp, Homo sapiens
gagtaagtgggcattggtctatggttgggtgggcatcagtggtagtagggcagtgggagggcttatatgggtttacccagctataacggggccatctggcgtcgtggtgctttccacgttataaaaggttaatatttaccagtacagcacggggcttaataaagacggcactcagaaccacacggcacagtccagtttttaaaaaagctggctacatgacagacaggtattcccacggagtgagtatggagaaccaattcaaacgaagtaaacaagaaccttaaaacccaattagcacttgattcaaagccggtcctggtaacttatccaactttggccaaattcctaccaatcaccttagtgccaatcaacataggg

SEQ ID NO: 544800 - DNA, 468 bp, Homo sapiens
agtaagaggggaatatttatcaatgagtgagaaaatagaactacattcaagcaaaccaatcattcatcattaaaaaataaatttgatcacagtctctgtataaagccaaatcggatttactatttggttgctttttaatgaccttccattttttctttaagagagtttattcctaaatgttttcacatggggaactccaggactctgtacacatgcatcagttttggccattttctgttgaagaaagtagaggaagactttttgatctgaaaaaaggagctcttgggtttgacaaaagcaagaaaattatttcacaattacatatggctttgattagtcatagttgtcaaaactcagcaatgtcttgtcattcctacaacaacttgataacttggcaaactaggtatatttatcattagtttgaagtaaggaaacagagacctaaagtatcattgcactataatgaaa

SEQ ID NO: 544801 - DNA, 169 bp, Homo sapiens
  misc_feature (69)..(69): n is a, c, g, or t
ccccacgagtacgtcgaggcaccaggcggatacagagcttaggagacatagcaactgtgtagagcaggnggttacaaacagccacaaaccggtcataggccatcacggctaacatgaacatttccataatcacaaatgtgcagccaaagaaaaactgcatcatgcaacc

SEQ ID NO: 544802 - DNA, 1037 bp, Homo sapiens
tttgttggtctttgcctcttctttgtttgtttttttccccttcagtttttttccttgttctttctatgtgttcatccttttgtgtctctttgtatgcctctccctttgttgtatttctattgttccgtcttctgtttctgcgcatttctgctgtctccctgttttttttgcatattttttcacccctttggggttcttgttccctgcctctcgtttggcccttgctatcttcctatccctttctccctttccctttcttgttgtgtacattgggccatcaggaccttttagcatcttccctagcagccgattgaagcggagaccaagtccactgtgagctggacctggtctgaggggcaccagccccagaaggtggcccggcgcgtgttctaccaacagccgggagtgctgtcggcagcagaacgttaacggatgccttcgtccgacgctgaggaatgctgcttgccgacgcacctcgcccgtagccggatatgctgagcaagcaacgaggtgctccgcctagccatgaagtacatcggcttcctggtgcggctagctgcgcgaccaatccgcagctctggccgcaggcctcacccctacccgggcctctgcaaacggccggtgcaccgggtcccagatcgacggcgcccgccggggatccggacgcagggccgaggcggcagcgcgcttcgcagcaccagcgcccccggccgaccccgacaggcagccccggatggagctggcccggcccatcaagaatggagcaaaccggcttttgagccctagaggtacagggtgaccagcacgcaggcagtaacctcctgagccaggagggcaccagggactcggccgagggccgtcaagagtaagggcagtggacgtgcggcgcaatgcttgggagcgaacatcaccccgagagaaggacgcatgctgccagacggatcaagccggtcaaggtctcgggggtcccgaaggggatcagtcgacccctcagggacccgcagacccagtaaaaaaatcacccacaaccctctgta

SEQ ID NO: 544803 - DNA, 1585 bp, Homo sapiens
tggactaaaagtgttgggttggcttttttggccccaagtactctgggaaatataaaaccaaatataatgtaaaggtgttctcttattccagaaactatatgtcaatgggtatttgggtgggggtgtttcttatccagtaatattatgggtcacagggtattaagtgggtggactggtataaatatttatatttttggagagagaaaatttgtggcttatactctaaatgtcccagagaagaccttcgcgcaggtgtgagaccgcctctttttggtccagggtcgtggcaaattccatgagactatgcgccagatggtgtgtgtgttaatatttgggtgttatacaggtgtgtgtgcgctattctttattctctatctctgtatagacaaattctcctttatatgtaatctccactcttctccccttctctgtgtgtgtttcacacactctcccctctcccgcggctctctctctctacaaaaaagagagaaacctgtgtggagacacacctgtgtgttgagaaaaccccacagagagaaaaacactctttttataagtctccttatattatcaccccctcaaagctatcacgccttttctacgaagactccgctgtgtgctgccgtgaggggtgtttatacacacatataccgacgtgtgcacgagtctacaacacaccgcacactagttgcgcgagctattattctttctcctgctgggcaccatatagaacgaacactcttctttttttcttctccaaatcatcagccacggtgtcttatatatagtggccgagaaatagagactctccctctcttttataaccccgatataagaagtagttgtcgtctccgccggttggggggcgttgtggcaacccaagctttcttctttaagaggacaccacactatcatttcacaggcggcgggggaaacgatggcaaccacgcacaaagtcgaaaaaaaagagcgcccgaggggggggcgtgcgtcccactttattggcggggaaaacaccccacgggctgtccttagaaacgtgttgtgttccccccccctaccaaaaaaagtaggtctgcggggagcacacacaaaatgtttgggcgcgccgcgtgtttcggaaacaatcatactttataagcgctacaacgaacacacttttctcgacgcgtgctcaacaagattttttacaacaggggttgggggggccccttctctcacacaaagagtatagatctgtggggatatctaccccccctcctttgtggaacaagggtaattattttccgtataacccctgtattaaaatgcccccacggtcttttataaaacacccgcagcttatttatacttacactacgccgcacttctatctaggcggcaggaaacatatacactcagagggccgccgtgacaaaacaccgctttttgttcgccacacccaccaatgtagcaacgtcataaacaattaacagacatctgttgtttcccacagggtgggacagactccccatactaaacgtgctcaaacacaatctttgcgttgtggatatcacacgctagatcgtgattgccaccacccaca

SEQ ID NO: 544804 - DNA, 230 bp, Homo sapiens
cggggggtttttttgggggggggggttcgggttcgcccgggattacataagagccccctttttttcccccccccccaaaaatttggttagggggggcggggggcccatttttccccccttttttggggggttggggcgggagtttgtttttcccccggggggcaggggtttgggtggcccagttttggcccctggccctcccgcggggccccggggggggccccctttta

SEQ ID NO: 544805 - DNA, 102 bp, Homo sapiens
tgcgcatcgacatctggccggggctcgtcgtcgccatcacgatcccgctggtgctggcgatcaccttcgtcgtcatgtactactggggcgtggggctgcaca

SEQ ID NO: 544806 - DNA, 715 bp, Homo sapiens
  misc_feature (476)..(476): n is a, c, g, or t
  misc_feature (660)..(660): n is a, c, g, or t
tgcagtggttcatgcctgtaatcccagcacttgggaggccaaggcaggtggaccacgaggtcaggagttcaagaccagcctggccaacacggtgaaaccccatctctactaaaaacacaaaaatcagccaagtgtggtggggggtgcctgtaatcccagctacttgagaggctgagacaggaggatcacttgaacccaggaggcggaggttgcagtgagccgagattgtgccattgcactccagcctgggtgacaagagcaagactgtctcaaaaaaataaaaaaaaagatttaagagcaaggttggtaggcatgagagtttggtgcatagaaacatgcagcagagagaggatattaaagcctaaaattccaaaggtatgttcagcaagatatatgcctgtgctgggccataaaacaagtctaaatacatttaagaagactgtgcagcatcattcaagttagtttcagagcatatncatcagctcaatagaaacccatgccattaaagtcacgctcattccacctcagccctaggcaaccagtaagctactgtctctatggatttgccttttctgaacatttcatataaatggagtcatacaatacatagccttttagttttggcttcttttacttagcataatattttcattatctggnttgtggctgtatcagactccattcctttttattgaggaatcgtatggatatacat

SEQ ID NO: 544807 - DNA, 914 bp, Homo sapiens
ggtattcttttgtacaaaaaagaactacttgtattctcgacgaaatatgcaatgcttacgtatataagcgggctggagattattttccaatatagtattctttgaaaatgaaaggggatcatctattttagtttaggggtctgggaactttatgaaaatttaatttgtggaccaatgttttgtgaaagctaaagagggcaggggttaaacatagggctgaatttctcattctgtatagaccagcaaacttccctgtgcaaggcaagtttacatcacaaatccaagaatgtatgcatcctaaatgctagttagcttcagcccctagttaacctcaggacttggttttgcatataaaaggtagacagctgatatgttttcatgactaaatatttgtcagccagaacaggttggtgtacaggtaatgcatatatatattaagcttggtattatataaatttttcatttagttaaattgggaatggttttcaaagaactctcagtatctgcctaggtgtaatgggggagccctgatttccatagtgtacattccatttacagaggtagtctaaaagtctttaacattaatagaaaagattttacatatccaaagagtaagtcaacattacaggataataaactttccacaacctttcctgtacgagacagcataaaaggcacaagaaaaggacacacctggaacatcatgtaacgataggacacttatccatactattggtaccctggttttataacattaattgttaggtgtatttttacattcacatgttacagatcttttagaaggggaaccgttaggaaatatggaatatagaacctggataacatgagaaagagaatttacaaaatttaccataaaaaagacacaaggatgataagggacaaagtgtcataac

SEQ ID NO: 544808 - DNA, 162 bp, Homo sapiens
  misc_feature (97)..(97): n is a, c, g, or t
ggtagaaagtgtaaaaagggatcaagaaaatcccctagaataatgaacaactattcaagatttcaaaatatacaaaagttaatcactttcctatatnccaacaatggatgagtggatttgaagttaaaaacaaagtacttctactttagcacccccaaacaa

SEQ ID NO: 544809 - DNA, 168 bp, Homo sapiens
tcagcacatggaggatgcatctataacaagttagtacctattttgcacgcatgaagactaattcaaagtctatttactggttatagctctaccagtacggccaaaaccatttctttttaagtgagaagtggggatatggtcaggttatgattccagatagaagttgtg

SEQ ID NO: 544810 - DNA, 653 bp, Homo sapiens
ttctagatcgcgagcggcgccttttttttttttggtccttaacgggtggacctcagccagggggggtccggggggaaaaaacattccaaaggaagccatcccttgggggaaatgggtttatacggggtaaattaatacttttattttttcccctatcccttccttcctagatgggggataaacatggggagaggaggttgagattagggatggctgggggaattgtcctccccttaagaaccttattcccaaaataagggcagggattatcgttcaagggttctttcaagggggcgtcattatagcgagtggaactctcatccgggggcttgggatacgagtggagaaattccccaactaaatgggaattctctgggtttatccccttctcttccttcaccatttgggactacctttgctgggtgttggagtcccaaatcagattcccgggtaatgggagacgaatgtttaagaatcttctcagggtggggataaacgtcacattgagaaacccaaacgacgaactatatatatttgcacgtgttttattgtgcttaattggagttgttgtgtccaataaaaaaaaaacaacttacattattatcaaataatttgctgcaaagtcagtgacaagacgaaaacaaaaaagaggg

SEQ ID NO: 544811 - DNA, 170 bp, Homo sapiens
gtttgggggccccaaaattccaaaatccgttggggctccccccaggtaaagccttgggcggggggcccccccctggtgcccccccggggggggccccccccccccccggggggtttttttgaaccctttttttttgggttttttcaaaaaagggttaaggccccccccca

SEQ ID NO: 544812 - DNA, 382 bp, Homo sapiens
aacgcactcaatattcagaagtttgaattctaccactctcaaacacagttcaaaagatagctgtttgagaatgcttcttaactaatactagtacaatatcttcaataatgtatgtaccttatagaaaatcttgaacagtacaagattttcataattaaggcatgcaaaactgcttgggctctttgattccaggtgtcctcttctcccttctgcttttgccatctatgttcaatataattctaacccagtctaagtatggagaaaattcctaccctgcctgcttttatagctcatcaaatttccctgtatcagctatcacttttctggtaggtgtagtctgatttctgtctgtcatgcctttgccacaatcctttctttgaag

SEQ ID NO: 544813 - DNA, 406 bp, Homo sapiens
tgagttctgctcagtgacattgctttctccttatttaccccagttaagggccggggtgtggaccggggcgtcccagagtgccagcgtttcgtcatcaactttcagtaaggtgattgagaaaccggtcatatccagtgaggtgcagtacgcgccaattaaattacgttcgatagtcaatcccgcttgctggcaacgtgtggtcaggcggttatagacgccgtacagctcagaaagcggagttgcgccaagattgttaaccagcgcaatcacccgatcgccagactggagcggttgtttggtttgttgttcttcctgccaactgccttgttgataatcccagaaacgcaaagtgcgatggtatgagccatttaccagcagggtgtcgaacatttcatcgacggtttga

SEQ ID NO: 544814 - DNA, 331 bp, Homo sapiens
aggagaacctgggactcccaggccatagtttgtcttggccatgtaactttagccatgacagtgatctcccactttgttcatttagagagtgaaacagattagtgcacaggatgaactgtaggctgggcatggtagctcacgcctgtaaacccagcactttgggaggccgaggtgggcggatcacgaagtcaggagttcaagaccagcctagccaacatagtgaaaccccgtctctactaaaaatacaaaaattagctgggcctggtggaacgtgactgtaatcccagctacttgggaggctgaggcaggataatcacttgaacctgggagt

SEQ ID NO: 544815 - DNA, 413 bp, Homo sapiens
  misc_feature (1)..(1): n is a, c, g, or t
nctgacctatccgcttgagactgatgtagatccgatgagccacgcgaaggagctcgtcgaccacgtgcctgtcctgtgacaggaatactccggagaagacgcgccgatatgagtcatgcgtgtctatcctgtatggcctcatgaccatcaccctcagagtgcctgagaatggtacaacgggaggtcttggcctagcaattatctctttggttcatggacctcaagcacattgaagatatcttcactgtgcttaagaatactactactctgattgtgtctactgattggctatcagaaccttaggctggacctaaatagattgatttcatttctaaccatccaattctgcatgtattcataattctatcaagtcatctttgattcctggacctaataaattttttttccctttc

SEQ ID NO: 544816 - DNA, 170 bp, Homo sapiens
tggagattagatacccactatgctttacttaactcaacagttaaatcagcaaaactgctcgaccagaacactacgagccacagcttaaaagtcaaaggacctggcggtgcttcatatccctctagagggcctcatgtgtatgagcctcatgtgttggagcctcaggtgta

SEQ ID NO: 544817 - DNA, 1358 bp, Homo sapiens
  misc_feature (1263)..(1263): n is a, c, g, or t
tgggagtcatgtgcccctttattaggctgacccattacttgaaagggatggaaccgtgaggatgtggtgtggccccgatgccgggccggccatgctttacgggcttgtaggtgatgggaaaatctcgcccaggtatgtggccagatcatctcgggcttgatctcacacctgggttagaagtgttcttgccgttgtgtaaacgcccacacattgtctggcccaccattctcggtgtaggatagatccattgtcccgcaggtgctgttcttcaccatcttccggttttctccatggggcggggcctctctttctgggccttgcggcagggcggtcttacaagaagggagagtgtggctgggtttccagccgaagtgccccggttacaggccgaccggccgttgtgggcgccgcactgtgtaacagttggaattcaggttggctacgataagagacattgtgtccagcaagtctggtgtacagaggggtcccacacgcccgagggtaagtgtgagacactttggggagaaagtgtcccgggattactatcgccttactggactatcaaacattgcgtaggcgcatattttagggccggagaaatattacgaaaacccggttctgggaaatcttattctcgtggcgcccggacgcaattatacaatcgcgataagatcactacaaatgcgcgcctctcccacaattaccctataagcagaattctctttttacatataaacaaagaacgaagggttcacagagagtacccttccccttatacccaattcaaacaattccaaattggggccccacccaaagggggtaagctggaaacctacagaatgataacacccgggaatataagaggagcggggacatcaaattcctttcgcaagctgtccctaaaataataatttcccccccaaatatatttacctaaaagaaaccaacggggcggacccttggggaaactccctttggactctgtgggcaaaactcgcgaggtaaagtcaactccccagaattgtgagaggccccccaatttgtgaatattagatgacctgttcacacaaggacgtttttggcagtcacttgacactggtccccccacaaatataggggataacaaacagagttgacattccccggaaggtttaaacccaaaagccccatatgtaaccggtatacaagagcgggggggcatcataaaggggaacggctcttaaagctctctgtgcagccaaccaaccgtttacttcgcccacnagctaagaataagtcccaaaaatattagaaagggcgagatatgtaataagagccacatcccctttagcagaagaaaaactgtatcttgtcgggag

SEQ ID NO: 544818 - DNA, 865 bp, Homo sapiens
gacccacgcgtcgagaacctccaagtcagggcgcagtggctcacccctgtaatctcagcactttgggtggccaaggcgggcagatgacttgaggtcaggagttcgagaccagcctggccaacatggtgaaaccccgtctctactaaaaatacaaaaattagtcaggtgtggtggacgcctgtgatctcaatctcagctactcgggaggctgaggcaggagaatcacttgaacccaggaggtgttgcagtgaaccaagatcacaccactgcactccagcctaggcaacagagactctgtctcaaaaaaaaaaaaaaaaaaaaaaaaaactcccaggaaaaagagcctaatttcgagtgtgagcttgggcttgtgaaagttaaccttgttaaccaccagggaaagcaggcacagctgtgaattaggaccagagcgggactcaagaatttctcacagaagacagggtcagcttgaggggcctgcacacacggggttgttgaggaacccacagatgggcgccgagaggcctgccttttggccgtgcccaggttcacccccaccttggcccttacctccttcaaggaagccttcccagctacccgaagctcagggggcgcttctggcgggtccccgtagccaccctgagcctgtacctgtgggtggcctggtttgctatctggtgctagccggttgtggcctcgtctcgctgtagattgtgagtccccttgggcggagacccggtcgtgcccggttgccccgcccggtcctgtcacttgtcatgaaagaacatgaccgtgttcggtcgcccagaaatgccacgtcatggggcgcgactggcggatatggccgaactcactgcacaaccgg

SEQ ID NO: 544819 - DNA, 249 bp, Homo sapiens
  misc_feature (189)..(189): n is a, c, g, or t
gaagagcccctggaagcacacagaggtgttctgctccatcccatcccgctccctgctctccccaagctactaccacagctttggagtcaccgagaactatgtcatcttccttgagcagcctttcaggttggatattctcaagatggcaaccgcatacatccggagtatgagctgggcctcctgcctggntttccacagggaggagaagacttatatccacatcatcgaccaaaggaccaggcagcctgt

SEQ ID NO: 544820 - DNA, 582 bp, Homo sapiens
gtgagaagagccctcgctgctcacaggcaatgctcctacagtgtaaccctggtaacctgatgcagattcctgactgcctcacccattaggggaaatggaagacttttaaaacacaacaatgataagtagttaagatcctaaactgcaaaatatattctatgattgattcattgaccagcagaagaaagaaacattttccctgcattgctggtgaaagagcaggaaaaatcccaagtagctcctatttcccagccccaacaagagggaagacagcagggggaaaagtgaagagaaaacaagggtgacgggaccactttgcggtagtcaaggcagggggtggcggaagggccctttatgaaaacacaggtatgatatgatggctgttcctgtgtgttcccgagtcacccaaaaacagttcaaattatgtttgacattctcattttggcacagggtgaaaaagtgtggtctattctagaaacaaaaaaaaaaaattaaaacttccaatgtgttgaagcttaagggattagcatttatccagaacgaagaatgtaaaaggactttgtagatgtcttccccaaatct

SEQ ID NO: 544821 - DNA, 348 bp, Homo sapiens
tttgagataaaggtagatctatcttttggataagctggattcagtttgctagaattttgcagaggatttttgcatcagtattcatcaaggatattggcctgaagttttcttttgtttttgtatctctgcaaagttttggtgtcaggatgatgtagcctcatagaatgagttagggaggagtttctcctcttcaatttgttggaatagtttcagtaggaatggtaccagctcttctttgtacatttggtagaattcagctgtgaagccgtctggtcctgggctttttttttttttttttttttggggggggaagcgcatattaatgggctgcgcccacatttcacaaac

SEQ ID NO: 544822 - DNA, 925 bp, Homo sapiens
attaatcccctggcccaacccgtcatctactctaccatcttagccaggccacactcatcacagcgctaagtctcgcactgattctgtttacctgagtaggcctagaaataaacttgctagcgttttagttccagttctcatcacaaataaactaagagcctcgtcacgatcagaacgcgtggctcgatctaagtattgtccctcgacagcaaatgcggaccgctatccaataatctcattctaataggcttgaatcctcttctaaagcatatatactcgtccggacatatgaaccataactcaataataccaatcaatactcatcattaataatcataatggctatggccaataagagctaggtgaataagtccaccctttaactttcttgaagtcaccagtgaggggttagcccagagaggtacaccctctgacgatccgggtctgcttgattgctcaatagtgaacaagaaaaataagtcccccatctcaatcatataaccaacatctctgcctctacatctaaatcgtaagggctttctcgctcactctctcaaatcttatccatcatagcaggcagttgacggtggattaaacccaagtccagctatgcgaaatctgaggatgactcctgcaatttaactcacacttgcgattgaataatcaggcagttctacccgtagaacccgtaacataaacattcttaagtttaactatttgtaatatccttactaataacggatgcatagtaaacaaagttaaatccaggacaccgaacctaatattaatcggaccgaaaaaggtagaatggtagaccctttaattcttcacctctcttctagagagagccccggacagtgttgcacagcgcttggatgcaaaaaaggctccccaataacaacctcattttttggaattccccaaa

SEQ ID NO: 544823 - DNA, 276 bp, Homo sapiens
  misc_feature (151)..(151): n is a, c, g, or t
  misc_feature (177)..(177): n is a, c, g, or t
  misc_feature (193)..(193): n is a, c, g, or t
  misc_feature (207)..(207): n is a, c, g, or t
gcatgaactgatccactgtcttccttcttagcaacatgtcttcaaatccactttttagagtttacttgtctctgaagtaccaaacttaaaagaggcaggtgttggaatagaagtagcaggtagacatctgttttctcgggattctgacaanggcagcacattttgtagaagctcccnctcattttggtaccanaacatgcactgcanatcccactgtacctatcctttgtagaacaaaacagattctgaacatcacgtgttaatagagttatagga

SEQ ID NO: 544824 - DNA, 779 bp, Homo sapiens
  misc_feature (426)..(426): n is a, c, g, or t
tatcagttgcttcacgattttcagaactgggagatttactggtgtaactgggtagtcttctgatggagaaaaaccttattttctttgtaagagctgggagcaaacacgttatgagtgtgtcggaatcccggtgcttcaaaatacgctctgtaaattacttgttctagtcttattttacaactgtctcattgtagtcttgtcttcaactattttatccagaaaataaacctccagaagaacagtagttttcattgtacttagctcatgttgttggtttagtgagtagtcgcgtatggatttggccaaagtaaaaaggcaaacaacatgacatttctatttggttgttaacagcagaaaatacttcttgggggagtaaaatgttgctggaggcattaggcaattaaatatgggcattctcctatttcntgtggcccgtccctgaagttacatgttcagtagagacacaaaaacaccgccaatgccatctcaaaagcacctgcttggggagcgtcggggtgaagagctgtgggagtcggaggggacctgcccaggggtcccgtgtgactctctggagtctctcaaaagacacaccagggggtccaagaggccaccacggaataaacgtttatcaaagtcaacacaatcagacatttatagctgacggaaaggaccttttagtgtatcacacttcttgattaattgtgggcatttttaagaacatttaccaagggctgggctgggcccaggtgctccagcctggtatacaggcctttggaagc

SEQ ID NO: 544825 - DNA, 962 bp, Homo sapiens
  misc_feature (27)..(27): n is a, c, g, or t
ttctaatgtgcccacgcgccttgtganccctttctacacatagttctgtcgccgatttcgtttccttgtcggattccccatgccctcgtcctccttggagtccttttcttccgtgatagatgccaactgtggggctaacacctgaggagatttgcccccaccacggccgtatatctgccccccttgtgggggccccccatcccgaaatgggggcgttctacacaggccgtgtgtgcaagccgcccacccgcgtgggacggggagcccacaatattcgattttcctcgtcggggatattaccgccgttcctttccatcctaccgccagcggtctttctcccccgccgccctagatctccccgggggtatctttgtggccaagaggcgattacttggttgaatggcttttcaacaaccgcccgtcttatcaatagccgcccaggtcgtccacccactactgttgtgcccacctggccccccatccacgatgtgtgggccaccgcaagggtccttatttttccgggctgtgggcgcaataaccctggatactactcagggccgagattacccaccatggtgctgcccactgccgctgaggggttccctggctgaccccgcggttaacattggataaccgctctcccccctttgaagatttacccccccaaaaagttctgtctcggcgctccccttaggagaggccaagaatccctcccaggtgaatttccgagcggcccctgtggtgtctcccatggaggcgagccttccaggagatatttgttcccccgggggctaagtagcgtgctccccacaagagaacgccctgggtcgtacaccaccaagtaggtacccacaaataatgggctcggcaataagccccacgacgaactgcccaccaccgaaacccccgggccctctctccgttttttaacccaaaaaaaaaccccggttttcccaaaaaaa

SEQ ID NO: 544826 - DNA, 400 bp, Homo sapiens
caagctggggcttaaagttatgtaaaatctgatttaagtttttttcctttccaaggaaaggcccctgaaaggaggggacagggagcttcctaggtctgtttataaacaaactgatgctttgtcaagtcttccaagttttccctgtaaataaaacaaccaacaaggtaattttgctgttttttaataaagaatgaatgaatatattaatgtattccatttgtttcatgataaaacagttttccctgaaactgtgaaatcctttttttcctttttagccctgcaaaaaaccctactaaataaatcattttaaacatggagggcaggtggaccctgtgtgaactgtttttggtcagttattgtaaaaattgataaatgtcccaaataaactttatgcccctta

SEQ ID NO: 544827 - DNA, 280 bp, Homo sapiens
accttgttcgaggcagtgtgatagtcatgaggtcataggagtagttaggaggaaagttaatctataatgaagatcaagttgaagaggaaaagcatcttttctggagccctagtcttttgcaacattttacaaaacaatgtaggtaaagaaaaggctaatctataatcagaggaacaaaggttacagctgcctaggttacagctgcctaccacatgactcagcctccataatcacattcctttaaggctcaaagtaatttaaagttccaacaacattgatt

SEQ ID NO: 544828 - DNA, 200 bp, Homo sapiens
ggggcatttaacagtatttaatcaatttctcattctattacatatgtctacttctataaattatccacatatggcataatttctaagaatattttcacaaagatgttcactgcattatcatttgtaattatgatcacctaaaacagattgtgaaatctgctttataaaatatctgtgagttgattgggttgacgtcaggt

SEQ ID NO: 544829 - DNA, 192 bp, Homo sapiens
  misc_feature (106)..(106): n is a, c, g, or t
cactccaccttaccaccagacaaccttagccaaaccatttacccaaataaaagtataggcgattagaaattgaatgctggcgcaatagatatagtaccgcaagganaagatgaaaaattataaccaacataatatagcaaggattaacccctataacttctgcataatgaattaactagagataactttgca

SEQ ID NO: 544830 - DNA, 356 bp, Homo sapiens
ctcccgacacatcgagaattgagtcctggatagacggcagtcagaactgccattccagaatggaaccatccagttgttaaactactaatctagcccaaatcctgactgccctcttagtcggctcttgcgtgtgtgtatagcaaatgctgtaaggaatgctaatcgatgtgccaatttcatggactatcctactttgaatgagacagaaatacagtctattcctcttctggaatatgtagttcactatgcgtgccagaggcccagatcatgaaacttgttgagagttacaggctgtccagcttaaggaattagtaccagagtctcatcagataaccttgtctcacagctattgcaaa

SEQ ID NO: 544831 - DNA, 274 bp, Homo sapiens
  misc_feature (2)..(2): n is a, c, g, or t
  misc_feature (156)..(156): n is a, c, g, or t
  misc_feature (183)..(183): n is a, c, g, or t
  misc_feature (205)..(205): n is a, c, g, or t
  misc_feature (213)..(213): n is a, c, g, or t
  misc_feature (249)..(249): n is a, c, g, or t
cntctgcgcgcagtgggcgagatctcaatcagccccaggctgcaggtgaggcttcaggggatgctgggccccactgcccctccgctgccttgccctccatccttcctctgttccttctggccgggcaccacagcactggggtcaccgctgccttgncctccatccttcctctgttccttctgnccgggcaccacagcactggggntcacctcntggttgatcctcttgtactgggagaggtgccttttntatccccaattaaaggtagaaaacc

SEQ ID NO: 544832 - DNA, 611 bp, Homo sapiens
  misc_feature (122)..(122): n is a, c, g, or t
ccacctgaccgtccctcctctggctcctacagcctctccacgtctctgcccggctgtcccgagccatgaaccactcggcacacttccacttcacctgctgcctaccccgagtccaagacccncgtaaccgccaccctctcaaaatccggaaacacattccggcccgagctccacctcgtgcgccgccgtcggaggagctggccctgaacgagctcgtgacgctgcactgcctgccacgcgcttcagccccaaggacgtgctgcttcgctggctccaggggtcacaggacctgccccgcgacaactacctgacttgggcatcccgcaggacccagcagggcaccaccaccttcctgtgaccagcatactgcgcgtggcagccgaggactggaagaagggggacaccttctcctgcatcggctgccacgcaggccctcgcgctggccttcacacagaagaccatccgcacgctctggcgggtaaaccccaccccatgctcacatgtgctctgcttgtccatggcggcaggtggcacggcacctgcctcactgagcccgccgcgcctcgtccccccaccccgtgcaataaacagtcccatgctcccccccacac

SEQ ID NO: 544833 - DNA, 523 bp, Homo sapiens
  misc_feature (52)..(52): n is a, c, g, or t
  misc_feature (262)..(262): n is a, c, g, or t
  misc_feature (299)..(299): n is a, c, g, or t
  misc_feature (342)..(342): n is a, c, g, or t
tattatcaggtccaaatcatagtttcttttatcatcaaaccagtagccatgntttttctaattctgtttttcagcttctggagccaaattttgtacacctctggctgatcgctcttaaattatcttctgaaatctctttcagtgggacgacagagatctgactgacaagctttaatagcagcatttcttacagcattatcagcaaggtggtttcctgtagcctcaagagtctaaccatggccaggcacaatggctcataccngtaatctcagcactttgggaagccaaggtgggcggancatatgaagtcagaagttccaagaccagcctggcctagatggnaaaatcccatctctactaaaaatacaaaaattagccaggcgtggtggcgcatgcctataatcccagctactcaggaggcagacaggagaacagttgaacctgggaggcagaggctacagtgagccaagatagcaccaccgcactctaccctgagcaacagggtgagattctgtaacaaaaa

SEQ ID NO: 544834 - DNA, 171 bp, Homo sapiens
cactacggctgcgctgttctgcagcagccgctggcggtcgaataccctcagccaacagcatgccggcgggcacggtctggaaagactggcgcgatcgcaagggcgagctgttccaggcggtgcgcatggagaagaacatgatggggctgctgctcagcctgatcgtggcgg

SEQ ID NO: 544835 - DNA, 353 bp, Homo sapiens
gacaacagagtagacccggtctcaaaaaaaagacaagggggtagaaaagggggtagggcatttaaagagatacagaaaaggcaaggcagaaaaaggaaggagcccagggttcagagtctgggcttaggcatcaaacagatacaggttccagggccggctgatcttagcaagttctggattccaacttcttgggaaaaaccgacgggttaaatggaggtaagtgctacaaagggggtagacacgtgtactggtgggagatcggtaacctttaaagggactaatcagacagagtaggtgcttacggacatctcacggacccaggaatctggcaggtaagcagctctgcaacggct

SEQ ID NO: 544836 - DNA, 1330 bp, Homo sapiens
agcggggtggacggatataatttacaacattttagggatagtatctaggtagcctgctgtagtttgactatccagtacactgtatgttctatatcacatatataatattgtatatattctatgtagatagaagggatagactgcaaatatagtaacttaaagtagtacaccagatattctagtttgaaagatccttcaggttttgaatataaaaaaggccgaagacagtatgggtgaagtctaacatttttgtggtttcttcatttttcttacagggactggcgctgatgatggctctggataatctctcctactcttttaaacctaactaatacctagaacctatattacttctaaccactgacctttagctatatatacgactgacttggtgacaaagcggacttactggctggtaaaaactatctacttttactctataaaactcttaagacttggtacttcgctaagacttaatgtgcccaaggagctcttttagaagaaaaacctctactaaggcgcataacttgaccaaaagggtcactgatcgacactatcggctacgactactcaactgcacttacgaaccaggtaaaagccttaaccggattactcctggactcttaactctggacttattcgctagacaaccacttaagctacagaactcttggaaacacttcttaaagactcaaactggggagggggcttactactgtccggaaactctaaactcaggactaacctctactcacaacgcggcttaaaaacgggcgacttaaaactctcttttaacggcggggaccttctcttctactttacggtccttaaaacgcggccttaaacttgcacggctaacgggcctgaaacctccttgaaactggcttccttactcggcttttcccttcctaccttacttactcacaacgctctggcaccccacgaccgcgccttaaatccttcgtggactggcccctagccggctgcgtggggcaaaacaattcttcttcttttccctgcgtgacaaaccttaccctgccttgaccttcctgcagcttctccttcgtatgccctaggagaacctctttgccttctgtcctctatgaccaaaggcgggctctgggccttatacctggcgttcctcctgagacctctcttgtgagggctttagctctctgggtcttacagacccttctttacctggcccttctctctttcgcgatcctccttttcggcgcgttgacgccgctctgtgtgcccttcctgttccccctcttctaagactcttgggggcggcggggctcgttaaacattcttgcctttagcgcgg

SEQ ID NO: 544837 - DNA, 462 bp, Homo sapiens
gctcgctgatctactccagctcccgagacaggtctgagcgcagctatctccaccttcagccctatgcggtagcgctcgagctccagctcctcctaccagctcctacgaatacgtagcctaaagctcctatgagctactaactgcagctaggctagccgagggcctagtacatacctcaataccttgcgtagagagcatatacagctcaaagtactattttatttcagccgctcatccagctagctagctttgtcattctccaggtccatgatgctctcctgggtcagctacaggtcgccctccagctaccgattcgctcgctccaggtccaagcgcacctacttctcttgctccagggatccttccagatcatccacttgctagtccaagttgattatggactaagtcagggtgagaccttgtcctcctcggcctagaggtcatccagagcctgtaggtggg

SEQ ID NO: 544838 - DNA, 877 bp, Homo sapiens
agcaaaaatctgcataatgcaacaacacagttttcacacttcaaattttacatgaggggttcttcacgattctcctggaacccagtctagcaaaatgagaggaaaggccctagggagatttatttctgttaaatagttaactctgctgagtatgacaaatagtgtctactatctcaaccctccaaaatttgcagagtgttgggactgtcatttgtgatttttttttttttttttttggggggggtagttgaataaaatggggcagctaaattttttcagtttcctatgtgcctcccaaataaaaaacaggaaaataagctagttttggtgaatggcacttgcagaacaaagtaaaaaactgtgctgcatgatgttatttggtaacacagatgcactttttctgaccggggcacttgccatccaattttctgtcaatcacactgttgttttaacgcagcagaactgagggggaaaaatgacttcgttgtataccctgaatggcttggcagggtctcattggagataatggatgtaagaatcctgactttttatattgggaacacttcaattaacatgggcaacatgacaacacacaaccacaacaacaaaaaaacgacaagatcaacaagcggcaagcacaacaaaagcggcggccgcacgaacaacacctaagaagcacaccaatgatcgaggacaacgggcattatagcaagaaaggccccaacaagagcgacatacagtaaccagcgggtcataaaaaaccctgagggagaacggacagagcaactcagggagccaagatgcgggcagacccggagacacccagcaaacagaggcaaagagagctggcaaccgaagccaggagtacatcacgaac

SEQ ID NO: 544839 - DNA, 544 bp, Homo sapiens
  misc_feature (1)..(1): n is a, c, g, or t
  misc_feature (3)..(4): n is a, c, g, or t
  misc_feature (8)..(8): n is a, c, g, or t
  misc_feature (14)..(14): n is a, c, g, or t
  misc_feature (22)..(22): n is a, c, g, or t
  misc_feature (114)..(114): n is a, c, g, or t
  misc_feature (220)..(220): n is a, c, g, or t
  misc_feature (242)..(242): n is a, c, g, or t
  misc_feature (294)..(294): n is a, c, g, or t
  misc_feature (307)..(307): n is a, c, g, or t
  misc_feature (332)..(332): n is a, c, g, or t
  misc_feature (339)..(339): n is a, c, g, or t
  misc_feature (357)..(357): n is a, c, g, or t
  misc_feature (366)..(366): n is a, c, g, or t
  misc_feature (382)..(382): n is a, c, g, or t
  misc_feature (405)..(405): n is a, c, g, or t
  misc_feature (411)..(411): n is a, c, g, or t
  misc_feature (430)..(430): n is a, c, g, or t
  misc_feature (435)..(435): n is a, c, g, or t
  misc_feature (438)..(438): n is a, c, g, or t
  misc_feature (443)..(443): n is a, c, g, or t
  misc_feature (457)..(457): n is a, c, g, or t
  misc_feature (462)..(462): n is a, c, g, or t
  misc_feature (467)..(467): n is a, c, g, or t
  misc_feature (470)..(470): n is a, c, g, or t
  misc_feature (503)..(503): n is a, c, g, or t
  misc_feature (534)..(534): n is a, c, g, or t
ngnntgcngtgtgngtaggtangtcatgatcatcctctcttcagtgagactgagcctgatgtgtaacaaataggtgaagaaagtctggtgctgtatcctaatcaaaagacttantatatggaagtaacacttttttagtaagcaagatacctttttatttcaattcacagaagggaattttttggtttcatgtctcagatttatttggtatttctttttnaacactctacatttccctggtnttttaactcatgcacatgtgctcttggtacagttttaaaaggtgtattaaantctgacatgtcantgtggctagtttaattttcctggtntggcatnatgtgtatggccggaagngtgggactngcaaaaggggaagaanggaatggcgaatacttgtaaaangtcacnagacattggtataattttnatcanganatcangttttgctctgatngtccngaaangtnctaaatactcttattttgaatgcccaaaatganttaaaccattcatatcatgtttcctttgcgntcagccaatt

SEQ ID NO: 544840 - DNA, 280 bp, Homo sapiens
  misc_feature (80)..(81): n is a, c, g, or t
  misc_feature (237)..(237): n is a, c, g, or t
taaatcataatgttcaggctgttgccaggtttgtgcaatattttctctaaacgttgtcatccactcatctgcgttagaannaactttaccaacgctgattaactgaataaaaacaaaggaaaagatagcgacatatttactcacgttcatttgtgaccataaaacatttatcaaaaatctactactagcatagcaaagctacaattaacataaccttaatagacccagcataaggantaatctggaatagctgctctatttatttccgcttgttcaagtt

SEQ ID NO: 544841 - DNA, 562 bp, Homo sapiens
aagaacaaacagtgtatcaagttgggttcatatcagaaatcagcataccaaacaactgcatcgtataggacgtttgcattcagactgcctaatattcctggcttcaaatcttactcacagtatatattattagagagtttggtaagtgtaacaaatgggtactcattgctagagcaggatataagaatgtgctgatcaccaagtatgagatttacattacattaaattaaaattatataatgttggaaatagacaatatagggagtacccggatcctagaaaatattatggctaaggaaacagagaactcaagaaatgaatctacctccaagaaactaattcagtatagtaaaatagaattaagtgccctgtctcaggaaaaagtttattaagaataaggaacaagtgggacatcatacatcgtttctttggagattaaagtgcaggctatgaaatggcatataaaataatgcataaaatagtgcaatcttaaggtgccattatctttattacacatagcctagttttatgtccattttctctcatagatccagctgtagtg

SEQ ID NO: 544842 - DNA, 210 bp, Homo sapiens
agtgactttaccaaggtaggtatgagcctggatcataaagagcctgagtccacataagacgaaagtatgaaccgggaagcgttggaatttatgatgtgatgtgatgtgatttatgttttaaagatatcactggtgctactactatgtaaaatgcgcacagtaagggacaagcatgtgaaatagacagtaaaggaggttattagggttagt

SEQ ID NO: 544843 - DNA, 973 bp, Homo sapiens
agaagggccacgccgaaggcctcccggcaagcttcggggaaggaccgccaggacgaaccccgctgtgcgcaggatcaccaccggtggactccccgaccctcgctctggcccacccaaaagattactggagaggaccacccgcggccagaccgggcactaggaggacgtgcaaagaccgccatcgccgctaggggtccactgcccacaagagcgaatataactcagtcatgcatacaacagacccggcaaccctgtgcgtcaccgccattcacgaagctagggattgacaccattatccagaaggcgcttctcgcggcaaggcacgggaacgcctgcaaagaggggaccggcaaacagccccgtgccatcagctatacgtcagcttctctaaccagaaagagttcgtatgctgtactgcggaggttagcaagctggacgcggatggagtgctaccaagtctggacgaaacggctggagaccaagccaggagaaccacaagcctgcggcaggagctgggcgtggatccggacgacatccctgtgacctcgcgccatgccctcacccaagcgctctaccgcatccagaccagccaccacagtgtgctccctcaagcatccaggatcccacctagctgtacagtgccgtcaaagctgagaggaaggattcttatgaaccccgcaccagacccgcgtaaaggcgtgctggtggatcacagtagcgcggctgctggctccagtcacgaagacaatgagagactcccgcacagctctctcggatcccttggaacaccttcttaagttcataacctgtctccagacctgttacctttcaaaacatttgcttggagcttcagcgctggaagctagaaagccttgcaactgccgccaaaatgtggtcctggagatcagcaactgaacatcatattcgaagcctccgttaaagagtgcactgtcatacctaccgaatcagatgt

SEQ ID NO: 544844 - DNA, 145 bp, Homo sapiens
gagactgagcaggcgctctagctcgcgcgcccgctgcatccgtggagaccgggcgccagcaacatcatgctggcaattacagaaggcttcgctgctcgtcaacaaccgttccgaccagtaattgacgacgatccgacctttcgag

SEQ ID NO: 544845 - DNA, 260 bp, Homo sapiens
  misc_feature (198)..(198): n is a, c, g, or t
  misc_feature (206)..(206): n is a, c, g, or t
aagtagcttggactacaggcgcccgccaccacgcctggctaatgtttgtatttttggtagtgacagggtttcaccacattggccaggttggtcttgaactcctgacctcaggtgattcacccacctcggcctcccaaagtgccgagattacaggcatgagccactgcatccgggcgtgggttctaaattcttaatatnctcatcancatttattgctgtctttttaattttagcctgtaatcccagctactagggcgact

SEQ ID NO: 544846 - DNA, 351 bp, Homo sapiens
gggtttttttttaacccccccatttccgggggggcccccccccccttttttttttccccttttggggccccggggggcccccccccccccggttttttcctggggcgggggggggggtcttttttttccccgggggcgggttttcccctttgcccctttcccaaggttttttttgggcccctttttgggggggcccccggggggccggttgggttttttcggggggccccccggggggcgagggtttttcccccccccttttttttttaaaaagaaaagaggaggggagaagggcagaaattgcggggtaaatccaaaattaaaaaaaaaataagtccacccaagttaata

SEQ ID NO: 544847 - DNA, 91 bp, Homo sapiens
gctcacacatgcacaggaatgtggagctacagcaaaaagccagcagtggtccgtggggagtaagagttaataaacacactcacgaaaagtt

SEQ ID NO: 544848 - DNA, 304 bp, Homo sapiens
tacctcatcacagccggaacaacaaaaagtgaacagcatacatggcgaaacacccgtgacagagcaatcgtggggttattcatggtcgccggcctgaaggtatcggaagttgcatccctgactgttaattgcatcaacctaaaagacggtccctggataaacatccgctatccagactcgcagatttcgcaccgcacacgacctgtcgagtgggctgttcaattgctgaaggattggctggccatcatggcagcggctgggactgatggagatctaacgttttcaacagacgatgcttcgcggt

SEQ ID NO: 544849 - DNA, 1036 bp, Homo sapiens
  misc_feature (73)..(73): n is a, c, g, or t
agttgccttagcagcgattcgtatgccggcgcgagccctaggtaagttacattgtgaacagtcgcgtgcattngcttcgtatccttcactgggatcttcatcgagtctatgagttaggctcgactgttgcattcttctcctatatctatacaagactcgaccggcgtcgaacatattctgatcgcgtacatagaaacccagtccacggacttggacgttcgtgcacgcgatcagttttacccgtggggaagtccgtgactcagagcgaagggcagggtcacaggcggcggaaggcgtgctgactagtcaaagactcttaccgacaccgccgcgcacctggggggacgagccatgctcggacccttccgtggaaattgaacccttgcctgaaccggggacaggaaacattcaataaacgggggggaccaatgggagaaccaggcgttttgccctaccggaaatagggaaagcccccaggaactaacaagacatcgccacggaaggccacctgtgcaacatccaactttcaatccgggttacatctgagggagacggggttggcaccttgtccaagcggcgaaaagagcgtctaagtgcctcggcaagcgaacgggaacattcttcctctcaaacggtactcatgcagctagtggaggaacaaggaccccagggtattctggcacacttgagcgagggacagaatttttcgactttctccgctacattacgccaacttcagtttgaatatggctcgacttggtaggaccccccgtgaacgttcgtccaggcatccctgagtacggcccccgaggagcttagagaatgtatgcaaagattaggcgacacccagaaataccttccgaggctaacaacttttgggcaaaaactcttcccccgaccccttcaccccgggcgcgttttaacaaaacagcccacaattatcacggagacttggacccttaccaagcacaccgttccgccagagcgagttcgacagcctgagaggagaacctgaaacaaaagggcctgccgcacg

SEQ ID NO: 544850 - DNA, 928 bp, Homo sapiens
gcacaattaacactgaattgctgaaagcaggaaatgtatgccctttactgtgctgctgttgctgctgttgttgctgctgttgttgctgctgttgctgctgcggcaggtgctgctgctgctgctgctgctgctgctatatggtcttcttagatttgtacttattgtactctcttcattcaacccatccatgttagctctaaggaggtttgaataacgccatctgaaaccttacttcacttccttggagctcaccaacagtgctcgatcttcttcttacccatcggtagctcttaacaagacacttgctcgtctgcgggctcaaagacctccacagtaccttccttctggaactgggtttggttcgaccgtcatacttctacaaggctgatatagaccgctgccgacgctccggcaccttctggaacacgtctggtccagctccgtcaggaactgctcgctctccaacaacagcatcgccagaacaagaactgtatctgaaatccaacgcaggcaacagcctgagccaagtattcagaagaaaactgcccctgaggcatgcgtcagaagacgtacttctcccagccacctgcagacaatagctccagacagtacaggaagacctcgacgggaccatttctagggcactctgtcgaccagtaagactcttccaacccagtggaagctgattccagttactggggataccaactcaatgtagtccacgcaaccagcttcacacagcccggaccagagtctaagcctccaatctccagatctccacgcaaaaacagacactcaaccaggatccacacacctgcaagaaaccaccactacactattccctccacaaaggggaaccagaagcaacccgagcaggcacgtgaccccaggtgaccatgaaccccccaagaacgcggccaaccctcaa

SEQ ID NO: 544851 - DNA, 619 bp, Homo sapiens
agcgggggtctggcggctagcaccggttcgcggtcggcgcgagaacaagcagggtggcgcgggtccgggcgcatgaagctgggtccgggccgtgcgtgggcctgctgctgctggcgcccgtcccctggtgcagcggtggagcccatcacctgggactgcctggcgggtctcccggtactctaccggcgtctctactgctccgcgatcgcgggcgaacggagcttaccgggaggcctggaaggatctggacgacaactcttggacagcatctgcaaagaaaatcatcttaaatgctggttggtttcataaaaaccaagccaagaaactctcacgctctccctgcacgggtggacaggcaccggaaaaatttcgtcagcaagatcatgcagagaatattacgagggtggtctgaacagtgactatgtcacctgttgtggccacatgactttccacatgcttcaaacatcacttgtacaaggatcagttacagttgtggattcgaggcaacgtgagtgcctgtgcgaggtccatcttcatatttgatgaacatggataagatgcatgcaggcctcatagatgccatcaagcctttcctcgactattatgacctggtggatgg

SEQ ID NO: 544852 - DNA, 437 bp, Homo sapiens
agtatagactcttagaagaaaacctaagagaaaattctcgtgactttgggttaggcaaagcttcttaacaaaaacaaacaaacaaaatagacaatcggactttatcaaaagtaaaaacttttgtttcaaaagacaccatcaagaaagcaaaaagaggctgagtgtggtggctcacgtctgtaatcctagcactttgggaggcccaggcggacggatcacgaggtcaagagatcgagactatcctggccaacatggtgaaaccccgtctctactaaaaatacaaaaattagccagtcatggtggcacacacctgtaatcccggctacttgggaggctgaggcatgagaatcacttgaacctgggctgcggaggtagtagtaagctgagatcatgccactgtactccagcctgggtgacagggagacattctctctctc

SEQ ID NO: 544853 - DNA, 328 bp, Homo sapiens
tgctgaggtgatctagaggatcccgcaggaacagggttcggtggggtcatctgatgatggcgtcgtgagatctgacgtcttcaaattgaaagagttctggagttctcaagagggatcgtagaacttgaaggggtccagggcggcgggggcgagccggttcttggggtacttcttcttggtaatcctttatgggcttctcgatggcgcagttgggaggggcccgcacacgctccttgaagggttccagctcgtcgttgaagccctccatgtactggggaatcgggtggcttaatcctaggtgaagaactggcggaagcagggccggggg

SEQ ID NO: 544854 - DNA, 130 bp, Homo sapiens
atggatgtaaacagaccccaacattttttcaggatgaggcaacttccctttgaaggttccccctccaaatttggcatttatttattagatggcaaataaaaatgagcaacattttcctgcctagggaaga

SEQ ID NO: 544855 - DNA, 1374 bp, Homo sapiens
ggcactctccatccagctgtgcgctctcgtcgggagtcccagccatgttcgacgagagtagaggtagccgaggcagcgaccggggagagacgcctcttcggctgcctccgtaataaccgaggcagtcgtagcgactccccaggcatcccgcggcctccgacacggggccgtcgccgccggcgcctcgccgtcactgatgtgctgcctagtgctcaccggctttggaggctacgtacaaggtgaagctgcagagccggccggttagcgcaccctcggaacctctgtggcccggcctagcttgacgtctgctgtcttgcgggtcctgcgtggcttcaacttcgacagacgctcatggctaggcatggaggctgtacgacctgtctcccgccttctgccttgtcattctccgcggcatggcgcagggccgcggcgctgtgtgtgaatcgcagtgggcgaggcgagtcagcgcgaccgtgaaggtcaggagacccgggatgatggtgtttgaaccggctgcaggcgattctggcaggcaacgaggtgccttgttgctcctcggaatccacgagcctttcccctggagttcgcttggagcggccattgagcgcttcttgacgcggaactgcttagctttgctcttagcaaccgctccttattcctaccgtttaccctagccctactcgttggtccctgctaatgaactttgcagcgtcgatccctactcaagtcgcatgcgtccaacaaagccgcccctaaggggtaacactcattgcggccttagcccaaggtgggggttggctgagcggttacttaccgcccttgtccctgtcgcccaaccccttgggttgcccccggataacaatgtcgtgacgacgggagaacctggcttgcaccaaggatgttgccggggcactgactgcgctcgttccacgaccacatgccggatgtgccacacccgaaccggcaactatgagaccgcgccgtaacacgtcgggggatagcacacaacaaggttccagcgcaaattcgacatcgtatatctacacacgcccagacctggaacactaagcgtgtgccgacttggacgacctccaccgtgcagaggaagtatatcaccccgtatacaacagggtacagtcttggtcatccctcttggggtcctcttggctaatcccctatcctggaggacgtgcgggcataacagcacaataaccctgctccactgtggggtacagcaaagacgcctgcgcttgtcataaacacccactgcggcgcacaaacatgacacgggctacaccaatatgtgtgcatcatggccgcccagcccatacgttaactgtggcccccacaaaacggacaacgcctcgtgacatg

SEQ ID NO: 544856 - DNA, 173 bp, Homo sapiens
tccagggcctgaaaatgtttatcccatgcccaaggcagcacaaacctggcaaacagcagtaccacagggcaaagagggaaggcagtgtcaaatgaacccaggggggcggccaggcccaggccagcaggaggctcaggccaggggcacaaaagggggggtgaggtaggcagaag

SEQ ID NO: 544857 - DNA, 467 bp, Homo sapiens
  misc_feature (187)..(187): n is a, c, g, or t
cccctacccccattttgggagggcgttggccccacacgggatccccccggtaataccccctagaggtccccctcctaacccattcggtatattcggcacgaggagtatcaatcccctgggctccccttatgtttaataggaaccccccgaaaccaaataattcaagcccggcttatccacattttanggggttttttttttcccctcctccaacccccagaggatttggggtttcccttccccatttccggggggatttaggggtcaacattttttgtacccccaggtttccccggacttcccgtcattattgggtcaactttccccccaatttgttttacccccccaataatatttccctttacatcccaacatccctttggttttgaaccccccccctgaaatgggccttttgtaaatggggtttgactatttttgtatgtccccctctattgatgggggtttta

SEQ ID NO: 544858 - DNA, 1149 bp, Homo sapiens
  misc_feature (215)..(215): n is a, c, g, or t
  misc_feature (393)..(393): n is a, c, g, or t
  misc_feature (485)..(485): n is a, c, g, or t
  misc_feature (630)..(630): n is a, c, g, or t
gtctcttactttgaatgcagtgaaattgacctgtccggtgaagaggcgggcatgacacagcaagacgagaagaccctattggagcttgtaattttagttaagtgctgacacatgtacctaacaaaccctatcaggttcctgaaactaccaaaccgtgcacttatagaaatttctggttggggtcgaccttcggagcagaatcccaacctccgagncgagttactagtgtcgtaatgactttcgatcctagtgcagaagcgaagctactagtactccaattgagtccaatagacttgaccgaacgggaacaagttaccctagggataacagcggcaggtcctattgctagtgagagtcctatgatcgaactaatgagggatttacggacctcgnatggttggcatcgaggtgactatcccgaactgtggtgcagaccgactgtcattcaacagagttcgattggtctcaaaggaaattcagacagntccgtagcgtgatctgaggttcagacgcgggagtaatgccagtgtcgagtttctagtctaactgtcaaattccgtccgctgtacgagaaggtacaagtaggaaagtaaggtcctagcttgcacaaagagcgccgttccgccgcgntaaatgatactcgagtctcaacatgtagtcattatacgccacgagccatccaagaacagggttggtgaataactcaactgcatttaaaacaagaccacaagttccgggactgtctacgcggcgaagtgaaaaccgtagtgaagcaagatggcccagatgactgctaacagcggtcgggcagcagacccaatctcaccagaggggcgcacccaggaacagacaccgggtcacggggaagcaggaggcgcgacaaaccaaggggctggaccagagacagaaagggagacacaccgagggggcggagacccaagagcaaccctggacgcgaggaggcaagcgcacgcacacgtggacaccaccctacggcgaagacagcacccccacgggcgcggggggaccaaaatgagaccacgccacaagcaaagacagacactcggcgcagctgacaaacacagacccgaggtgacggagcaccacagccaggacgtggcgggaaaattgctcggccatcatacaacg

SEQ ID NO: 544859 - DNA, 279 bp, Homo sapiens
cgttctagaggatccctttcttgccacgattggtcactgtaactccgactcccaggttcatgccagtctacctgactcaccctctcgagcagctgggactacaggtgcctgccagcactgcccagctaattttttgtaattattagtagagacggggtttcaccgtgtatagccaggctggtcttgatctcctgacctcgtgactctgccgaatcggcctcccaaagtgctgggattacaggtgagccaccgtgcctggacttgattttcttttcatat

SEQ ID NO: 544860 - DNA, 135 bp, Homo sapiens
ggtgttggcggcctgggtgtttgcccattgggggtgggtcgcagtgtgcgggcttggcatggccatcagcgcggtagcgctgggctactggctatggctgcaacgtgcgagggcggccgaagccgccctgccgtg

SEQ ID NO: 544861 - DNA, 158 bp, Homo sapiens
actctactcatgcgcctaatagcacgcgcgacgctagcagtatcaactcatacaacgcttgcctctacacttatcatcttgacacatctctaattctaccgactatcctagaaatcgctggcgccttaatccaagcctacgttttcacacttctagta

SEQ ID NO: 544862 - DNA, 309 bp, Homo sapiens
acacggatgacatctatgcaataaggccatctacaaaccaataataagctggaagtagccagattcttaagcatataggctaaaatacttctaggcgcatgaccaccaaccaaaggtgaaggtagagcaacatgatggaatcttctggtgctatagtacaacttgtgtgaatagtaagtgctcagagagtcttttcttacctttgtaagagttggggtgctttatttggttgttgtgtatgtctccaaaggaacctttcatagttagtattatgcttaatatagctcagtataaggcagccctaattct

SEQ ID NO: 544863 - DNA, 450 bp, Homo sapiens
  misc_feature (367)..(367): n is a, c, g, or t
tgcccaggtggattgttaaccaaaggggtttaaaagccctcccattaaaatttaagccttttggattttttaaaaaaggggttgttctataaaaaaaaaattcttttaaacaatattacagagacgtggggaaaatttggttttttacaacacaatcaaaccggcacttgccgtttttcgccattaagggggggcctctgggaaaaccccttttgcggggccttcgggagaagggggcctctgggtgcttgaagtgtaaccccttctcttttgcccggagaagaaaaattaagtcccgcccctggagtcccttgggccgaaatctagatagaaaacacacccctttgtgggggggggggggccgaangcgttggttatcatagagaaatcgaaacctgttggtaattaagagccagtcgttttttcttcttatgttaccgcgggtggggg

SEQ ID NO: 544864 - DNA, 670 bp, Homo sapiens
  misc_feature (646)..(646): n is a, c, g, or t
cacgtatcctgaaagactggagggccttcaaggctctcatcgctgctcagtacagcggggctcaggtccgggtgctctccgcaccatcccatgttccattttggccaagaccaaccgcacccctgaatttctccgcaaatttcctgccggcaaggtcccagcatttgagggtgatgatggattctgtgtgtttgagagctaacggccattgcctaactatgtgagctaatgaggagcatgctggggaagtactccagaggccagcgagccctaggtggtgcaggtgggtgagcgttgctgattccggatatagtgccccctagcctagtacctgggtgttccccgaccttgggcatcatgcatcacaacaaacaggccactggagaatgcccaaggaggaagtagaggcgaattctggggctgctggatgcttacttgaagacgaggacttttctggtgggcgaacgagtgacatcggctgagatcgacagttgtctgcgagcctgttgtggctctatagagcaggttctagtagccttctttgccggcgaggccttatccgcaatagcgaacctgcgtggttcctcgaccgtgcgattaaccgagccccgagttcgcgggctagtcttggaggggaaggtgaaanctgtgttgaagaatgattggccga

SEQ ID NO: 544865 - DNA, 479 bp, Homo sapiens
gtgtgcagggcaggtgggctggggttgggaagggtggatgccttggggaggggatggaagagattgaactcctggcccaagtctgatggggatggtgcatggtgcagcccctgcccttctttgggtagaggctgagagcttggggtcccttagagtcctctaaggggctcacgactgtttgtggaaggtggtaggggcttggagctaacagattgttcataggttctattctgccccagctctccgtgtggaggccctagggtcctgctcagcatagctctcagagccaagtcacaaggagaggactgggggactgcctggcacagagcagttgctgatcaacacagctgcagccagggctgagaagatgacaagcatttcctctgtcaggagagacatccatgccactccagggccctccccatcccaggaaggcccctccaagcacccagtctctaacacagcccacttcctcacag

SEQ ID NO: 544866 - DNA, 224 bp, Homo sapiens
ggcctgtgaggtgcagggagagcatttgctgtgtcaattgaaccactcactggttttgtgacctcagactttggaatggagctggaagctgtcatcctcagcacactaacgcaggaacagaaaaccaagcactgcatgttcccacttataagtgagagctgaacgagcagaacacatttacctatgtaacaaaccttgacatcctgcacatgtaccccggaact

SEQ ID NO: 544867 - DNA, 683 bp, Homo sapiens
catccctgcacagatgaggaaagcaaggcatggagcagtacccagagtcgaatctagatctcatctgtcatccgggtcttatcctttgctctgttatatctcgtatcgaggctctgggaagatagtcagatcgtgtgacttaattcttccgtctccctggacctcacccatgttagttgctttttcattcctgcgtcccatacttaagctcctgctcccactgaccctgatcgcgcaggcccaggcttgtacaaccgggtgctcagacttccccatcagtgaaaaggggtggcgtagagtaactaagctcagcaggtcgtccagtcctgatagtctgtggatttcggatccttctcaggaagcttcatgtctaatggagactatcattataacgtccatggtctgcatagagcatttgcatcaagaggctttccatacccctaccatcccctggtcctcataagatccttgaagcaggttgctattcctcatgggcgacatggcgaagcagatcacaggagtcgaagggccttgctcaaggtccccaggttcagtcccaggccctaagccagcgtcagaacagtcaatctgcatttttcatcagtcattctatagtgacatcatcccagactgccttctgtattcccctgtgtacagtctccttctgtttctaggtttagaag

SEQ ID NO: 544868 - DNA, 891 bp, Homo sapiens
agggctcggggcggcggcgggggcccggccgaggcaataagagcggcggcggcggagcggggggcagctcccgcagctcctgctctggtccgcctcggccccggcgggcgggccatcagccccccttcggcctcggctcgagggggcggggaagcctgcgcgcgccccatcggtcccgaccgggaaaacccttcccccttcccgggagcccccgcacgccggcacgccgcacggaacagtgggctgtgccttcggggaaacaaggtaaaggacccgaggtacccaagcgggcaaacggaaggaaagaacgggccgcaaggtggtgacgggccaaaccacaaaaaggattcgaagaaagcaagtctggcaagaaaggggacaaacagcaggtgtcttaccgcgggcggcctagcggcacccggccgtggcgtggcttggcaggggaggttggcctggggaaccacctctgggttaaagagggccacccaattgtgttgaaccggcaggagtgcaggggcctcctgcgccatttgtttacaagggggtttactaacgggagaaaagggtgagcgagaaatcaaggggaccccggacgagggtcgtgcaatcgtgacgcaaaccagcactgtcttggtaggaggaaaggggcaaacccaacaaggtggcgatggacatcttcgaacaagcaccgcgctggaaagagcagggcagactgtgagaacctcatatttgggtgggccgggccttgtagcaacccgtgggctgccccccgggggggagagctggcacaaacccgcaggagaaccaaggttcaaggaggggcgaactacccttccagtggaaggtggtgacgacacggctgccgtggtcatttggactttccgcctcccg

SEQ ID NO: 544869 - DNA, 381 bp, Homo sapiens
gccacctggagttgtgagctcatggaaatgctttacctgacttgtcaccactggatacccagtgctgcatctggtgcgtgccactagatctgacacaaagccagtgctcaataaacatcttaaattaattaacagaatggagggattagctcctagagtcaggcatgacggaaaaaagagctgcacttgtgagtgctttattccatgcaaacaatttgcatccggagatttatgaagctatatctctttctactttactactattttctacccctaaccataacgggtataggatggggcatataatccatggatttagtgaacttcccagctatcccaacttttaaaacaaagtccatccatctgagtatatgctgacga

SEQ ID NO: 544870 - DNA, 198 bp, Homo sapiens
tcacgcccactaggacgcagtcagttggagagtgcatagtcccgtctgtgaatacgactgccagattctggcatactccagctggtaacagagtgagactctgtctctcaaaaaaagtttcaatgttgactctctggacaagccaaaaatccatatttgtatataaggtcttaccattttaaaagattggcagctctt

SEQ ID NO: 544871 - DNA, 574 bp, Homo sapiens
cggaccatggaaacctgatccataatcagatcgcgtgtggtgctatagctgcaatataccaccgactaacattgatggccgaaataatgcatgtactcttggttaagcttaacaggagagagacacctttgctggctggtgcagttacagtgctattaccctatacttaacctgttagcagctctaacttgttcagtgtgccagtctcttcatttatggtgcattcagcaacatatatggcattctatactgttaacatatagggtgtctaccacaaacttgactattaccatctagagactgtatcctgcagattcagtcgtgataactgttagtactatacaaggtgaggagacagtattgtctttggaccaagaccgatgatggactgactgcgtcagtaccacttgttgtcagttttctagaagagagaaagcagagaagaacggactctcttttttcaaatgcacaaggataactcatataccaagtaggcaaaccacattgtgtggtgattactccacacaaagtgtgggttcccttttgcttataggggggggggacggctctcctt

SEQ ID NO: 544872 - DNA, 249 bp, Homo sapiens
tgttatggcgtggagagggagtgatgtcttccagattcggtgctgtactcgcctagcaggacccagtgcaccatacaggataatagtttccagtacactctccctcatgatgactccttaagtgttacatcgtctgcatcttcgagtaaaccacgtagtgattttccagcatcttaccgacaatctacctactgaatgcagactagaagaatcacgccagatgctacttctcatgtccaaaggtcaggt

SEQ ID NO: 544873 - DNA, 565 bp, Homo sapiens
cacgaggattttttttagagacagggtctcactctgtctcccaggctggagttcagtgacacaatcactgttcactgcagcctcaacctcttgggctgaagtggacctcctgcctcagccactggagtagctggggctacaggtgtgcaccaccatgcccagctaattaaaaatctttttttgtaaagatggggtcctgctatgttgcccaggctggtctcaaacttctggcctcaagcaatcctcctgcctcagcctcccacagtactgggatggttgggccttgggctgagaaggagacagggaagggtgctataggagctgtgtgatcctaggtgagctgtctgacctctcagatttgttctcatcaacagaatggggataatggaatctgcctcctgggactgtcacgagaattagatgagggattttggaaagaacatggcccacggttgagttccggagaggctgcttcctctctgggcgaccttattccacttctctgatcttgagtttcccaatctgcagaacagggggaaggaaaactgccccctgggactgctgg

SEQ ID NO: 544874 - DNA, 159 bp, Homo sapiens
ctaactaacaagaatccagataaataatttgagttagtggtaatgtaccaacattggttccttaacggtgacgaatttaacattgaaatgtcagacactggcaacatgacgagacccccatttcttacaaaaaaacaaaaaaataggggaaccggggtg

SEQ ID NO: 544875 - DNA, 245 bp, Homo sapiens
  misc_feature (159)..(159): n is a, c, g, or t
  misc_feature (197)..(197): n is a, c, g, or t
tgctatatcaggtggcggggaaatctgcctttctgtactgggcagtggcatcacgcttccgcaagacatgctggatgcttgggataactgcttgatcacgtctcagcaattgtcccaaccattttgagggtcactaccagtacaatgagcatccctgtnggaggacaaccacaatggcagacatacagctcctggtntcaacgaaggccatttgacttctatagactccatacaagaaatgctgg

SEQ ID NO: 544876 - DNA, 394 bp, Homo sapiens
tcggggctgagacagccctggcaggcagttaccaggacggtctccggaggcgggattcgcggagggtccaccagcaggaagaaaccccaggaggaagaaacctcagacagatcgccggggaggcagcgcgggatcccagcctcaggcgtgcgcggacggtgtgcgggtgagtctccccaaaagtggcgcccttgttgatgtcgaggacaggtctccctgtgtgcccgtgggctgctgtctcaccggtggctcgtagtcgcggagaccagaaacccggcagcttcaggggctgcctggggggtggggtgttacctgctgtatgtctgtgtccattaatgggtgtgtgtgtgtgtgtgtgtgtgtgtgtgtctgtgtgtctgcgtgtgtgtgcgcg

SEQ ID NO: 544877 - DNA, 735 bp, Homo sapiens
  misc_feature (385)..(385): n is a, c, g, or t
cggtacctctccctacggtatctagggaacgtgaggaccagatgtagtcagtgctcgggaagggatgggacaagacaggcaccagaaagccactggaattctaggcggcttcctgcttattctgcgtgcttgcacttgtttgtttgcttctctgtccagagggcaggaggaagacaccacctctcagcaaccagtgtgtatcaagtccatcccagacacagcccagattcaacctgaccctcttagcacaattcccaagtctctgagtaatccaccaacacttatatagtgtacatggtgggtggggctccttcgggtgagtgaagggaggtaattagggggatacatctgaattaggaagccctcctttctcccttcttcattngtctgaatcagactggaaggacagtaggatatacgtgaagagagaagatatctcgattgaacagtaagtgcttcagagtcaaacacgaagggaacatatatggaacagtatagatcctcctggcactgagggggtgtgaaccccaaatatctgagactactctcagttaatttagaaagtttattttgcctaggttgaggatgcatgcccatgacacagcctcaggaggtcctgacaacatgtgcccacggtggtcagggcaggggttttttcattaatttttgaaacggagtctcactcttgtcgcaccagtgcactccaccctgggcgacagagcaagactctgtctc

SEQ ID NO: 544878 - DNA, 779 bp, Homo sapiens
  misc_feature (20)..(20): n is a, c, g, or t
  misc_feature (22)..(22): n is a, c, g, or t
  misc_feature (25)..(25): n is a, c, g, or t
  misc_feature (393)..(393): n is a, c, g, or t
ctcttcctttgatctcaganangangcctcccaaagtgaggtttctggggagaatgagggcaacttgccatccccagaggaagatggtttcactatctcatgtcccacgttgcagttcctggatccccagaccaaagagacacagtcaccacacctctgagagaagtcagtgcagacggcccaatccaggtgaccagcactgtgaaaaacggtcatgctgtcccaggagaggatcctagggggcagttaggcacgcatgctgaatatgcttctggactcatgtctcccctcaccatgtccctcctggagaacccagacaacgaagggtctcctccctcggagcagctggtccaggatggggctacgcacagtctagtggcagagagcacaggnggcccagttgtgagccacacagtgccatctggtgatcaagaggcagccttgccagtgtcttcagcaactaggcacctgtggctgtcctcatctccccctgataataagcctggtggtgatcttccagctctgtccccatcacccatccgtcagcacccagctgacaagctgcccagcagggaggcagacctaggagaggcctgccagagcagagagactgtacttttctcccacgaacacatgggtagtgagcagtatgatgctgatgcagaggagacgggctggatggctcctggggtttcccaggaaagcccttcaccacatacatatgggggtacccccattctggacctacactcacccacgaacaggaagtagtgatgtgc

SEQ ID NO: 544879 - DNA, 454 bp, Homo sapiens
ctatgtcaagatcacaaggtataacaacctaacataaattacattttattttaaaataaaaattttctcatagcataacatttttagtacaacattttcttataacaaataaaagcagacaaatcacaagtgtatgagctcagtgaatgctcacaattgcataacctccacttagatcaaaatatagactattgctagcaccctagtaattccttgttctttttcgtaatcattatctgtcttttttcaaatttatccactatcttggcttctaagacatagattggctttagccttttaaaaatataaacattttaattaaagtgtaacaaatatacaaaaagcacccaaatcataagcacacaaccaacaaattttcataaactgaacatctatatctaaccacgaccaatgatatgaaaaaccatcgttgtatttcaactacaagaaccca

SEQ ID NO: 544880 - DNA, 208 bp, Homo sapiens
taactaggatacaggctcatgccacataagcccatctaattgaattgttatttaagtacagacaggcttcaccatgctggccaggctggtctcaaactccagacctcaggtgatccacccacctcgacctcccaaagcgctgggattacaggcatgagccactgtgcctggtctggattacatcttaacctacaatatttcatgaagt

SEQ ID NO: 544881 - DNA, 872 bp, Homo sapiens
  misc_feature (20)..(20): n is a, c, g, or t
  misc_feature (22)..(22): n is a, c, g, or t
  misc_feature (25)..(25): n is a, c, g, or t
  misc_feature (393)..(393): n is a, c, g, or t
ctcttcctttgatctcaganangangcctcccaaagtgaggtttctggggagaatgagggcaacttgccatccccagaggaagatggtttcactatctcatgtcccacgttgcagttcctggatccccagaccaaagagacacagtcaccacacctctgagagaagtcagtgcagacggcccaatccaggtgaccagcactgtgaaaaacggtcatgctgtcccaggagaggatcctagggggcagttaggcacgcatgctgaatatgcttctggactcatgtctcccctcaccatgtccctcctggagaacccagacaacgaagggtctcctccctcggagcagctggtccaggatggggctacgcacagtctagtggcagagagcacaggnggcccagttgtgagccacacagtgccatctggtgatcaagaggcagccttgccagtgtcttcagcaactaggcacctgtggctgtcctcatctccccctgataataagcctggtggtgatcttccagctctgggccaggagagaaaacatcctacaaggcttggttggcaggagttggtttgtccacagaccccatcaagttgccctgcaacagttgaaaatgtcaccatggctcaaaacccaggccgatctcaaggtgcttagcaaggccaagttctcccttggttacccaagtgtcttccaagatggcgggacactccgttcagcccaaccctggagcaaggcgccgcagggtgtcatccgagcacaccaggacagcgtgatgaatgggtgacctcggttcagggaggagagcctgatagacacagtggtcttaatgaatggaagattgggccaggtggtaaacagggcggaacacg

SEQ ID NO: 544882 - DNA, 170 bp, Homo sapiens
gagggaacgcactactgggaggggatttacacttgcttgggtcaagcgtatctacataaaaacctgctatgggcaaaaactaaaaggcatacttcctctttctcctttcatttcatttgatcatcgccttcaaaacatagcctataaaattaatcccatgcccttatcat

SEQ ID NO: 544883 - DNA, 117 bp, Homo sapiens
aaagtaggaaagttactgagcgtgaatatttttgacgagattttaatgtatccaatcaaggtaatcagatgcttcttcttttaaggcgagggtaattgtcgttccccgtcctagagt

SEQ ID NO: 544884 - DNA, 951 bp, Homo sapiens
  misc_feature (1)..(1): n is a, c, g, or t
  misc_feature (15)..(15): n is a, c, g, or t
  misc_feature (810)..(810): n is a, c, g, or t
  misc_feature (818)..(819): n is a, c, g, or t
  misc_feature (834)..(834): n is a, c, g, or t
  misc_feature (853)..(853): n is a, c, g, or t
  misc_feature (855)..(855): n is a, c, g, or t
  misc_feature (872)..(872): n is a, c, g, or t
  misc_feature (932)..(932): n is a, c, g, or t
ntgaatcggccgagngcgggacggagcttggctgttggtcggtgggttcccgtgcggcggcggccaaggaggaggagacacagttggagcagctccgtgggctgactggggcgaggcctcagcagcgcgagcttgagtgcggccgagcctgcggcgccttcccctgcgggtggggacgagcgggccccgcggcgtcatcggcggcgaggagccgccgcgcctcggcctagcatgtcggaagcgggctgaggagcagcccatggagacgacgtggctgccacctgagaactggacatgaagtgcctgtcccctgaaggctgagtcgccgtgccggtgtgctggcactggtgctgcctgctgtgctggggtgcttggaggcgcgaccgcggcgccccccgagccgggaatcagaacggctgccgaggggcgaccagatcaacgccagcaagaacgaggaggacgcggggaaaaatgttcgttggtggcctgagctgggatactagcaaaaaagatttaaaagactattttactaaatttggagaggtcgttgactgtacaataaaaatggatcccaacactggacggtcaagagggttggggtttatcctgttcaaagatgcagccagtgtggagaaggtcctagaccagaaggagcacaggctggatggccgtgtcattgaccctaaaaaggccatggctatgaagaaggacccggtgaagaaatcttcgtgggggtctgaatctgaagccatgaggaaaagatcagggagtaatttggggagttggggagattgagggcattgaattgcnaatggatnnaaagttgaaaaaaanaagaggttttgtgtttatnanctttaaagaagaagaanccgtgaagaaggttttggagaaaaagtttcataatgttagtggaagaagtgtgagataangtggccaggcaaagaagtt

SEQ ID NO: 544885 - DNA, 148 bp, Homo sapiens
cgaatactagaattcaaccagtatatactagggatgactgataattaggcagagggaaatcatacaataataattgtctccaaaggatctgctagtaactgaggacaagttaacaagtggtcttaaatttcacgtcctccggccatat

SEQ ID NO: 544886 - DNA, 839 bp, Homo sapiens
  misc_feature (1)..(1): n is a, c, g, or t
  misc_feature (15)..(15): n is a, c, g, or t
ntgaatcggccgagngcgggacggagcttggctgttggtcggtgggttcccgtgcggcggcggccaaggaggaggagacacagttggagcagctccgtgggctgactggggcgaggcctcagcagcgcgagcttgagtgcggccgagcctgcggcgccttcccctgcgggtggggacgagcgggccccgcggcgtcatcggcggcgaggagccgccgcgcctcggcctagcatgtcggaagcgggctgaggagcagcccatggagacgacgtggctgccacctgagaactggacatgaagtgcctgtcccctgaaggctgagtcgccgtgccggtgtgctggcactggtgctgcctgctgtgctggggtgcttggaggcgcgaccgcggcgccccccgagccgggaatcagaacggctgccgaggggcgaccagatcaacgccagcaagaacgaggaggacgcggggaaaaatgttcgttgggtggggccccttggaaggccttgggggggaaaattaacctaaggcaaaaaaaaagaatttttaaaaagactattttactaaatttggagaggtcgttgactgtacaataaaaatggatcccaacactggacggtcaagagggttggggtttatcctgttcaaagatgcagccagtgtggagaaggtcctagaccagaaggagcacaggctggatggccgtgtcattgaccctaaaaaggccatggctatgaagaaggacccggtgaaagaaaatcttcgttgggggtctggaatcctgaagccacttgaggaaaaagatcagggggagtacttttgggcgaagttgggggagcaatg

SEQ ID NO: 544887 - DNA, 923 bp, Homo sapiens
  misc_feature (1)..(1): n is a, c, g, or t
  misc_feature (15)..(15): n is a, c, g, or t
  misc_feature (297)..(297): n is a, c, g, or t
  misc_feature (301)..(301): n is a, c, g, or t
  misc_feature (316)..(316): n is a, c, g, or t
  misc_feature (320)..(321): n is a, c, g, or t
  misc_feature (339)..(339): n is a, c, g, or t
  misc_feature (350)..(350): n is a, c, g, or t
  misc_feature (359)..(359): n is a, c, g, or t
  misc_feature (369)..(370): n is a, c, g, or t
  misc_feature (384)..(384): n is a, c, g, or t
  misc_feature (395)..(395): n is a, c, g, or t
  misc_feature (401)..(401): n is a, c, g, or t
  misc_feature (782)..(782): n is a, c, g, or t
  misc_feature (790)..(791): n is a, c, g, or t
  misc_feature (806)..(806): n is a, c, g, or t
  misc_feature (825)..(825): n is a, c, g, or t
  misc_feature (827)..(827): n is a, c, g, or t
  misc_feature (844)..(844): n is a, c, g, or t
  misc_feature (904)..(904): n is a, c, g, or t
ntgaatcggccgagngcgggacggagcttggctgttggtcggtgggttcccgtgcggcggcggccaaggaggaggagacacagttggagcagctccgtgggctgactggggcgaggcctcagcagcgcgagcttgagtgcggccgagcctgcggcgccttcccctgcgggtggggacgagcgggccccgcggcgtcatcggcggcgaggagccgccgcgcctcggcctagcatgtcggaagcgggctgaggagcagcccatggagaagaagggggcaaacgagaaaggaaatgaggnggtncccgaagggagttgngggnnggggttggaaagggggcngcggcgggggntggaggggngaaggggggnncccgagggggaatnagaaaggggtngagggngatcagattaaagaaagaaagaaggaggaggaagagggaaaaatgttagttggtggcctgagctgggatactagcaaaaaagatttaaaagactattttactaaatttggagaggtcgttgactgtacaataaaaatggatcccaacactggacggtcaagagggttggggtttatcctgttcaaagatgcagccagtgtggagaaggtcctagaccagaaggagcacaggctggatggccgtgtcattgaccctaaaaaggccatggctatgaagaaggacccggtgaagaaatcttcgtgggggtctgaatctgaagccatgaggaaaagatcagggagtaatttggggagttggggagattgagggcattgaattgcnaatggatnnaaagttgaaaaaaanaagaggttttgtgtttatnanctttaaagaagaagaanccgtgaagaaggttttggagaaaaagtttcataatgttagtggaagaagtgtgagataangtggccaggcaaagaagtt

SEQ ID NO: 544888 - DNA, 1151 bp, Homo sapiens
  misc_feature (1151)..(1151): n is a, c, g, or t
gactagttctagatcgcgagtggccgccctttttttatttgttttacacctttaaaaggcgaatttattaaagttaaagaacaattcgtgtattatattaataggtgtacaatagtgttcttattgtaaggagtgtagaaataagggaaaacgtggcctctcagagtgaaaacaggaaatgggtgtcgtgagcagtataatagaaagcgatgtgtccctttaacacgagggagctaaaaatattcaaatttctccttttcaagacacgatttctcacaaatttatttctcgtggtgtccaataattctccactgtacagcttcaacacacgccacatagaggcacttttagtgaaataaccgcttccgcctatatcactatattgcagagatatatatcacatattagatgggctaaacacttgtgcggtggacacccgaatcctaagaacaccttaaaatacaccaaatttcccaaactatgggttgtgacactgtgtttgaaaaaaagagatctttaatcgtatagacacaatatacaccccacccgtcttgtgtggacagagcccattagaccactatattgtcgtggaccacacggacttgtggagaaaactcacaccgcgtggtaatcttcctagacagcacatgttacaaatctcgttaccattataacgcaaagcaaccctctcacaagagtgtgggcctctacaagcgtgcgcttgagcgagaacatttgggaaagcctattgtgcttgtagaccagggggccaactgggttatatatccacatggggtgcgaatacatattaaatgggcgtttctccaaccgcagggccactattcattatgggatgggatcacattcattatatctctaaatcttcaacgaaaggttacatgtgttgaggagcacgacatatacgggcatttacgacagaatctaaaacagggatgtccacttcactgaatcatgggaattattgtagatacgccccactctggggaacaacgaatttcaccgtcatgcaaacttgtgggggaagcctaccttggggcacttttaacagtgggtggggcgacacaactatgtccctcaccaggtgcaacaacggggagtgatgacatgcctctagaaacgattttaccaan

SEQ ID NO: 544889 - DNA, 223 bp, Homo sapiens
tctagaggatcctacatgatgctccacgctcccgtgcacagcaaactttggcctggatttccaggcattttcatacatcttctgaaatctaggcggaggttcatgaacgttaattcttcggtgcatctgcaggcttaacaccacctagaacctgaaaggcttggaacttgcaccctctgaagccatggcctgaggtgtaccttggccccttttacctgtggca

SEQ ID NO: 544890 - DNA, 796 bp, Homo sapiens
  misc_feature (1)..(1): n is a, c, g, or t
  misc_feature (15)..(15): n is a, c, g, or t
  misc_feature (735)..(735): n is a, c, g, or t
ntgaatcggccgagngcgggacggagcttggctgttggtcggtgggttcccgtgcggcggcggccaaggaggaggagacacagttggagcagctccgtgggctgactggggcgaggcctcagcagcgcgagcttgagtgcggccgagcctgcggcgccttcccctgcgggtggggacgagcgggccccgcggcgtcatcggcggcgaggagccgccgcgcctcggcctagcatgtcggaagcgggctgaggagcagcccatggagacgacgtggctgccacctgagaactggacatgaagtgcctgtcccctgaaggctgagtcgccgtgccggtgtgctggcactggtgctgcctgctgtgctggggtgcttggaggcgcgaccgcggcgccccccgagccgggaatcagaacggctgccgaggggcgaccagatcaacgccagcaagaacgaggaggacgcggggaaaaatgttcgttggtggcctgagctgggatactagcaaaaaagatttaaaagactattttactaaatttggagaggtcgttgactgtacaataaaaatggatcccaacactggacggtcaagagggttggggtttatcctgttcaaagatgcagccagtgtggagaaggtcctagaccagaaggagcacaggctggatggccgtgtcattgaccctaaaaaggccatggctatgaagaaggacccggccatccagcctgtgctcctnctggtctaaggaccttgcttccacacttgcttcaatcgacgtaacaggataaacccaacac

SEQ ID NO: 544891 - DNA, 877 bp, Homo sapiens
  misc_feature (1)..(1): n is a, c, g, or t
  misc_feature (15)..(15): n is a, c, g, or t
  misc_feature (816)..(816): n is a, c, g, or t
ntgaatcggccgagngcgggacggagcttggctgttggtcggtgggttcccgtgcggcggcggccaaggaggaggagacacagttggagcagctccgtgggctgactggggcgaggcctcagcagcgcgagcttgagtgcggccgagcctgcggcgccttcccctgcgggtggggacgagcgggccccgcggcgtcatcggcggcgaggtgagcggcggcctggcgggcgggacgctctgtgctgggatgccgcacctggcctgacgcgctgtcgccgctggtttgcaggagccgccgcgcctcggcctagcatgtcggaagcgggctgaggagcagcccatggagacgacgtggctgccacctgagaactggacatgaagtgcctgtcccctgaaggctgagtcgccgtgccggtgtgctggcactggtgctgcctgctgtgctggggtgcttggaggcgcgaccgcggcgccccccgagccgggaatcagaacggctgccgaggggcgaccagatcaacgccagcaagaacgaggaggacgcggggaaaaatgttcgttggtggcctgagctgggatactagcaaaaaagatttaaaagactattttactaaatttggagaggtcgttgactgtacaataaaaatggatcccaacactggacggtcaagagggttggggtttatcctgttcaaagatgcagccagtgtggagaaggtcctagaccagaaggagcacaggctggatggccgtgtcattgaccctaaaaaggccatggctatgaagaaggacccggccatccagcctgtgctcctnctggtctaaggaccttgcttccacacttgcttcaatcgacgtaacaggataaacccaacac

SEQ ID NO: 544892 - DNA, 493 bp, Homo sapiens
  misc_feature (154)..(154): n is a, c, g, or t
  misc_feature (171)..(172): n is a, c, g, or t
  misc_feature (296)..(296): n is a, c, g, or t
aaacctccccctcttctcctttttgcatgccaccagtggttaaagttttaaagtgtttacagatgctgaaggcaagggaaggagcagaagcacttatgtttcgggatttttaaactctgttagagagcagcctttgaaaatccccatttggttntgctttttgcctctctnnacttttcaagggtaatctttgtggcacaaacgatagcatttccaagctttagagttttctgaattcctgcgccttcctgacgtgagccctgagcgatcttttatacagttttcccaagcgcccnggtggtctctctgtgttctttgttacttgggggcaatagcaacttccctaccccgggcattccatctttcatgttgtgtaaagttcttcccttttttctctaagggctgggggttgggggagccagcatgattattttttaatgtagaaaatgggccctctggaaataaaatgaaaataaatgttaaattaaatgga

SEQ ID NO: 544893 - DNA, 341 bp, Homo sapiens
gtcaccatgggtgatcacgcttgcagctttctaaaggacttcctggccggggacgtcatcgctgacgactccaagaccgcgagcatcctcatccagagggtcaaactgctgctgcaagtccatcatgccgttcagatcaatgctgtattactatcattgtggtagggtaacctggacaacgtgatgcggaacttatccaaccaagctcacaactctaggttctaggactacttccagcccttctgactaagatgatccaatatgtattagccctgatgacgctatactggacagaacctatctttcggtcgatcctgtgatgccctgccttagctgtggct

SEQ ID NO: 544894 - DNA, 270 bp, Homo sapiens
  misc_feature (209)..(209): n is a, c, g, or t
caaacgtcaagagggtttccctgcatctttgaacaggataaacccaaaccctcttgaccgtccagtgttgggtttatcctgttcaaagatgcagccagtgtggagaaggtcctagaccagaaggagcacaggctggatggccgtgtccttcttcatatgccatggcctttttatgggtcaatgacacggccatccagcctgtgctcctnctggtctaaggaccttgcttccacacttgcttcaatcgacgtaacaggataaacccaacac

SEQ ID NO: 544895 - DNA, 331 bp, Homo sapiens
cccggatcacaccaggcatgctctcacctcagggcctttgcactagctctgtttctctccactggaacactcttcctccagcagtctatgtaatttacccttacctctttccaatctttgctcaaatgccacttcctcagtgaggcccacctgaccaccccatttaaaatagtaaccccgccccaaatctctggatcaccttcaccttgctctagtttctttttgcccacaacacttactacctcctaacatgttttgtaatttcgtcaaatgtattgtgtttattatttaggatttgtctctctccattgaaacagaaggtccaggtatg

SEQ ID NO: 544896 - DNA, 183 bp, Homo sapiens
agtcagcatggcgataaacaaggggtgccatgggtagctagagttcttcaaaagtgtccacgagcaacttaaaacatcacaagtcttctttccaattgggagcacctgagttaaagtggggatgcatcaaatagatcattaaaactgtcgatttctcgttgtgcagcaagcaccatgtctcca

SEQ ID NO: 544897 - DNA, 637 bp, Homo sapiens
  misc_feature (637)..(637): n is a, c, g, or t
tgatacctaccatatctatgctcaggaggtgctaagctgttgaatgggctggtagtttgcctccatagattctagtcacccattcttcccactgctaagtttgcctttcagagataatgatatctggtatgcgtgtctgtgtgaagagaccaccaaacaggctttgtgtgaggaacaaggctgtctgattcactatgggtgcaagtgggttgagtccagaaaagagagtcagtgaagggagatcaggagcaggggcagccttcatagggcttgagtaggcagtggaaagttcacagttaaaggtggttatttattgtcagccggggagggggtcccaaggtgcatggtggagagatcttgggactcattgtccagaagaagaatgtcacaaggtcgattgatcagttggggcagggcagaacaagtcataatggtggactgtcgtaccgttggtcagtcagttacggccggagctgtttcacttctgtggttttttagctggctcctgcaggccatctggccgtctatatgcaggttacgggggttacaccggctgagcttcggctcagagcgctgacaatatccagaccatgatgtgcccacaatttggctgagggcacccctttggacatcggcn

SEQ ID NO: 544898 - DNA, 310 bp, Homo sapiens
  misc_feature (7)..(7): n is a, c, g, or t
  misc_feature (18)..(18): n is a, c, g, or t
  misc_feature (26)..(26): n is a, c, g, or t
  misc_feature (31)..(31): n is a, c, g, or t
  misc_feature (44)..(44): n is a, c, g, or t
  misc_feature (70)..(70): n is a, c, g, or t
  misc_feature (99)..(99): n is a, c, g, or t
  misc_feature (153)..(153): n is a, c, g, or t
  misc_feature (159)..(159): n is a, c, g, or t
  misc_feature (264)..(264): n is a, c, g, or t
  misc_feature (268)..(268): n is a, c, g, or t
  misc_feature (271)..(271): n is a, c, g, or t
cttatgnccttcagattnttaattgncctangtaccctaaaacngtttttaagtggattgcccgtgaagnagggtcctgttggttgagcacaagggaancagagagctggatggagccattatctcagacttaagtcaagcgctgattgaaanttctcntgtcccaaactcctagtggtcctgcactcaggagatagggaaggtcgctgacgatactgagtcttttccacagtgcttgcttcctttttagcagcctcagatggntccnctncctaaactggggctgtttctctccttctcaaccctaatt

SEQ ID NO: 544899 - DNA, 109 bp, Homo sapiens
cccacacatataacaggactcctcacaccaattggacaatctatcaccctatagaagaactaatgttagtataagtaacatgaaaacattctaccccgcgttaaactcg

SEQ ID NO: 544900 - DNA, 138 bp, Homo sapiens
ctaagtccgtgaggtacacacataacagatgggagattgtttgtctgtgtcttaacagagtcacagattctgtgccttgagagatagatctaaatggacaaggaagatacaatacaaggttcacaattcctgtgtaaa

SEQ ID NO: 544901 - DNA, 560 bp, Homo sapiens
  misc_feature (51)..(51): n is a, c, g, or t
gcactaggccttagactgattactttaatattttataaagaataacaagcnatataagccatacaccatattttttaatacaaataaaaatttcaagaatatattcaaattatttatttataatgcactttcctcaaatttattattatttgaactattgtctaaggatttaaatttttgtttttttttttaaaatgcaatctcccatgctagaatataataaccacattatgccactacactccatcctatacaacatatctaaactctatatcaaaaataaataactacatcaaaaaaaaaattatttaagtacattttccctacattttacaaattatcacactaatcactttctacttaccctcttcacatacaaacttaaaaaagttttataatcactaattacccatcaaagactatttgtcatatcaagacttttttaagcctttaacaacttttataaccacatctaatttttttaaaatccccaattatccaataccaactttacctaacccattaaattctcttttctcaatcaatttgccttttttcgc

SEQ ID NO: 544902 - DNA, 90 bp, Homo sapiens
  misc_feature (32)..(32): n is a, c, g, or t
gagaaccacgggctccatcctggcctcctgtncaccttcgaacagatgcggattagcaagcaggagcacacgaatcaagcccctccagcc

SEQ ID NO: 544903 - DNA, 541 bp, Homo sapiens
  misc_feature (414)..(414): n is a, c, g, or t
tctagaaggatccccggtcccatgcacagttggtgttgtgtccccatctcaagtctcatctgcatttatagcgtcccataattcccatatgtgaggggagggaccgggtgggagataatggaatcatgggggcagtttcccccatagggtgctcagggtagtgaataagtctcatgagatctgatggttttataaggagttttccttttcacatggctctcattctctctggccggcggccatgtaagacatcgttctgggctacctggtacttcggccaggatggtgaggcctcccagagccagagggatgggtgagtccattgaaacctctttcctttataaattacccagtctcgggtatgtctggcagcgggagaccagactaatacggggtgacatgaagagttacggncaaacgagggtggaaccataggccggatcgataaaacataaaaaggcttctaaggggggaggatggctggagtgcagagtccaagaccagcctgggcaacacagtgggacccggtatctacgaaaaa

SEQ ID NO: 544904 - DNA, 354 bp, Homo sapiens
  misc_feature (335)..(335): n is a, c, g, or t
gcaccgggcgcaacagagccatatttctcttctttcaaaagcaaatgggagaaagatcgctgaattccattttctcagcaaggaacgcccctgagaaagagaatgcgtccctgaggccagccctctgaaatgcccacttggcgggcggctgtattttacaaccacagcatgcgggcggattacaaccgccggcggtgtagcgctccccaggcttattaggatgaggaaattcccacctaataaattttggtcagaccggttgtctgctctcaaaccctgtctcctgataagatgttatcagtgacaatgcatgcccaaaacttcattagcaattntaatttcgccccggtgacc

SEQ ID NO: 544905 - DNA, 167 bp, Homo sapiens
tgggtccagcaatgtcctcattcgaggcgtggccggggggcttggttccctcaccagcagcaaattccggttgcacggggttagcagggtacagcgcggcgccccggacccctgcacggtgacgggtaattcaaattgtggaggaaaatccgggacgttggcagcca

SEQ ID NO: 544906 - DNA, 260 bp, Homo sapiens
ggcggaccctgtacgctcagccactaaaaacatgtactgaccatgtgctccgtgccagctctagtgagcagcctcgggaggtttcattctgacttccctcgtgatcctggcatgtgggagactactccttgctaaggagagtccaatgcctgggggagtagaaaaatctcattcccagagtcagaggacaagagacatgtaccttggaccatctgatccttcgctctcaatgctagccatgagggtgggagcgctaagga

SEQ ID NO: 544907 - DNA, 580 bp, Homo sapiens
ctcaacgctttatacattcgaaagcgaggacaacactcatacttggaaagcgagggcaacactcatacttggaaatcaaggacaacactcatacttgtgaaaccgaggacaacactcatacttggaaaccgaggacaacactcatacttggcaactgaggacaacactcatacttggaaaccgaggacaacactcatacttggcaactgaggacaatattcatacttggaaagcgaggacaacactcatacttggaaagcgaggacaacactcatacttggaaatcgaggacaacactcatacttggaaatcgaggacaacactcatacttggcaactgaggacaacactcatacttggaaaccgaggacaacactcatacttggcaaccgaggacaacactcatacttggaaaccgaggacaacactcatacttggaagtatagggcgttgaggaagtataaagcgttgagctcaaggatttatagttcagctgcgagcagatccagctaatttggatagtgtaagtagctatggggttcaccgtgtaagccaggatggtctcgatctgctgagcttgt

SEQ ID NO: 544908 - DNA, 187 bp, Homo sapiens
gtcatcattatgacatgcagtagagattgagaatatgtacaccggattggccgcaccgggcgtctcgagacaatcacaggcatcgccactagcttcatcaacaacgcgtgtgatgagtcagtgctgatggacctcaaagcgctgttgctagaagcccaagcagaaggtgccgcccgtgctgcaggtg

SEQ ID NO: 544909 - DNA, 255 bp, Homo sapiens
catgtgtgtgcaatgatatgactgtgtccagaacatctcccgcctacacatagaaacctggggtctcctccctgtgctcgatcactgtgtgacttcaggcagaggtcaccaccctctctgggccctttcattctctgctatggactgagtgggaacagctggatcaaaatcctcaaacctcatacacacactgtcagcagcttttcctgtatctgcctgttaccgtcgacactattacacagttttctttaaatc

SEQ ID NO: 544910 - DNA, 368 bp, Homo sapiens
  misc_feature (353)..(353): n is a, c, g, or t
agaggatccccacgttgacacttcagtacaagtttaaaaattttagcagaaagttaaaaagtaaaaacaggccaggcaggatgtttcacccctgtaattccagtactctaggaggccgaggcagatgaatcatttgaggcaagaaacttgagaccagcctggcccacatggcaaaaccctgtctctactacaaatacaaaaattaactgggcatggtagcacatgcctgtggtcccagctactcaggaggttgagacagaagaatcgcttcaacccgggtggtggaggttgcagtgagccgagattgccccactgcatttcagcctgggcgacagagcaagacaccatctcanaaaaaaaaataagta

SEQ ID NO: 544911 - DNA, 89 bp, Homo sapiens
tgaacagccagacatgagggacacattttttgagttcatgggtattcagacttttcaactgggttttgggtcgacgcggccgcgatttt

SEQ ID NO: 544912 - DNA, 337 bp, Homo sapiens
gtcaaaaggacaagaatacgttcaagacacaggaaaaaactcctaaaacaccagaaggacctagttctgtagaagacattcaagcaaaaatgcaagcacgtctagaaaaaggtggttctcttccctaagtggaagccaaattcatcacttatgtcaagaattgcttccggcatactgaccaagaggctattcaagactctctggcagtggacgagaacgtctctttaagacaactacgtttcaacactatgtataaaaaattttccgtcttatttcactttctgtacaattgatatctggctgtcctttatataatgcagagtgagaactttcccta

SEQ ID NO: 544913 - DNA, 199 bp, Homo sapiens
gcggcatacagcacaagacttcttcacctatatgttacacatcagagctccgtctcactgaagagaggatgaatcatgacctaaccttagcagccacaggcaggcaactagtctgtgcatggatatggtacaacgtctgtgaggtattacaatacataaatctttattacgtgttcactcaagccagcagtggaagtaa

SEQ ID NO: 544914 - DNA, 478 bp, Homo sapiens
  misc_feature (374)..(374): n is a, c, g, or t
  misc_feature (380)..(380): n is a, c, g, or t
taatgtttgatgttgacagtaaggacccaacactgggaatgagttgtccgcccccagcatttgtggagcaatcttttctacagaaggttaaaagcatcttgactcctgaaggtgtttttattctcaaccttgtgtgccgagacttggggctaaaagactcagtgctggctgggctcaaggcagtgttccccctcctatatgtccggcgaattgagggtgaagagaatgagatcctgttctgtcagctgcaccctgagcaaaaacttgccacatttggggataacaattaaacccaggctttggaacggaccctgaggaagcctgggaggcgttaggatgacacgtatgtcttgctcagatatgactccagacgntgcaantgtgtgactgcgttaagccaagtcaaccacatcctgcctagctgacatattaatcatcgggacacagcctgcatggtaccgagctcgagttgtatagt

SEQ ID NO: 544915 - DNA, 583 bp, Homo sapiens
  misc_feature (388)..(388): n is a, c, g, or t
  misc_feature (456)..(456): n is a, c, g, or t
  misc_feature (553)..(553): n is a, c, g, or t
  misc_feature (565)..(565): n is a, c, g, or t
taatgtttgatgttgacagtaaggacccaacactgggaatgagttgtccgcccccagcatttgtggagcaatcttttctacagaaggttaaaagcatcttgactcctgaaggtgtttttattctcaaccttgtgtgccgagacttggggctaaaagactcagtgctggctgggctcaaggcagtgttccccctcctatatgtccggcgaattgagggtgaagagaatgagatcctgttctgtcagctgcaccctgagcaaaaacttgccacatttggggataacaattaaacccaggctttggaacggaccctgaggaagcctgggaggcgttgggcagcacagtaagtcttgtccaaaaagttccagagggtgcccaattgtgtgtntgttcggacccgaagcattcctcctgccatgaaattccaattaaccgcctagcgctcctaaataaaanaaaaaaaagaacccacattacccggatatgttttatttttttggtttacacattcactacatgtgacctcccagtttggtggaggtcgcctgtaagnttagggaaaaanaaaatatacttccccaaa

SEQ ID NO: 544916 - DNA, 265 bp, Homo sapiens
  misc_feature (189)..(189): n is a, c, g, or t
  misc_feature (229)..(229): n is a, c, g, or t
  misc_feature (242)..(242): n is a, c, g, or t
agatatagtggaccatctcgtgaccggcgatatatgggtatactatgaagaagattatacaaatgcatgggctgtgatgataacgttgtagatgtggtcgttacctagaaggttgcctggctggcccagctcggctcgaataaggaggcttagatgctgtgcctatggactccatgcccagtgcgccgnaatagataggtatacgtgttccagatgtcttatgtggttntgtacgagaatcnaatcgccgtgtcacgagcgggac

SEQ ID NO: 544917 - DNA, 310 bp, Homo sapiens
gcccccccctttttttttaaaaaaaaggaaagggaaattttttaaggggggtttccaattttttcccccaagccaaggcccctgggttttccttttggaaattaacccccccagtttttttctgggggggccaaaaaaaaagtaactaaatttgctttttttaaaaaaggggcaacaaaaaatttttccccccatttttaaaaaaaaaaggggaaaattaattttccccgggggcccccccaattgaagggaatttttttgggggttttcaaaaaaggttaaattttaaaaaaaaaaaatttttttttta

SEQ ID NO: 544918 - DNA, 1136 bp, Homo sapiens
  misc_feature (1136)..(1136): n is a, c, g, or t
gccatcatgatgaactaaacttctggaaccacacaacgcaggtaagttctccctcccttaattggctctgtcagacacgttgtcggatactccgtttggtgtgcctccttctggacatatcctccaaggagatggctctcagagccatcccggtcccggccgattcacagcagcttggctcctaagagccttcattcagagacatccaaatgcccaccagctgatggacagagacagtgactgacctctccgtgcagtggcaatcggccagctacccgggtccctcccagcctgcagcacagcctcagctctttccagcaccaccagctggcccctcctctgagaatgtcactgctagaccccacagtcacacacactcccttcagccttctcatgaccactccatgggagggctctccccccacctcccccctctatctccactcctgcctgggccacaccaccacaacactcaaacagcttttgcgcttttgcaggtttcggcacctcctagctcatcagggagcccaaggctcttcctgtcttagtggcaccttctcccccttcctcctgtttacccagcttggccaccttgagcctcacctctcctctccttgtcttacccctggaagacttcccaatccctagggtgagtattcccaactttggcatacattctgcagaattccaactttccaagaggggccctgggtgtctaactgaagggccagaaactgtgtccattacggaccggaaccggaccggtctttccgaaggaacggcagagttgcgcgggcccgaggaaccacaggggaaatcctagaagaaggcaagttctcccccgtgagttgtgcgcatgcgctcacacagggagagcgacacacgggggccaacccccgcggggggggacacgaggggccatagataggcacccggaaagaccacacggacaagtgatgctacccccgcggaatgaaggtgggcgggggcacacgacagagatgtagtgatgaggcgagcaactaacaggaagagaggaggaggaggagccaacaaaagcgcgacgcgacagcggcgaagacgaaagctgaacgagagagacaaaccgacacggtggcaggcaacgaccagagatn

SEQ ID NO: 544919 - DNA, 979 bp, Homo sapiens
  misc_feature (128)..(128): n is a, c, g, or t
tgctgctggtgtatgaacggattgtgtctgggcccggcggcccacggtggcgcgttagatctgtgatcggtgaaccccccgttgtgtgtacagcccctgtgcacaccccggggccggtatgcgccgcntctttatattttgagcgcccctttatatctcaaagcgtgtggttcaaggccagggcacactttttgcggggacataaccattgaaaggaagcacgtgatataattgcgagagtactgccctgtggtccgctttccgtttccaaatgtgggggatcccaccccgcctgtacttcccccaatatggaggaaaaaactcttcctgcctgctgtagtagaagccggtcctccgacacgtgcccccaagaatggtcgttcgtactacgaacaggatgttgaaggtccgcgaagaatcgtccccgaaaagagttcgtgaaatacattcttctgtcaatagcatgaccccgtgctccacttacagagataattctctgtcgcgccccccctgcccgtctgtcaacaagaattctggcgcaggcaagaattgtgggatactatatgattcctccctgtaacggaggactggacgctgtatcgcttcttggcgcgcccaaccacccatggacgccactaccttcttccaccaccttgcgttaagagaggagggagtatatactcctcacaaacccttcttctgaataattagagtgcccccccgcgagtcgtctggtaagaagactggagcggcttcatcgaccattgacgggtgatgaggataataatagtcggcccacacatttcttcccagagggatactcttcgagatcgcatggtagggtatcaactcttactttctgagataatataatcatacacagccggagagttctttctgttatatagcaaataatagtggcccccaacacaactttgtccccacaggttcaaaaaaaacccctttcccccacataaca

SEQ ID NO: 544920 - DNA, 778 bp, Homo sapiens
agcggggggataaaaaattgtaatggtaaagttgaatatcttgtcggctttgtgttcgctcctgatattcagtgagcaggagggagtggcactcagtgagtttcttcactcaccacaagctcggtgagcgggagggagtgtaacagctcttttactcctgccatctgcagcttggttagcaggagcatgactgctctttcactccgcacatgttctacgaatgttcttgatgttctctgtttgcccaacctaatgacagacataatggttacatgaggatcatcacgtagaagtcgatgtaagggcaaatttagaatctgattggacgtcgagtgagtaaaaaagctctcagataagtctctcaaggcgagctaggtggagtacgccgaaaaagagcggttggcctgctactgtggaaggctaaggtcctggggctattataagggctctcagaatggggtgcaatgtatgagaatccatagtagtgcggcatatgtgaaaaacggcaaccattcaagttgaggttaaaaggggaattcaatacattcggatatcatataggagacgagacgtcgggttaatgaatcgagagactcgaaagttcttcgatgactgaggtcgtcggactgcgtaatctcggaacccttggacagtctatgagttctgtcagaggctttcaggaagatagtccttttgatcgcatgaacgggtcagagttctcaatgcaagaggaacccttggtccactggttcatgtcactattgaaacttgggtcatg

SEQ ID NO: 544921 - DNA, 176 bp, Homo sapiens
tttttccggaaggtcccctttgggaaaacttattgttgtgacctgaaaatgttaatttgaaaatgtggggcagggacagtgacatttttgtagtcccaaatgcacaaaattatgggaaaaaatgttgatttttaaacagtgtggcgcgcttttttaataatcctttaatcttggga

SEQ ID NO: 544922 - DNA, 337 bp, Homo sapiens
ccgagtcataatcacattcctcgttccacgctgcttcgaaagacgcagacccctatcactaagggccaccttatttactaactccttcaggccacacacctcccagctaaagcaggagttatacactggttgaggacatcgaacaggttcagatgaaatctcgaggcaacagaaagggcgatgaggcagcaaaagaagcctccctttcttctggctctggccctctcctttcctgtggtcccagcaatcctacccaagaaattctccaccgagaaagctttggtatacagcaaggaggctcctttcaaggggactggatggtcagaaatctgtagag

SEQ ID NO: 544923 - DNA, 121 bp, Homo sapiens
cccaggctcggaggcccctggaaaacaaacgggtgtgaaactaaaatttttttaccagctcccagggtggacttcagtgtgtgtatttgtgtaaataagtaaaaccttttatttcttttta

SEQ ID NO: 544924 - DNA, 353 bp, Homo sapiens
attatatgtttgggttattaatagttataatctaatgtttaaatgttagatataaaaggggcaaatagctcaagcatggtggtcactcctgtatcccagtacttgggaggctgaggcgggcagattacttgaggccaggagtttgagaccagcctggccaaaatggcaaaaccccctcactactgaaaatacaaaaattagccgggtgtggtggaacacacctgtaatcccagctacccgggaggctgaggcatgagaattacttgaacctgggaggtggaggttgcaataagctgagattgcacctctgcacttcaggctgggcaacagagtgagactctgtctcaaaaaag

SEQ ID NO: 544925 - DNA, 467 bp, Homo sapiens
  misc_feature (118)..(118): n is a, c, g, or t
cagctgctgctaaaaccacagaagtctgtcatgaactaacgcgccgacataacatccacgtccagccaatcaatctacccacggtcccccggcgagaagagccctacggattcgcccncaccctctaccacacaccccagatcatgaactacttccttgagcacctcctagccacatgccagcaactggccctggaactgagcccccatccctcagccgagtgccacttctgcaggaggcccctgcattttgaagtgccgactgaacgagagacctcctatttcccaggcttgagcaagccgtcatctcctcaggcctgacgcatgacctcaattattccacttcaccccaggccattaccatctccagaccgtcttcagacttgtccttcatatgcgaattacgttctattaacctttaatctatagtaccaacatagtcctggaccaacaaaaaaccaaaaaaaa

SEQ ID NO: 544926 - DNA, 408 bp, Homo sapiens
  misc_feature (201)..(201): n is a, c, g, or t
ccccgagtccccgtcacgccctggaaacaaacggtgttttacatggaggactacctgcccgtgaaaacgggcgaggagatttttggccccctcggcattcggcccaacgccaaaaacaaccggggcctgggcttccccctcgacctgggcttcaagggccaactgtgcgagctgtcctgctcccccgactaccggatgggnttagggccggcttttcccccctgcacgagcccagggggtgagggtttctagggggttttgggggtcccccttcctttccctccctcccccaaaaaggggtttttggggcctgggctggggggatggggagggcccctcgggactgtgttttttataacttatgtttttttatggttgccttttcgcccattaatcctcagctgggga

SEQ ID NO: 544927 - DNA, 202 bp, Homo sapiens
acacacgcacggagagggtctcagtttcctactccattgaaaggagaaaaacacgttctacctgttggggagattaatgagatgagttcacaatgtccagagggtctagcacattgtggtgcccagggactattgggattagggttcctcccagctctgggctcctggctggctggtgcactcccttctccggtggcgtggt

SEQ ID NO: 544928 - DNA, 379 bp, Homo sapiens
gtaccaatgactacatgaggtctggctccaacctcatttcatggctctaataatataatggggtggccaggcacagtggctcaggcactttgggaggccaaggttggtggatcacaaggtcaggagttcaagaccagcctggccaatatggtgaagccctgtctctactcagaatacaaaaattagccagatatggcggggtgtgcctgtggtcccggctacttgggaggctgaggcatgagaatcggttgatcccgggaggtggaggatgccatgagctgagatcgtgccactgcactccagccttggagacagagcatgactcttgctaaaatgaagaaaaaaagaaaaaaagaaatattcctgagacattaactgg

SEQ ID NO: 544929 - DNA, 732 bp, Homo sapiens
gggcatgaatatgggcatggaggggcagggcactacatgtaaccttcatctagttaacccaatcgcaaagcaagggggaaggctgcaatagttatgccagaggagtatgtagcccggggtgggtccaatgggtgtgagtgatgggagcagcgcgatagttatgaccacaagccgagatgctcgccccatcctgtcgcagctgagtgatggggccccgcatggcgatgaacgtaacagttccgtggaaaccactcatcgatccaacagtgatcgatgcgatggaggaccgcgccatcctcggggaatgccaatgtcggcatcaagtcgccacagttcttaataaatggagacccgaacaggatgactggggagcaatgtcatggagcatgttacatgcatcagtagcgttaatgggaagtatgcattgtctggcaataggtgacgtgattgtcaaactcatgttgattctcgggaaatgacggtggagattcgattcttgtggatctattcattggaacaaggagggatcccgtaatctcttcatcagggaacgtttgaaaaaggcgaggaaatgaccaactggaagtcaatgggggggacatgctagataacatatataagacattaagagaacgaagagtgaagtgattgtgaatgttattatactgttatgcatataacggtggtctcaatagattttgggacaaagaactgggaagtttgcaaacaagt

SEQ ID NO: 544930 - DNA, 797 bp, Homo sapiens
  misc_feature (348)..(348): n is a, c, g, or t
gcgccatgtggactccatgaatgtcatccctccctggaactggtggagcccattaagaagtatgatgtcccaggcatagtctgatgtctactgtgaggtgtgtgaattcctggtgaaagacagtgaccatgctgattgacaaacaactagattgacaaagacatactcgtacgctttggacacaatgtgtctcgaaggctgtcgaagtccctgtcggaagagtgccagaggtgtgtggacgcgtctggcaggcatccatcctgttccatcctgcctgataggaggtcaagagcctgtatctggtgtgcaagcattgctgtagcttctgattcttgcacgcggctgctncactgaccgttcacgtgactcagccaaaggacggtggcttctgcgaagtgtgcaagaagctggtgggttatttggatcgcaacctggagaaaaacagcaccaagcaggagatcctggctgctcttgaaaaggctgcagcttcctgccagacccttaccagaagcagtgtgatcagtttgtggcagagtacgagcccgtgctgatcgagatcctggtggaggtgatggatccttcccttcgtgtgcttgaaaattggagcctgcccctcggccataagcccttgttgggaactgagaagtgtatatggggcccaagctactggtgccagaacaccagagacagcagccagtggcaaatgatgtcgagcattgccaacgccatgtgtggaactaggaggaggaatattccttctggagaaacacagcattggtttttctacttgtgtgtcg

SEQ ID NO: 544931 - DNA, 299 bp, Homo sapiens
  misc_feature (53)..(53): n is a, c, g, or t
  misc_feature (253)..(253): n is a, c, g, or t
  misc_feature (258)..(258): n is a, c, g, or t
aggccaacttccaaggtttgagaggactgactttaattttgaaagctctactntgagtaaaatgtgattaaacaacattgcatgctacaaagaaatctttcatgaaaggaagtcaattaatgcagcaaacttcattgccatcttattttaaggaattgtcacagccacctcagtcttcatgagccatcactctgatccaacagcagccttcaacatcgaggcaagaccacccacctttctggcctcatctgancactntcccatcctgctgtgtgtcctgttccatgttccggttccat

SEQ ID NO: 544932 - DNA, 1090 bp, Homo sapiens
tcttccaaaaatttattaaggtggtttacttttaaaggtggaaacaagtgtttttaagagggtgatataaagaaagtgcccccacgtgtaatccctaccatatgttgattctatgtgggtgggagggaggggagaagtgattcctttgtctagaatcgagaagaaattgtggaaagtttatctaagaaaagaataataacagaaaagcgtatgaaatagaagttggtgcttgtggaagaatgaatgggagtgaaatggttatgtgaagaagggatttttccaaagtgtgcagaacccaggattccgtggtccaaaagctgtgaaaagcgttctctttcttacgggttctctaggacctaggcagcatttcttccagtgttctgcaaacaacataagaaacaacagcccaaacagcagcagcaaacattcatctgcttgggatccatgacagtcatggggtctccgggggagttgatggaagaagaaatactggtataagtcatcaagtagacgggctccaggcgactccagcttggatccaaaagttgactgtctgtccctttctccaggggctcaggacctaagtgatattgaggggctgcaacaggctcaataactcctccatgatgggcctgggctttcactgcccgtgaattgcgcccaggggtacacaaggtgttctgcgggtcagagtcacttacccagactgtgttggcgaaactttacccttttgtacacggataaactggggagggaccacaatcccctgggtattctggaccaaaaacacacgcaaaaacttatggtagggagcgagattttatacagagaggttctccaatataaggaccagggaacaaaaagcacccgcgaaaacacaggtggaaataatgagagaaaaagtttgtgatattgccaagatttgtaagagaaaaagcaaaaatagggatgtagccacatataggacagtcaccatggagaacacgatttctcacaaaggaatgatcaccattaacttatgaggagtcatagtaacagccgtaccttttctttttatatttcttattctgttttatataaacaggggcgt

SEQ ID NO: 544933 - DNA, 769 bp, Homo sapiens
ggaggcgtggtggagcggctgaagccgctgtaccccgccgagttcggcgtcgtggcggctacgccgagagctaccaccagcacttctgcgggccacctggccgacgtggcgcagttcgagctgtgctgagcgcgacacctacatgctgctgctctggagtggagaacctctaccccaatgacatcatcaacagaccccaagctggtgggtgatgctgcagggtatggggctcgtggagcctcctgccccccaggcatgatccagacatgctggagtgccacattcctgtccagtgaggcggcaatgtgagggagttgatggacctgatgctctggagctagagtgcactggcgctgggctgaggatgtgcctccccagaggctggacggcacatgccacatgcgagctggccatcgacatcatccagatcacactcaccaggcccaggccaaatggccagagagcatcacagctggacatatgggctcacagataaagcgggtgctgctggtgagagctgcctgcgatacctgaggagctaccagcgcgccatttactgaatttctaggagagaggcaaacaaactgaacgaattacagggccacaagtaattggcaacataaacaactgacatgtccttacaggatgtacatggaagcagaattggcaggaaccccgaggaaaccctgcaccatcctgactggagcgcctggggtgagctccacagcaaagagctatgacacacatgatccagaaactgcttgaggca

SEQ ID NO: 544934 - DNA, 256 bp, Homo sapiens
  misc_feature (189)..(189): n is a, c, g, or t
  misc_feature (211)..(211): n is a, c, g, or t
  misc_feature (214)..(214): n is a, c, g, or t
cccccctgggcttttcaaccccagtccgcgagttttttttttgaaggtgtggggggtagattcattcacgtggtttgtaatgaaataatccaaaaaatagggccaaagcgccccctggcaggagcgagggcggggggccgcgctctataattattttttaaaatgatgggggaggtttgttgcccccgncagccccctgaggaggcggggnccnagctacaacccggttcggatttggcgggggtttttttcctta

SEQ ID NO: 544935 - DNA, 282 bp, Homo sapiens
gagctgtcttggtctgaggcagagatgtgacatctagtaacgtttagtaactttccctagtagatccatatcagaaaaaattgcagtattatgactagcacttgcatatagcatgtggaaaacccgatgccaccagagtgaaggatttccttaggagttgaaacaaaacaaaacaaaacaaaccaaaacaaacagatctttccacctcatttgcaaaattgcttccgttataaggcatcaatgacaccaacatgcaaattcaccttcttttccacataggtg

SEQ ID NO: 544936 - DNA, 259 bp, Homo sapiens
agtccgtctagagtcgagcaggctcagcttaacgatatttggaggtcagcactggtgctcacgtgtcgacgagaacttgtacagtgcaggcatgcacctgcagatggtgaatacacgtcagatcaggctccatcttaacggatattgggagtgtcagcacggtgctcactgtgtcgacggaacttgtccagtggaggcatgcaccgcagtggtgaatacacgtcgacctggatgcatgcatgcatgctcgggtactgca

SEQ ID NO: 544937 - DNA, 834 bp, Homo sapiens
  misc_feature (13)..(13): n is a, c, g, or t
  misc_feature (15)..(15): n is a, c, g, or t
  misc_feature (17)..(17): n is a, c, g, or t
  misc_feature (19)..(19): n is a, c, g, or t
  misc_feature (25)..(26): n is a, c, g, or t
  misc_feature (29)..(29): n is a, c, g, or t
  misc_feature (40)..(40): n is a, c, g, or t
  misc_feature (42)..(42): n is a, c, g, or t
  misc_feature (46)..(46): n is a, c, g, or t
  misc_feature (68)..(68): n is a, c, g, or t
  misc_feature (72)..(72): n is a, c, g, or t
  misc_feature (77)..(77): n is a, c, g, or t
  misc_feature (83)..(83): n is a, c, g, or t
  misc_feature (125)..(125): n is a, c, g, or t
  misc_feature (135)..(135): n is a, c, g, or t
  misc_feature (173)..(173): n is a, c, g, or t
  misc_feature (180)..(180): n is a, c, g, or t
  misc_feature (183)..(183): n is a, c, g, or t
  misc_feature (186)..(186): n is a, c, g, or t
  misc_feature (191)..(191): n is a, c, g, or t
  misc_feature (200)..(200): n is a, c, g, or t
  misc_feature (206)..(206): n is a, c, g, or t
  misc_feature (212)..(212): n is a, c, g, or t
  misc_feature (222)..(222): n is a, c, g, or t
  misc_feature (224)..(224): n is a, c, g, or t
  misc_feature (227)..(227): n is a, c, g, or t
  misc_feature (229)..(229): n is a, c, g, or t
  misc_feature (250)..(250): n is a, c, g, or t
  misc_feature (278)..(278): n is a, c, g, or t
  misc_feature (281)..(281): n is a, c, g, or t
  misc_feature (287)..(287): n is a, c, g, or t
  misc_feature (290)..(290): n is a, c, g, or t
  misc_feature (308)..(308): n is a, c, g, or t
  misc_feature (323)..(323): n is a, c, g, or t
  misc_feature (325)..(325): n is a, c, g, or t
  misc_feature (330)..(330): n is a, c, g, or t
  misc_feature (368)..(368): n is a, c, g, or t
  misc_feature (505)..(505): n is a, c, g, or t
  misc_feature (544)..(544): n is a, c, g, or t
  misc_feature (553)..(553): n is a, c, g, or t
  misc_feature (561)..(561): n is a, c, g, or t
  misc_feature (563)..(563): n is a, c, g, or t
  misc_feature (567)..(567): n is a, c, g, or t
  misc_feature (580)..(580): n is a, c, g, or t
  misc_feature (641)..(641): n is a, c, g, or t
  misc_feature (647)..(647): n is a, c, g, or t
  misc_feature (681)..(681): n is a, c, g, or t
  misc_feature (732)..(732): n is a, c, g, or t
  misc_feature (760)..(760): n is a, c, g, or t
  misc_feature (765)..(765): n is a, c, g, or t
  misc_feature (828)..(828): n is a, c, g, or t
tctgtgtaaaaanantnanttttannaangtttaaaaaanangaanaaaaaaaaaaaaaaaaaaaaanaccncaacnccaaancgacagtgagtaagggcctgcccacggccaagggggaaggcnaccccagggngtcctggcatggactgtccccccactacttaatgtcantgccacnaancanaaaanttgaggaancagggngtgaanaccttaccancngcnancgagcgtgcaagggaaaaaanggatgtctatgtggcttccccatgagcnganagccanganacacggggcaggtggcanaggctcccaattcantnaaaancaggaggctgaatgcccaggtccaggaaaaacaaaaangggattttggaggtaggcttttttgttgtgttaaaaaacaagcacattatccatctccttgtggcccccgagctgctggcctggccccctgatccttcccctctccccacaaaaccaaaaggagttggaagggaggnagaagatgagaaattccaagggtggggaatgcttcagtnactggagancgaccgtnanagtnagccaggagagcnatgggaataacaaggtgaagctactgttccccctggggtggggtggaatgggacagggcanaaccangagggtgaccgagaacatcctgactccagaaaanaacactctgtagcaggaacacagggccgcagagagccactctggaggaaanaggtgaggctatgcggcacaggggcatnaaaanctccttgtggacgtggcctcagcttgctcgctcccagctccctggcctggcttgcctctagangacagg

SEQ ID NO: 544938 - DNA, 244 bp, Homo sapiens
ggatgtaccatcgtctaaatcctttagttttcccatcctatttgaatatctagatctccgcagcatcttcaaacacttctttcaattcatcctgagatgactttgtaagggaggtgtttagccaaaagtgttctcgcatctcgctcctttctatactgtcttttcctttaggtttctctagtttaatttacattgccaaagactttctaacccagtgagttccaagcgctttctccgaggtctt

SEQ ID NO: 544939 - DNA, 462 bp, Homo sapiens
gccatcctattgtgcccagaactgaataccctgggtatcttaatgaacatggcatttaaaatctgtaatttcaaacatgaaccacaatgccgtatgatctgaatggtgttgcctgggttttcttctggggtttttatggttttaggtcttgcgtttaagtctttaatccatcttgagttgatttttgtgtaggtgtgaggaaggggtccagtttcagttttctgcatatggctggctagttttcccaacaccatttgttaaatggggaatcctttccccattggttgtttttgtaaggtttgtcacagatcagatggttgtgggtgtgtggtgttatctctgaggcctctgttctgttctgttggtctagatatctgttttggtaccactaacaatgctgtactgtatcactggtagccttgtagtatagtctgaagtcaggtagcatgatgcctataactt

SEQ ID NO: 544940 - DNA, 462 bp, Homo sapiens
tccactagtgtaggcagattacttgaggaccagagttcgagaccagcctggcctcagttgatccacccatctcggcctcccaaagtgctaggattagaggcataagccaccatgcctggcccaggatggtgagggggatggtttctaggtgattcaagtgcattacatttattgtgcactttatttctatcattacattgtaatctacaatgaaataattttatacaactcaccataatgtagaatcagtgggagcccagagcttgttttcctgagactagacggtcccatctgggagtgatgggagacagtgacagatcatcaggcattagttagagtttcataaggagcatacatcctatatccctccaatgcagttcacaacagggttcatgctcctatgagaatctaatgccaccgctgatctgataggaggcggagctcaggcaagtatgctagcaa

SEQ ID NO: 544941 - DNA, 155 bp, Homo sapiens
  misc_feature (131)..(131): n is a, c, g, or t
aacagcagtgtgaaacccgcgtctgtactacaagaatacgagaaaatgagctggatatggtgaacgggtgcatgtagtgcctagctaatcaagaggattgatggcagcgagaatcggcatgaacccaggantaagtacggttgccgtggccgagg

SEQ ID NO: 544942 - DNA, 647 bp, Homo sapiens
  misc_feature (52)..(52): n is a, c, g, or t
  misc_feature (92)..(92): n is a, c, g, or t
  misc_feature (126)..(126): n is a, c, g, or t
  misc_feature (149)..(150): n is a, c, g, or t
  misc_feature (168)..(168): n is a, c, g, or t
  misc_feature (180)..(180): n is a, c, g, or t
  misc_feature (217)..(217): n is a, c, g, or t
ctgaagattagggtctaaaacttagtctggacctgtacctgtaacagccatnactctctgaatgggcttagcctgggcctacccaacttganttggcctggggagttatagccagcatggcaaaanagtatccagggctactagagtgnnggcaaactggggtctaantttgcacctgcnacgttgagcaagtgcaatctgagtgtcagtattctcntgtaaaatggggcaaagcacttgcctcccagccttcccagtacctgacgcggagttagtactcagctaacagcaactgctcctaataataacgacaacgatacaatggtaaccccactggaaaatggcacctgcggtaaaccagaagaggaaaaaaaaatctgatcatttcatggaataccctttggagataaatggttcagcaagcagaggtttctggccccaggtgacagctgccttcccttccctgagtgtccctgcctacggacccctccctgagtctctctgtgtccacaggtgatgaggagctgctgcgcttctccaactgacaactggccggtctgcaagtcaaaggatggccagtgtctgtcccggggtcctgtggcaggcagcgccaagcaacctgggtccaaataaaaactaaattgtaa

SEQ ID NO: 544943 - DNA, 158 bp, Homo sapiens
cccctggcagccacgaggagcagaggccctggagtaatttggcttggggacgtccccaccccaggcccaggcgcttctgggaacggctgtcggctcggcaatgtcgaatctatgagcttcgaaataagcaacgctatctcttccaacgctatctttcc

SEQ ID NO: 544944 - DNA, 1118 bp, Homo sapiens
  misc_feature (687)..(687): n is a, c, g, or t
  misc_feature (762)..(762): n is a, c, g, or t
tgtgtggccctcgtggtcaccacgccccagtgcggtgtcggtgggtggtgacgtgaggcgcgagctgaccttctgtaggacgacgggcttgcgtggtgatgggaatcgtggagaatatgagcggcttcacgtgcccacactgcacggagtgacaccaggcgtacttctccaggggcggagaggagctggcccagactcgccgtgtgtttgcacttcattaggctccgtgcccctggaaccctgcgctcatgaggaccctggaggatgggccacgacttcatccaggagtaccccgggagccccgacattcgcgtgcacgtcaccatccatagcccagaagattctggacgcgactgccctgcgtgccatcccacgtgacgtaaggccaccattgcagactgcttatccatgtggcccacacaaggggctcgtgatccaggcgtctcaagaagaacaaaaggaaggccatggcgctccgggtccccccgggggccacttgcaagggagccacgggccgcaagtgcaagccgtaaaagcctggaacgaggcttacatcccacagacacaagacccaaggccaccaagagaattgttgtcagcacccgaggcgacagcatcctgacctcgggaagggcacatagcaaggatggcgcgggcgggggatcataggccggatgggctttcttncaaaagacatttgatgaagcacacggaagtggcagggaccctgtggggcattcgatacatatcaccaattgcggnatgatatgcacgtaccacattgtggccaccagtggaacgagaccgtcgagatgtcacaaccacaaggtcaaggcggaacaggcaagggaacattagttggaacgtacccatccagtggtggaccccaggggggacgatccaaagcaacaccatggggcagccggcagagcacagatggagaagaaaggcacagggagaaggaggcaccctaagggggggcccaatacgaaccatcagaggcaatggcacgagaagacagagacagaacgagaggcaaggcgccaaacaaaaccgatgaccccggaggcagtatgacgcacagaaacacaaacaacacagaaccggggcacgacggc

SEQ ID NO: 544945 - DNA, 142 bp, Homo sapiens
catcgagctcggcccctgtctctgaacttagggaaatgttcatcatattctctgatgacatccttcagcatgtctgcgcgcttgatggggatcttcttgtagtccttaatcatcaggtatttcaccaacttatttgccctct

SEQ ID NO: 544946 - DNA, 152 bp, Homo sapiens
gatcttatgaggctgcctcctgccctcgctctgaatgacagaaaatacatctcagcatacttcctctcactacgctccagctgctccttgtagaaggtgtcctggcgtcttagttctgcctctctgctctccagctcactggccagccggcc

SEQ ID NO: 544947 - DNA, 120 bp, Homo sapiens
  misc_feature (87)..(87): n is a, c, g, or t
ggccggcctctggctccttcttcctctgcatgtggctggcggccgcagagcagttcagttcgctcactcctcgccggccgtccctcntcgggctctcctcgcgacactggagccatggcg

SEQ ID NO: 544948 - DNA, 466 bp, Homo sapiens
  misc_feature (22)..(22): n is a, c, g, or t
  misc_feature (399)..(399): n is a, c, g, or t
  misc_feature (439)..(439): n is a, c, g, or t
  misc_feature (445)..(445): n is a, c, g, or t
gcaggagaacctcttgaatctnggaggaggaggttgctgtgagctgagatcgtgccactgcactccagcctgggtaacaagatagaaactccgtctcaaaaaatatagatatacatgtatagactggctgaatggattaaagtacaggacccaactctatgttgcctacaagaaactcacttcacttgtgaagacacatatagactgaaagtgaagagatgaacaaagatattctatgcaaatgaaacccaaaagtgagcaggaatagctatacttagataaatcagactttaagtcaaaactataaagagagacaaagaaggtcattatataatgataaagtgatcaatttaagcaagatggtaaagcaattcttaatatatatgcatccacactggngcacccgatatataagtaatgttattagtctaaagggggnggtagnttcgatacggtaatagttagg

SEQ ID NO: 544949 - DNA, 134 bp, Homo sapiens
gggccggccagtgttctacatacactattatagaactactaagcaaagatggaaaaagaatcacttgtctgtttaacaagatgtgcctactcataatgtcctattaccccagtttatatatacctgggtcaaag

SEQ ID NO: 544950 - DNA, 206 bp, Homo sapiens
ttgactctagaggaccccgagagacgtgttgaatggtgcaatcttggctcactgcaacttccgcctcccgggctcaagcagttctcccccctcggcctcctgagtagctggacctcatcatcagtcactttctctctcattatcctgctttcgtttcgtctgacttcattgccacacgggtctctccagggtacccggagctcgaa

SEQ ID NO: 544951 - DNA, 291 bp, Homo sapiens
  misc_feature (24)..(24): n is a, c, g, or t
  misc_feature (108)..(108): n is a, c, g, or t
  misc_feature (114)..(114): n is a, c, g, or t
  misc_feature (238)..(238): n is a, c, g, or t
  misc_feature (290)..(290): n is a, c, g, or t
tcgtgcggcccagtctcccagaantccttttcatcttgcaaaacaaaccccgaaccccattaaacaatttcctcattcgcccattttcccagctagccttggtaaccnccattnctagttctgtctctgtgaatttgactgtgtaccccgtgtaagtggtatcatacagtatttgtatttttgtgactggcatatttcacatagcataatctccttgtggtttatccatcttgtagcntgtgtcagaatttccttcccttttaagactaaataatattccattgtgtgtnt

SEQ ID NO: 544952 - DNA, 174 bp, Homo sapiens
aatcattgcctccgatggaacccacagggaagaaggaaaggaagaagacacctgagttaccctgctcatgagcactgagtttgggcgagctgtgggacatgcttggggagtgtctaaaggaactagaggaatcccatgaccagcatgcggtgctagtgctacagcctcctgtcg

SEQ ID NO: 544953 - DNA, 722 bp, Homo sapiens
cggggtaccgaccctgcacgcgcgcgtcctactgaacgctggggcggagatccattgctgaacaacgaggagccgctggggctcgcggccttcacgccgcactaactcggatagggactcggactcagaagggccgtgagaaggacacgcgaagcagcgtccggggacacactgcctcttgatgctcgacgttgtcagacaacaaggtgtaaggagcttgctgctagatgcggctcgagaagcgaccatggtagccacccctgaccccgttccagcgccaacagggccgggactgtgcacttggtgatacaggtctgctgaacctggagcagatgctagacgggccagaagccgcaggacagctgggcagagctggcgagagcgtctggggctgcgcaggctggtaagacacgtaccgagcagacaacctgagccagtggcagcctcctgcgcagctacgagctggctaggcggggacctggcaggtcctactggaggccctgtctgacatgggcctagcaggagggagtgaggctgctgaggggtccagaaacccgagacaagctgcccagcacagacagaggtgacggaagacagtgcgtacgggaaaccagtcagtggaggcagggaggcagagaacgctgggaccaacccctgagccaccaggaagggctctagacagagggcaacccacaggctcaaggggcggtgacaggtggcgg

SEQ ID NO: 544954 - DNA, 865 bp, Homo sapiens
  misc_feature (34)..(34): n is a, c, g, or t
  misc_feature (41)..(41): n is a, c, g, or t
  misc_feature (52)..(52): n is a, c, g, or t
  misc_feature (57)..(57): n is a, c, g, or t
  misc_feature (65)..(66): n is a, c, g, or t
gacgtgatatgcgccaagactgcgaaacaacagngaaagancctgcgggggnaactnaccaactnncttttaggcgaggagacccagttatgtggaatgggcacagagcaaggctgctggattccagtatccagtgataagggctcctgtccccaggtaatggagcgaagctttcatatgccctcctatgggacacagacccttgaagggggtgtcgagaagccccattctctcctatcagctaacccattatggcaacaaagggccctggacttttttaccaaatggagctgactcagtgaaaactggaattaaaaggaaagtcaagaagaatgaactatgtcgatgcacagtatcttttctttcaaaagtagagcaaacctataggtttttggttccacaatctttacgactaatcacctacttaatgcctggagacagatgcataagtgtgctttttgtatgatctttaagcagtcttactgcagccttatttccaagtaagagtactgggaaaaccactgggaactaatataaaacccatttgggacctcagtgccttgcacatcgggtggccctcaacacgcaattcaaatagaatctcacttttcctgccccgctaccccacaatatttcacggctcaatcaccacatcctctttgttcgtccccccaccaatattcccttcattctggccaaacctgtttaccatctccataaaatatcggaatattaaatcacgttccaaaacggagacgcctttatcatttaatggcggggccatagctcatttccccattccgcctcctcaacccatcataatccaatctaaacttttcaccccatttccgagcccgcccttcca

SEQ ID NO: 544955 - DNA, 127 bp, Homo sapiens
ttcagtaccctctcagctccaggtggctctgaggtagctgtaccacccccacccccagctcaatggactgtaaggggaagggacacacaatgaagaaggagcacctagttctacctcaggcagctca

SEQ ID NO: 544956 - DNA, 383 bp, Homo sapiens
gcggccgcctactactactaaattcgcggccgcgtcgacgcagggttaaccatattagctcatgaattagcagagaactctgaggttgataatggtctaacaaattggtttgatagtgtgtttgggaaatggaaaaaagtcataatcatggtgttgtgggcaattttcacctgtatgagtgttttggttctgtgtggatattgtttgattccgtgtatgagagggttggttaccaggactctggagcggtcaatgacgcaacagatggtgaggtacggaccgattccgagctccggccagtgggatgacgaatataggcctccaggcctaggagatggctccgtttcttttaactacgaggagccaatgttgggccccagtcc

SEQ ID NO: 544957 - DNA, 426 bp, Homo sapiens
  misc_feature (257)..(257): n is a, c, g, or t
  misc_feature (262)..(262): n is a, c, g, or t
  misc_feature (266)..(267): n is a, c, g, or t
  misc_feature (270)..(270): n is a, c, g, or t
  misc_feature (277)..(278): n is a, c, g, or t
  misc_feature (283)..(283): n is a, c, g, or t
  misc_feature (287)..(287): n is a, c, g, or t
  misc_feature (294)..(294): n is a, c, g, or t
aagaagtcagaactcatgctgagattaaagcattttctactcagatgagcataaacggaggtcaaagactggctttaaaagccaacattgctggtgccactgatgtgaaatgggtactgactggcgtagagcttaccaactctgaggagtaccgatatggtgtctcaggcagcgatcagaccctaaccatcaagcaagccagtcacagagatgagggatctcacctgcataagcaaaaccagggagggatcgtcagngtcantatnnttngacattnncaagnactntcagtgntccagccttcacttacagcctagactcaaatattatgagacaaatgtctcttctgtggaatcagtgcgacaccctgaatcgatggttaaacactgctatcttatctcaatgcgctagcgtcgaagttacctg

SEQ ID NO: 544958 - DNA, 219 bp, Homo sapiens
taacgagccggtgagatctaggcgagctggtggatactcatgtacctaagaccagaggatggttggtttgttagtcttgtattcttaggggtttaatgaggttttagagacaaggtctcgctttgtcacccagactggagtacagtggcacgatagtagttcactgcagcctcaacctcctgggctcaagcaatcctcctgagtcactggaattatagg

SEQ ID NO: 544959 - DNA, 651 bp, Homo sapiens
  misc_feature (651)..(651): n is a, c, g, or t
gccgggctgagaggagcgtggctgtctcctctctccgccatggcgtgtgctcgcccactgatatcggtgtactccgaaaagggggagtcatctggcaaaaatgtcactttgcctgctgtattcaaggctcctattcgaccagatattgtgaactttgttcacaccaacttgcgcaaaaacaacagacagccctatgctgtcagtgaattagcaggtcatcagactagtgctgagtcttggggtactggcagagctgtggctcgaattcccagagttcgaggtggtgggactcaccgctctgcccaggatgctattggtaatgtgtcgtggaggccgaatgtttgcaccaaccaaaacctggcgccgttggcatcgtagagtgaacacaacccaaaaacgatacgccatctgttctgccctggctgcctcagccctaccagcactggtcatgtctaaaggtcatcgtattgaggaagttcctgaacttcctttggtagttgaagataaagttgaaggctacaagaaagaccaaggaagctgttttgctccttaagaaacttaaagcctggaatgatatcaaaaaggtctatgcctccaactgatagctcgcaaggcactgccgcctcctttccaccgcatgatccaggcatn

SEQ ID NO: 544960 - DNA, 123 bp, Homo sapiens
tgccggtacaaaatacaggcacataacactagccaaagatatacctgattacattcccaaaaggcagatatgctgcaaacatgcagataataggaacaaaatgtagttcccatgtgccaaaca

SEQ ID NO: 544961 - DNA, 414 bp, Homo sapiens
gccgggctgagaggagcgtggctgtctcctctctccgccatggcgtgtgctcgcccactgatatcggtgtactccgaaaagggggagtcatctggcaaaaatgtcactttgcctgctgtattcaaggctcctattcgaccagatattgtgaactttgttcacaccaacttgcgcaaaaacaacagacagccctatgctgtcagtgaattagcaggtcatcagactagtgctgagtcttggggtactggcagagctgtggctcgaattcccagagtttctgagtgttgtgttggtacttctactcgctctgtgccacggtgtcttcttttggggagaacatagtgatgtcgttgggaggccgtatagtgtttggtcacccacccaaaaacctctgcgccgttttgcatttgttag

SEQ ID NO: 544962 - DNA, 341 bp, Homo sapiens
gccgggctgagaggagcgtggctgtctcctctctccgccatggcgtgtgctcgcccactgatatcggtgtactccgaaaagggggagtcatctggcaaaaatgtcactttgcctgctgtattcaaggctcctattcgaccagatattgtgaactttgttcacaccaacttgcgcaaaaacaacagacagccctatgctgtcagtgaattagcaggtcatcagactagtgctgagtcttggggtactggcagagctgtggctcgaattcccagagtcgaggtgtggctacgtttgcaggtctttgacatgttcgtgagcgatgttgacacaaactgcctgat

SEQ ID NO: 544963 - DNA, 1037 bp, Homo sapiens
cattgtgttgccaggacgatctccccttttggaggtccaggctaatttccacgccgcggttcccttttcggggccttggggagatttaaaggcacttggcatgttcacaagggccctcgctttccaaatgctgtttctttgtggccaagtccaatcttcctagccctgttgttaatttaccgaaaggtgttttgttcaagtttaaggggccttgaaagagaagggagcttgctgcggtcctttgcccttgtcacacctatatggtttacaagcaccttaagcttagccgtcccagggccgcccactctctcaccagctgaatgtgtgagctgacagcgtcccaccaggtttcacaggaccaatttcgagactggaagctacactcaaagacactcccaccaggctctttctcccttttccttcttgctcaactggcactggaatcaacaggctggttgaatcggcttagatctttcctgaaacacggaggtaaaattttttccttatggcagaggcccctaagcaacggagaggggtgtctcggagagtccagtgccccttaagactggagaaagctgcaatttaccaagttgccttttgccatctgtagtctgacacaggtgactagggttgtagaggtgggaaggcacccctcctgggctgatcttgtgccattcttgacatcggacctgcttggttaaggagggaagtgggccagacccagagtgccaggagctaatggagccaggcctgactctctaggagtggtccaaaggccttcagcatagaaggtgcaaagctggggcagccagtgctcaccggcaccctcacatgtgacaccaagacccaccccaatcccagacatcacacagattctcccccacgccgtcctagaccaaaggcacctgccaggtgtgggccacagcagacaggatgagtgaaagcaacgtagccgccccgcggatgcagtgcgctagccaactacctcccatttctagccaagcctgtccctcgaaaccttcggcacgaacaaatgc

SEQ ID NO: 544964 - DNA, 232 bp, Homo sapiens
gaaagtttaacactttctcttggacttcatgcgggccacaggttggacaagcttgccctaggcatttgtgtgccttccgtaacttctagttgtatttcgtatccatgactctccagtgtcttcctcgttggacaaacccgtaacagttcacagttccaaacagaaatttcccagcctattctaaatctgttaatgacgagagtccaatgtatctcattatttgtagccaatt

SEQ ID NO: 544965 - DNA, 868 bp, Homo sapiens
atggtgtgggcgagcatatgagtatgtggtatagcgtgcatctattcggcgtgctatctgatcgaaacatctgagcactcgaagatggtcacgtaaatcctgtgatgtcgtctcccacccatgtataaaggtgtgctagttattcaaggctcctattcgaccagatattgtgaactttgttcacaccaacttgcgcaaaaacaacagacagccctatgctgtcagtgaattagcaggtcatcagactagtgctgagtcttggggtactggcagagctgtggctcgaattcccacggtggtgggactcaccgcgtctggccaggtgcttttggaaacatgtgtcgtggaggccgaatgtttgcaccaaccaaaacctggcgccgttggcatcgtagagtgaacacaacccaaaaacgatacgccatctgttctgccctggctgcctcagccctaccagcactggtcatgtctaaaggtcatcgtattgaggaagttcctgaacttcctttggtagttgaagataaagttgaaggctacaagaaagaccaagacaaggaggctgtttgctccttagaaacttaaggctggactgatatcaaaagttatgctctcagcgatgggagctggcaaggcaaatggaaccgtcgcgttccagcgcagggcggcatcatcttagagggataggttttaagggctcgaaatccggatatcggtatgaggcgtgaagtttgagtgcctgggggagtgacagtgcatggagaaggtcgaaataaaaagcagcgggagcggccaagaattcgcagagaaagttgatacggaaactcgaaaggtgaaattatgagggacatgtgttagatggggaataatg

SEQ ID NO: 544966 - DNA, 991 bp, Homo sapiens
aggccaggcggttgtgatgagaggataggggagataatatcagcatcaaattcttggggtatctctctaagaattaacataactcttttctagcttaatatttgaacttctaacttcaagagcaactctgaggctttcggtttcattagctaatagttgaggaataactatactagcacaagaatggcctaatgtttgtcataactgtcacatggatgaaattttttaaacgatacaaccatgataaccattataaatgatctatgatcaaaatctacaagtgatcgaattatttcgtacggaatgtcttcctaatggggaagaattgcataggagcattatgcaaatctacacaagctttcataaatgtagctgctgggtagctccacagtgttcataaggccatcctgttatcccccaactcccccatttaagggaaagaaactttttaaatatgggtagagtacttacgtgttgatctaacagttcacttccatttttctagtctggagtacacgagtatataggaacagagagctatcaaaaactctggggatttctcaatgtgactaactctaatctgctattatactgcctttacataacatactatgaacctttaggctgaggttatgaagattactaaccccaaatgtccccttatataaaaagggacggtatgctactgtgactactgaccaggtcacactatgacatcactgccaatgcaagtccagaaggtacacactctgtgaaatgcgatggaaaaaaacgacaaccaatggcacagacatgtaaaccagcaacagaagacaccaacataagaacaaaggatacagacaatggagaggagcacccaacaatatacagaaagggagaagtcatcgaacgaagggataccgccgaactaacagccactcgaaccaagacaccgcgtcaccccacatattacaggcacagagaggaacacccaaagaacaagccatattga

SEQ ID NO: 544967 - DNA, 1415 bp, Homo sapiens
gccgggctgagaggagcgtggctgtctcctctctccgccatggcgtgtgctcgcccactgatatcggtgtactccgaaaagggggagtcatctggcaaaaatgtcactttgcctgctgtattcaaggctcctattcgaccagatattgtgaactttgttcacaccaacttgcgcaaaaacaacagacagccctatgctgtcagtgaattagcaggtcatcagactagtgctgagtcttggggtactggcagagctgtggctcgaattcccagagttcgaggtggtgggactcaccgctctggccagggtgcttttggaaacatgtgtcgtggaggccgaatgtttgcaccaaccaaaacctggcgccgttggcatcgtagagtgaacacaacccaaaaacgatacgccatctgttctgccctggctgcctcagccctaccagcactggtcatgtctaaaggtcatcgtattgaggaagttcctgaacttcctttggtagttgaagataaagttgaaggctacaagaaagaccaaggaagctgttttgctccttaagaaacttaaagcctggaatgatatcaaaaaggtctatgcctctcagcgaatgagagctggcaaaggcaaaatgagaaaccgtcgccgtatccagcgcaggggcccgtgcatcatctataatgaggataatggtatcatcaaggccttcagaaacatccctggaattactctgcttaatgtaagcaagctgaacattttgaagcttgctcctggtgggcatgtgggacgtttctgcatttggactgaaagtgctttccggaagttagatgaattgtacggcacttggcgtaaagccgcttccctcaagagtaactacaatcttcccatgcacaagatgattaatacagatcttagcagaatcttgaaaagcccagagatccaaagagcccttcgagcaccacgcaagaagatccatcgcagagtcctaaagaagaacccactgaaaaacttgagaatcatgttgaagctaaacccatatgcaaagaccatgcgccggaacaccattcttcgccaggccaggaatcacaagctccgggtggataaggcagctgctgcagcagcggcactacaagccaaatcagatgagaaggcggcggttgcaggcaagaagcctgtggtaggtaagaaaggaaagaaggctgctgttggtgttaagaagcagaagaagcctctggtgggaaaaaaggcagcagctaccaagaaaccagcccctgaaaagaagcctgcagagaagaaacctactacagaggagaagaagcctgctgcataaactcttaaatttgattattccataaaggtcaaatcattttggacagcttcttttgaataaagacctgattatacaggcagtgagaaaacca

SEQ ID NO: 544968 - DNA, 603 bp, Homo sapiens
tggaaagggagtctcgctctgttgcccaggcgggattgcaattgctcgatctcaacccattgaacctccgcctccggggttcgagcaattcttctgcctcacctcctgaatactggaactacggtgcgcgccaccatgcccaataatttgggtatttttagagacggggtttctccatgtgggtcaggctgttctcaagctcccaacctcaggtgatcagcccgtctcggcctcccaaagtgttgagattacgggtgtgagccactgtgcctggccgatacttcttaaactcttacgccttacgttgggggactgccaactgaactgtccagcagcagagctactcaggagccaagggctctccacggcatcttgtccagtctctcaggagttagcagggtttacacacgaggagacagagggctcagaggatacgggtgcccggggttacgtgggattacggggcaagacgttgtgattaacactctagtggggaacttcaaaacccaggttcgccctttccaggaaatgggtcagatcccaggaatatcggcaccgggaatcctgggagatatgggcaacccagttttagtctcccactgg

SEQ ID NO: 544969 - DNA, 597 bp, Homo sapiens
ggcccgcctccgttgtgcaggggctttattaggtgtggcccggtcccccgtgggtttagtctcttgttccttgttttcgtctttggggctccctccgtggactgtcggggggtggttgttgtctttgagcgcccccgcgcatatgtggcggcgggcgaccttagtgcgtctgggtggccactctgcccgtgctctgcaaggggcgctacttcccggtcgtcgcccacgatccacccacgttcaggttgcagcagtacgtcagtaacgtggttacaaagaacgtgtacttcttgtttatgcataaatccacgccctgttctcgcaagtgtggagtattgacacccctctttgttattacgtgcgccatcattatgtgggggagaacatacattgatgaggaactctcctcctctttttaaatgcaggctcctgaatcacacttttataatacttctttaaagagtcacccccctatccacaataccttttctttttctaaacccacgggatatccttccacaacaccaaatgatgctcgaggagccacccaaccaaaccacaagaaaagttcttttacaacccatcaaagacaaaaaa

SEQ ID NO: 544970 - DNA, 1809 bp, Homo sapiens
gccgggctgagaggagcgtggctgtctcctctctccgccatggcgtgtgctcgcccactgatatcggtgtactccgaaaagggggagtcatctggcaaaaatgtcactttgcctgctgtattcaaggctcctattcgaccagatattgtgaactttgttcacaccaacttgcgcaaaaacaacagacagccctatgctgtcagtgaattagcaggtcatcagactagtgctgagtcttggggtactggcagagctgtggctcgaattcccagagttcgaggtggtgggactcaccgctctggccagggtgcttttggaaacatgtgtcgtggaggccgaatgtttgcaccaaccaaaacctggcgccgttggcatcgtagagtgaacacaacccaaaaacgatacgccatctgttctgccctggctgcctcagccctaccagcactggtcatgtctaaaggtcatcgtattgaggaagttcctgaacttcctttggtagttgaagataaagttgaaggctacaagaaagaccaaggaagctgttttgctccttaagaaacttaaagcctggaatgatatcaaaaaggtctatgcctctcagcgaatgagagctggcaaaggcaaaatgagaaaccgtcgccgtatccagcgcaggggcccgtgcatcatctataatgaggataatggtatcatcaaggccttcagaaacatccctggaattactctgcttaatgtaagcaagctgaacattttgaagcttgctcctggtgggcatgtgggacgtttctgcatttggactgaaagtgctttccggaagttagatgaattgtacggcacttggcgtaaagccgcttccctcaagagtaactacaatcttcccatgcacaagatgattaatacagatcttagcagaatcttgaaaagcccagagatccaaagagcccttcgagcaccacgcaagaagatccatcgcagagtcctaaagaagaacccactgaaaaacttgagaatcatgttgaagctaaacccatatgcaaagaccatgcgccggaacaccattcttcgccaggccaggaatcacaagctccgggtggataaggcagctgctgcagcagcggcactacaagccaaatcagatgagaaggcggcggttgcaggcaagaagcctgtggtaggtaagaaaggaaagaaggctgctgttggtgttaagaagcagaagaagcctctggtgggaaaaaaggcagcagctaccaagaaaccagcccctgaaaagaagcctgcagagaagaaacctactacagaggagaagaagcctgctgcataaactcttaaatttgattattccataaaggtcaaatcattttggacagcttcttttgaataaagacctgattatacaggcagtgagaaaaccaaaaaaaaaaaaaaaaaaaaaagggggggggcggtaaaaattttccttgggggggccccatttaaaggggttacccggtttttttgtttaaaggggggccccataggggggggggttttaaaagcagagaggcaagggggcggccgatgtgtttataacaaaggtctgcgtggtggggggaaaagcgtgttagctgggggaaatctgtggagaagagaaccattattttcgggggggggaaataatgtgggcaaacaataccttaaagaaatttaaaggtccaggggaacattctaaattttgaggtgttatgagggtgtaaccaggggaatatgttgctgtgaaagattggggaaggaattatattcgaaattttatcgatggtttataaacaa

SEQ ID NO: 544971 - DNA, 327 bp, Homo sapiens
ctgaggcggaggttgtggcgagccgagattgcatcactgctctctagcctgggcaacaagagcgaaactcaggggcagaaaaaaaaaaaaaaaatttccagcctcacagattttagtgctggatgcagagaggaaagtggacagtttggggtctcatggggaggaacttgcccctttgggacccacagtcttgggtgtccatgaggaggcacgggcttcttgttttgggcatggtttcatgtcctagagaggtttggccgtttctgctttggctttcctaagcctgcttaagcccttttagacccttacggcctggttgggaacaca

SEQ ID NO: 544972 - DNA, 497 bp, Homo sapiens
tgctgcgtcagaatagactgaagaggtagggagcagatgtgaagcacacagaccatttttggaggctggtgaaacaatttaagtccaggtcaggatggtttggggggctgggctgggtcctggtgcaagcctgaggagtggtcaaattccaggtctcttccaaaagtagaaacaatgtaacttgctgatgtactgaaggtggatgagagagaggtcaggatattgacaagataggtggccagaacagcaggactgatggagttaggaaataataaaaggtgagtaggctctgagggagatctgtgacgtggtgagtttgagaagcctctcagaaaccccaggtacatgtcgggtaggcagctgtatagaaaacttcagggaagcagtctctgcacagatgaagccagaaggctggatgacgtcatgcgaggtacaagcacagaagacgagaggtccaggattagcagggatggcacgcatgaggaggcagagctggc

SEQ ID NO: 544973 - DNA, 280 bp, Homo sapiens
gtaatctctgccttctttgctcagtgcagctgtgtttggtgctttgttgatctttaggcctttttcagcagcgttgtccctggagagcaggataggagctgatggcttctcagcatcttttaactcagtttaaagatgactatcaacaacatctagtcagcatctgttgctctcggcagctgggacttcatttcctttctctttctccacttctctaacctcttgaagactctgtctttgtcatgggtacagcatcacctgtgtggcccttaggctctct

SEQ ID NO: 544974 - DNA, 1416 bp, Homo sapiens
  misc_feature (1276)..(1276): n is a, c, g, or t
  misc_feature (1288)..(1288): n is a, c, g, or t
  misc_feature (1297)..(1297): n is a, c, g, or t
  misc_feature (1318)..(1318): n is a, c, g, or t
  misc_feature (1326)..(1326): n is a, c, g, or t
  misc_feature (1366)..(1366): n is a, c, g, or t
gccgggctgagaggagcgtggctgtctcctctctccgccatggcgtgtgctcgcccactgatatcggtgtactccgaaaagggggagtcatctggcaaaaatgtcactttgcctgctgtattcaaggctcctattcgaccagatattgtgaactttgttcacaccaacttgcgcaaaaacaacagacagccctatgctgtcagtgaattagcaggtcatcagactagtgctgagtcttggggtactggcagagctgtggctcgaattcccagagttcgaggtggtgggactcaccgctctggccagggtgcttttggaaacatgtgtcgtggaggccgaatgtttgcaccaaccaaaacctggcgccgttggcatcgtagagtgaacacaacccaaaaacgatacgccatctgttctgccctggctgcctcagccctaccagcactggtcatgtctaaaggtcatcgtattgaggaagttcctgaacttcctttggtagttgaagataaagttgaaggctacaagaaagaccaaggaagctgttttgctccttaagaaacttaaagcctggaatgatatcaaaaaggtctatgcctctcagcgaatgagagctggcaaaggcaaaatgagaaaccgtcgccgtatccagcgcaggggcccgtgcatcatctataatgaggataatggtatcatcaaggccttcagaaacatccctggaattactctgcttaatgtaagcaagctgaacattttgaagcttgctcctggtgggcatgtgggacgtttctgcatttggactgaaagtgctttccggaagttagatgaattgtacggcacttggcgtaaagccgcttccctcaagagtaactacaatcttcccatgcacaagatgattaatacagatcttagcagaatcttgaaaagcccagagatccaaagagcccttcgagcaccacgcaagaagatccatcgcagagtcctaaagaagaacccactgaaaaacttgagaatcatgttgaagctaaacccatatgcaaagaccatgcgccggaacaccattcttcgccaggccaggaatcacaagctccgggtggataaggcagctgctgcagcagcggcactacaagccaaatcagatgagaaggcggcggttgcaggcaagaagcctgtggtaggtaagaaaggaaagaaggctgctgttggtgttaagaagcagaagaagcctctggtgggaaaaaaggcagcagctaccaagaaaccagcccctgtgtatatntatgtatatgtntctgtgtcnatgtatgtatatgtatatgtntgctgtanctatatctatgtatgtgtatgtatatgtatatgtctctgngtctgtgtctatatatatatgtgtgtatatatatatatatgtgatatgat

SEQ ID NO: 544975 - DNA, 2243 bp, Homo sapiens
tttgcttgcctgcataacttctgtatatgcatacattatactgaatgttatttgatcatgtgccaaatctgtgcctgatgctctgaattctgtctgatgatgcttgattctccctcccttccttcaagtacacaataaagcaacaacataacacaaccacatacaggcaacaacacaaaaccacatacacaacaaattaaacaacccaaaatcattacaaacaaccacacatagacacacaacaacaaacacctcactaccacaaaatataatacaccatattgtcaattaaatagtgatatacactcaaaacttaaaccacacacaaactagagaaataaacaacactcaccacacaagcatataacaaacaagatgatcaaagcaccaccaacaagcccattaccacacactagacaccacacataacaatatatacgtaaataagaaaaagccaacctagacaagagcccacaacaacccacacaactcacacatatacatacacaaaaacaactcattaataaccacatcaaacaacacacacaacatatacatagctcctacccctcaatacaaaactatgcacacataaatagagaagtaataatgtaaactccacatattctataaaaacactagcaaccacaatctacaccaacaccataaaaaacacaagtacataaaccaaacaatatacacataacaactcaccacacacacacacagaaaaaccataactcatacaatcatcgccaatcaacacaaacaatcactcacatcacgacacaccaccaacgaccacgatagtcacacattaattcactgatacatacatacatcactaatacattatacaaggtcaatcactccgacaatacacatctgttatctctaactcaacccaccatacatagcacttacaatcaaacaatacaaaccatgtatagctaaccacacgcctcacactaactcactacacaaacagagggacttcaataaaacactacattacaactaaatcacgctacatcacatacataaacgactatgacccacaccaacacaaccactacatccaaacacacatcatacaaacaacaatacatacctcacacactccacacgaaaacgaacacatcactacataccatcctacacccacacataaccacaacaatacaccactaaacatacatagtgtacgattactacaaaccacaacagaggactacacatactatactaatactaagtctagacacaacgtgacatccattatactataacttacaacaagtacacactaacccaataagttccgtcaccatacccaacatgcatgagcaaatgactaccaaccatacaacaaaccacgcacacccatccactcatacctccatacgaaataatcatcatacaaaaccacaccaaggcgcatccaacgcaccgcatccactgcaacagtagcacagatacatcgaccagccgttgaacatacacttcgtagagctaatcacgatataccatactcaacagcatgatacagcccaataacaagtagtacaagataagaaccaaaatagctcacaccaccatattccacacgcacactgatcacagatcacagaactcaacatcacacaatcttcaatactaatctcaacaacgcgaatcataacaagtccccagacacactcgcatacatagacacacaacgatacgatcctccacttcgcatatcacagacaatcatacacgcaccaccacagacagcatcaacaaaagccacagcgatcccataacacagccaataccaaaacataataataaaacaccacaaacagcaccaccactacgcatcagcacactgacgagaaacgatcacataacaacaacatacagtccaccacagtataactaatatccacgcatcaatcctctatcccaaacatcatcgctacatcatacacgtcattagtcatactataaaccatatccacacaataacacgatacaacaaagcagtacacatcaccgacaccgaagagccgacacagcaatcaacagctatgaaataccacactaggacatgacacgaacacctcagcaagactaaataactcacctagtaggtgtgctaatcgaataacatcacagccacgacgtacgtcaagtggagagacaatccacaacaaacacagaactaaagaaagatagtagataacaaccaggacaaatac

SEQ ID NO: 544976 - DNA, 857 bp, Homo sapiens
accttaacttaatggatcccttattcaatcagggcttctgtctttatgtctgtggcatatcaaaatggtttctgttcctagaaaagtaataacatatgcttatctttattctttttccaggtgatttgttttcaaatgctccttgtgaaaacacctagtgtgtagaaaggaaagtggccagaaagaacaatgtgggaccatgagtaggtcattaaatagcttagtgatttaccctcatatagggcttataaaccctgtatgtgttatatgtgcttcacagagttcgtgtcaggctcaaaggagatatgtataagaaagtggttgtaaattatgttccatttcataaatatgaagactatatacaaatataatctctaatacaaacaccagagtgtaattaaagtgttggttatacaaggaggtatcatagcagggaaaacacactaattttcatacagtagaggtatgaaaatgaaaatggaaggcacttgaagtcatgtattggtgacactgtttaatacatctcattattgccacatatgtcatctggtattgatttcaagggaaaccaagtgaattctaggttagtatactacaaggtggtcaccatattccatgtaccaactagggtctgtgtccatagccttgtacgaggatactgatgtatccgcacattattttaacacacttcacttatctggcttaggggggtacacgcacacgcgttcaataaacacatgagggtgtcgagggccacagcgcacctcacgaatatcttttcgggacacgcctgggatatggggcccaaaaaacggggcacggactgctcacacacaccgacgactctctcccccaac

SEQ ID NO: 544977 - DNA, 1541 bp, Homo sapiens
gccgggctgagaggagcgtggctgtctcctctctccgccatggcgtgtgctcgcccactgatatcggtgtactccgaaaagggggagtcatctggcaaaaatgtcactttgcctgctgtattcaaggctcctattcgaccagatattgtgaactttgttcacaccaacttgcgcaaaaacaacagacagccctatgctgtcagtgaattagcaggtcatcagactagtgctgagtcttggggtactggcagagctgtggctcgaattcccagagttcgaggtggtgggactcaccgctctggccagggtgcttttggaaacatgtgtcgtggaggccgaatgtttgcaccaaccaaaacctggcgccgttggcatcgtagagtgaacacaacccaaaaacgatacgccatctgttctgccctggctgcctcagccctaccagcactggtcatgtctaaaggtcatcgtattgaggaagttcctgaacttcctttggtagttgaagataaagttgaaggctacaagaaagaccaaggaagctgttttgctccttaagaaacttaaagcctggaatgatatcaaaaaggtctatgcctctcagcgaatgagagctggcaaaggcaaaatgagaaaccgtcgccgtatccagcgcaggggcccgtgcatcatctataatgaggataatggtatcatcaaggccttcagaaacatccctggaattactctgcttaatgtaagcaagctgaacattttgaagcttgctcctggtgggcatgtgggacgtttctgcatttggactgaaagtgctttccggaagttagatgaattgtacggcacttggcgtaaagccgcttccctcaagagtaactacaatcttcccatgcacaagatgattaatacagatcttagcagaatcttgaaaagcccagagatccaaagagcccttcgagcaccacgcaagaagatccatcgcagagtcctaaagaagaacccactgaaaaacttgagaatcatgttgaagctaaacccatatgcaaagaccatgcgccggaacaccattcttcgccaggccaggaatcacaagctccgggtggataaggcagctgctgcagcagcggcactacaagccaaatcagatgagaaggcggcggttgcaggcaagaagcctgtggtaggtaagaaaggaaagaaggctgctgttggtgttaagaagcagaagaagcctctggtgggagcaagatgcgccagtcttctcccatcagccttcaaagttctcgtttgaatatttgctactaccaccaagatcctgatgggagaagatggccagtcttctcccatcagggtagttaaatgataagtgttgagagcagttcagaatgacattcactgaaggttctggggggatatattcccatggagtcgagggacggagatcaagaagacttcctagaagaaatgggagacatttcagctgaattttctaggatgagtacagtacagtcacttaaataaaaacagatgctgatgggagaagatggcca

SEQ ID NO: 544978 - DNA, 1047 bp, Homo sapiens
  misc_feature (1)..(1): n is a, c, g, or t
  misc_feature (790)..(790): n is a, c, g, or t
  misc_feature (869)..(869): n is a, c, g, or t
nccgtctgtgaccgccgccagtggatcccttgttgcccgtgtttgtctactctctccttcgcgattctttggtcgttttcctcttttttcccgcttgttctctccccccctgcctggggtgttaccccccgggttaggtatgttctccgcccccccattttggccccgcctttgtccttggggactcctctcgattttatggtgggcttgacacttttagtatcttggacccgtctccccctcgaggtgttcacaggtcccccgagaaagtaaacctgcctctgatgaagttgcttccgattgatgataagagattactattgaacgatgagtggatgatgaagagatttgatgatgaggaagcctgaagcaaacgccgcccttgtagacatcttatacgagatactcccgcccgaatgcccacaagtctcaatccgaatggaaaagactccgaccatcatcgacccccagatcccaaggcccagaatccttccagaaaccggttaaactccttgaccccccaaggacctagttctgtagaagacctttaacccccaatgccacccagtatagaaaaaggtggttctcttccccaagtggaagcccaattcctccaattatgtgaagaattgcttcccggatgacctgcaccccagaggctattccagatctctgcgccagtggaggaagtctcctttaagaaaatagtttaacaccaatttgttaaaaaattttccctcttatttcactttctgtaaccacgttgatatctggctgtcccttttataantgccacgagtgagaacctttccctacccgctggtttgagtaaaatgttgtcccacggtttctatttgccccagaaagtngttgtcccaaatgccgctttagtttttaaagatggaactcccccctcttgcttggttttaagtatgtatggaatgttatgataggaccactagtagtagccgcgtggtcagaccctggaaatggtggggagccccaaaatatacatgtgaaattaaactccgtattttaataaagtta

SEQ ID NO: 544979 - DNA, 1279 bp, Homo sapiens
gccgggctgagaggagcgtggctgtctcctctctccgccatggcgtgtgctcgcccactgatatcggtgtactccgaaaagggggagtcatctggcaaaaatgtcactttgcctgctgtattcaaggctcctattcgaccagatattgtgaactttgttcacaccaacttgcgcaaaaacaacagacagccctatgctgtcagtgaattagcaggtcatcagactagtgctgagtcttggggtactggcagagctgtggctcgaattcccagagttcgaggtggtgggactcaccgctctggccagggtgcttttggaaacatgtgtcgtggaggccgaatgtttgcaccaaccaaaacctggcgccgttggcatcgtagagtgaacacaacccaaaaacgatacgccatctgttctgccctggctgcctcagccctaccagcactggtcatgtctaaaggtcatcgtattgaggaagttcctgaacttcctttggtagttgaagataaagttgaaggctacaagaaagaccaaggaagctgttttgctccttaagaaacttaaagcctggaatgatatcaaaaaggtctatgcctctcagcgaatgagagctggcaaaggcaaaatgagaaaccgtcgccgtatccagcgcaggggcccgtgcatcatctataatgaggataatggtatcatcaaggccttcagaaacatccctggaattactctgcttaatgtaagcaagctgaacattttgaagcttgctcctggtgggcatgtgggacgtttctgcatttggactgaaagtgctttccggaagttagatgaattgtacggcacttggcgtaaagccgcttccctcaagagtaactacaatcttcccatgcacaagatgattaatacagatcttagcagaatcttgaaaagcccagagatccaaagagcccttcgagcaccacgcaagaagatccatcgcagagtcctaaagaagaacccactgaaaaacttgagaatcatgttgaagctaaacccatatgcaaagaccatgcgccggaacaccattcttcgccaggccaggaatcacaagctccgggtggataaggcagctgctgcagcagcggcactacaagccaaatcagatgagaaggcggcggttgcaggcaagaagcctgtggtaggtaagaaaggaggtctcctttggttaagagcggagaggcctcgttggaaaaggaaccttccaggacccgcctgaaggactgcaggaggacctcacaggggagag

SEQ ID NO: 544980 - DNA, 2344 bp, Homo sapiens
gccgggctgagaggagcgtggctgtctcctctctccgccatggcgtgtgctcgcccactgatatcggtgtactccgaaaagggggagtcatctggcaaaaatgtcactttgcctgctgtattcaaggctcctattcgaccagatattgtgaactttgttcacaccaacttgcgcaaaaacaacagacagccctatgctgtcagtgaattagcaggtcatcagactagtgctgagtcttggggtactggcagagctgtggctcgaattcccagagttcgaggtggtgggactcaccgctctggccagggtgcttttggaaacatgtgtcgtggaggccgaatgtttgcaccaaccaaaacctggcgccgttggcatcgtagagtgaacacaacccaaaaacgatacgccatctgttctgccctggctgcctcagccctaccagcactggtcatgtctaaaggtcatcgtattgaggaagttcctgaacttcctttggtagttgaagataaagttgaaggctacaagaaagaccaaggaagctgttttgctccttaagaaacttaaagcctggaatgatatcaaaaaggtctatgcctctcagcgaatgagagctggcaaaggcaaaatgagaaaccgtcgccgtatccagcgcaggggcccgtgcatcatctataatgaggataatggtatcatcaaggccttcagaaacatccctggaattactctgcttaatgtaagcaagctgaacattttgaagcttgctcctggtgggcatgtgggacgtttctgcatttggactgaaagtgctttccggaagttagatgaattgtacggcacttggcgtaaagccgcttccctcaagagtaactacaatcttcccatgcacaagatgattaatacagatcttagcagaatcttgaaaagcccagagatccaaagagcccttcgagcaccacgcaagaagatccatcgcagagtcctaaagaagaacccactgaaaaacttgagaatcatgttgaagctaaacccatatgcaaagaccatgcgccggaacaccattcttcgccaggccaggaatcacaagctccgggtggataaggcagctgctgcagcagcggcactacaagccaaacagataagaaaagcaagaatgactgacaaagaagccttattgagaataatataaagaagaacggctacattaatcacctaacaacgaaccacgaatgaaagagagaaaacgagcaataaagctaaaaatgccaagcccgaagggtagtcctgaccagagtaagaaaccttactacagtagggagatgaagcctgcttggcttaaaacttctttttgattgagtgattccagaagtgaagtgataaacaatggaaactgctaacgaaatataataaaagaccaattaaaaaggtagtatgaagaataatgaataaatattgataaatatgaaaatggaatataacaaaattgttgaaaaatgtataatgaattgaattgaatgtaatgaattgcaacgtacgaacatcaagggggtggatgcactcttggttcaatgggtcacactcctcgtctaattgtgcgcactcttcattgctgtaatctctgttccaccacgttcgaaattcatcgcacaatttgctctcccgtctcaatatcaaacccatctgcgcgtagattcagaccgatcgtcggcgctcttcgtcattttttccatctcctcgacacaaggcgacgcgcgcgcgcccaacggcaacaccacctggcggctcacattgctccatccacaacatcacaattccaccacccttcacaccccaatctccacagctgcaattccacatttgcggcgcggcacgctcgcgctttctaacattgctcgccgccccactcccatcgcatttccacgcaatttccgcatccccacggccacttgcaaactgcgggcgtcagggctgtctctactttacttggtttgtcaatttgttaattgctagtcactgtacatgctacttttcttcccaactcgtgaagtctggccactgcaaaattgctaagtgaaactgcgtatggcatttttgttgccaatttgtttatccacacgtcgcgcgccggccttttacaaccttggctacttcctttgccacatttcaaccctttaacttgcttgccttcgcccttttttccatttctttttccttcttctccttgcggcctgccctgtcacccctgttcacctctgcgcccttgcgttacctggctttcgcctctttctttcccttcccctgtggtttgtctctctttgttctgcccgtcgccgtcgcggcctttcgc

SEQ ID NO: 544981 - DNA, 158 bp, Homo sapiens
gtctaagctcattctgtttgaattatgaccaagtagcccatgttttccagcatcgaaagtaaacagcagcacatcctgtgtgagtagggcactgtgagagccactcacaagcgacaatattcaactttctgattgtctaggaagtataaggcgttgag

SEQ ID NO: 544982 - DNA, 140 bp, Homo sapiens
tacagaggattatatctccttcgcttatgaaaggttatgttggtgcatatgaaatactgggttgaaaacttctttatctattacagaatgtagtatatgggctcccactctattctggcttgtagggtttctggcagaga

SEQ ID NO: 544983 - DNA, 319 bp, Homo sapiens
gaagtataccctccccatttgactgtgaactttttggctggattctggagaacattactgaaggggtgagttgccctccacacctgggagtgttctcgttaggtggaatgagagacttggaagagagacatagagacaaagtatagagaaagagaaaagggggccaggggaccgcgttcagcacacggaggatcccaccggcctctgagttcccttagtatttattgatcattatggggtgtttcgtcggagagggggatgtggcagggtcataggataatagtggagagaaggtcagcaggagaacgcgtcaaaatcg

SEQ ID NO: 544984 - DNA, 1477 bp, Homo sapiens
  misc_feature (1477)..(1477): n is a, c, g, or t
ggcagggagagagtgtccggctggcagtgccgagagttgccgaggacagggcgccgctaagccgaggaggttctgctgggagaatctacgggatgccctggtggaggaggctgggccagaatgtacgcatagagtgaccggtattcagggtggacggccctgatcgctagtagactgaagtgcaggccgcagtggacagcaatggtggacgccgaaggtgaatgccgcgtatagcggccaacggggctcgtatgctgcgtcaagtgactctacagtcatatgtggtaccgggactagccacgtgcaaaggagttcctgacctgcaggagcaagtactatcaccgtaccgatggctgatccagggtcaaaacggtttggccgtaccgttctcgtagcagatgtgaccattccggaagacgacctgtcggccgaaggtgcttcaagtagcgccttgtgacagagggacttgtggatccaaccgagtcgcctattcagagacagacaaccgctatcctatcgcccttaatgcgcacagtggagatcactcctgttgagtcaacttgggacgaagccctaccaaggggccctaacttgaacaactcggtggatcagcttagctttcgttgctcctgtgctttggcgaaatttgagcgcgacagaactacacttgtattacccctaatacattggtgtcgttacatctcgtggagactgggttttagagaggcattggcgaacttctaaagaatccaactccaaggagggtgaccacctcggtaaggcaagcaaacgtcgtatgcataccgtaacaaggtgtttcgcgatggcgggatttgaaggcctttacatcggttggcctcactgtggggcatctctttgtgacacgccccgtctctgtgggacggtctcaaagcggattcgaactcttgggccgttggggggatccggtgtctgcagaacccttgctccaggggtagactttgcggggggaccaaggtggaccaagggattacgttcacctaagaaggggaattgggggcgcccatgagggtcaattcccacacaagagcttgtgaacataacacgcggaacctacagggcaaacataacacagcttggtggttgcccaaggttaccgaaacatgtggatcgttgtgtggacaaaacaaatcgacggcctacacagggctcaacagtttttagggaagtaggggtagtagaacccacgtggtcctgaagtgcactaatatgtaagtaacgggtcctgagcctacggtaccacgtactgattacacacaccagcttcgcgctgtttgctctgcgtcgtgttcttcgactacacagacagcacatagccgcaccccaaactacacaatactcaaatgatattagtagtagagacagatacattgcttgaaacaaaagagtcaactaagacttaactaatcatagtagcagactacccactaacagaaan

SEQ ID NO: 544985 - DNA, 182 bp, Homo sapiens
agacctagaggacccatgtctcatggaacactcttctttcttagccttacttgaatcttgcctataataaagtagatgcacacacattgaaagcttcttgatcaccggcctgaaatttcatcttgaatgtctttgtattaaactgaatttcttttaagctaacaaagatcataattttccat

SEQ ID NO: 544986 - DNA, 622 bp, Homo sapiens
cccccaaaatacaagaaagacctattctctttaacggctaagcaaacttctcttgctttcgtctgtcattttaaatttaattacttagaatcagagtctagtggcaaagtttcacctcaaatatttaaatagcatgttttttaactggcaataccttttaaacaataatttgtggactttaaaacaaagatgatgactgactcttccaacagagacattctgggagaatttaatttggtatcatcctgaactcgctgcattatcatgcagctcagggtagaattgctactctgcacacattagagatgtggccaagatgtagctcaggtgaagtgaaataattaagccaataatgtatgaccctccaggatgtgtctcttgaatagatggaattagaatacggaaattaatccatttccagcatggattgagttaatgaactttatattgtaatgaagactacttacattgtctgaaaatttagagttctaactatgcacaattggattaacctatatgcagggcctgatatgtgctcataaaaccgctcaccaatgttttcatgtgaccaaagataaacatgcaaatagagtaaattggccaaatgctgtgcgcttacata

SEQ ID NO: 544987 - DNA, 263 bp, Homo sapiens
  misc_feature (7)..(7): n is a, c, g, or t
  misc_feature (69)..(69): n is a, c, g, or t
gagtagncagaaacttgcaaggatatgtggatatttggaaatggttgtttcccaagacaggatggaagncttttaagcaagaaacttggcccatgctatgaagtcatgaaatgaattgttggcatcatgtgctcactgaggctttggggaaatggataagttgtcattgaaaaattttaaacagaattctggagtggtcaagaggggaatgcttttgatacccatgtataacatggagaataatgatcttaaaacttcaattt

SEQ ID NO: 544988 - DNA, 405 bp, Homo sapiens
  misc_feature (108)..(108): n is a, c, g, or t
cagacccaaagtaaaataaagaaaaattatgttacccttagccattaacagaaaaagactagagttcctagtgtaagcatcctaataaaagaagaagttcaagaaccnctatccagaaccagtatttcagactttttatgatgaaataaatgtgccagtacccgagattccaggaaaaactaaaaatttgtttttgcaattagccgaacacatagcccagtctttacaagtcacttcacgttatgtttgtggaaaaaccgtaacaggagatcaatggccatgggaagccccaaaattagttcctaaagacccagttcctgatgaattcccagaccaaaaaaatccccctgatcatctttaggttttaaaagtctcaattattagacagtattgcatatttaaaga

SEQ ID NO: 544989 - DNA, 1020 bp, Homo sapiens
gacactgtggtgttcgagaagtcaggcacgtagctcagtggtggacggggcgcgtgcgtttgtgcctctgacgcgggtctccatggtcctttctgccatcatgccgcatgttcatctgatatcacacttcaacgctgccccagcgcctccgctgccctgagacggagatccgtcgtcctgaattcgtccaccccatagatcttgggccgcgagcgtgcacccggcagagccctcccccagtatacatctgacgtgatgtcatcgatgtgctcccagagaccatgattcgatgtgaccattcagcgctgagcatccaagcctgaagacccgtttgctgccgcatcgtgtcaagcacctgacaatcagtccatcagagcaaatgtatcagtgcaggtcagccgacatggaacctgcatctctttaccagacaaaaggactgcatgatgtctgtgcactgccatggaccagaagccagccctgcagcactcaagtctcctgtgaacagtggatctacctactcacatcattatttatcagaaccatggataccagcgagacccaactgttagtgtgtctgggtagatctacactcacacccttttctgccttcggaagcccgcctaagaggaaccccacccgcttgctcattgtgcttagggcttcccatgcccgtggcataccccggtcgaccacgtctgtggttcatagcggcaccgccacatttcctccacaggcttcctgcgtgtgggtgaagagaataaagcaggtttttacgcatgatctttataactaaatcttccccttaccaagatctcctttaatatattaacatttcagcgaggccaacagaacgtgagtcgagtagtaaaataagtcctttcttttcggaaggcccacagtttattccccccagctttggggtaatcaattcaccccgattgaggcacaacgagggcaagaaacgccttggaacgccaggcacagtacttttccctatttctaacacccctaagggagggc

SEQ ID NO: 544990 - DNA, 388 bp, Homo sapiens
  misc_feature (65)..(65): n is a, c, g, or t
  misc_feature (72)..(72): n is a, c, g, or t
  misc_feature (77)..(77): n is a, c, g, or t
  misc_feature (98)..(98): n is a, c, g, or t
  misc_feature (137)..(137): n is a, c, g, or t
  misc_feature (157)..(157): n is a, c, g, or t
  misc_feature (231)..(231): n is a, c, g, or t
  misc_feature (233)..(233): n is a, c, g, or t
  misc_feature (253)..(253): n is a, c, g, or t
cacgaggcggcacgctgctgttcgatggcgaggcgcgcgtgctgcatctggcgctgcccgagcangccgacnagcancagatcaaggaccgcgtgcangcgtggctgcagcatcaggccaagcgcctgctggccgancggctggacatctacgcggnaaagctcggcgtgcggcatcgcgcgttcgcgctgagctcggccaatacgcgctggggcagttgcacttccgacngnaagatccgcctgagctggcngctgatgcatttcccgttgtcggtgatcgactatgtggccgcgcaccacctggggcacctgaatgaaatgaaccacagtccgcgcttctgggacacggtggcgtcgattttcccggagttccgcgacgcacgcgc

SEQ ID NO: 544991 - DNA, 431 bp, Homo sapiens
tatcagagcataccctagagcactgggtaactagcagtcccagcccgacttgtccctagctgccattctcagccctgtgggaggagacagaaagacctgaagaaaaaccaaaggaccaggtcaggaggggcgggggtggcatgagcaatcaggacagggaaggatggacagatgggggaatggagggaagaaggaatgaatgaaaaggtgaatgaatgaacagagagagagagcaggcactcctcccttgctttaatttacaaagcactgggatcctcccaacagcctgcaagacagaacttctgggaagcagaccaggtggctggcagggaggggaggcttgccctggcttttgtgggcccagtgggaggcagggagcaggaaggggcatcctgtatgtgtcctctgcagcagcagcagcggaggcctcc

SEQ ID NO: 544992 - DNA, 610 bp, Homo sapiens
cactttagtttcgcgacggtcgtgtatcgtggcgctgttttttgtttcctgctttcggtgtggcccccttttgtgtcgtctctactggtgggtggcgaagctcgcccttggccccccctctcggtgcccccggtttttcccctcttggcgtgtccccccctagcggcccgctttttggggacctcccactttgtgcgaccctattaggttccttgcggtccgtcattcctggtttccctcccccgggcttgtaatatgcgccccggtggagggaactctggccccctggggtatatataacccgttcccccgcctcctcccctctttccccccctcttgtattccacgtgcacacattggcctcctccccccctaataaatctctgtcttgacaaaaaaacactctaccaaacaagcatttgtcttacactattggccgaaacaacagagatctttatggggaaaatttcttcgccgctattcaagaccacttttctaaaaccatttttaccccttattttctcaataaaaatcttttataccccctattttttcacccccttcctaatctatatcaccaaaaacaaaaactccccccaaataaacaaaa

SEQ ID NO: 544993 - DNA, 323 bp, Homo sapiens
agaagccggcggatcgacatgtccgcccgcctgcgtagttggcgaggaacagattattgagaatgcccgtggtttggccgttgcagtgatgctcatcaagcacgcccaaagtggcactgctcatctcgctgataaaacgcaattttgcggcgtctggttcggtcgcgtccgggtaactgcccgatacgctgcagcctcccagaatcaatacaaaagccacggtgcccagtgcacggcccgcaaaaaaactactcatgatggggtgtcatccttaacgctgaaggtgagaaatgccgcattataatgggcgagtcacattttgt

SEQ ID NO: 544994 - DNA, 549 bp, Homo sapiens
ggggaaggtagtctggattcacgccctctggttgactacccatctgcaagaagggacactgtctgattaggaacggtggaagctagagatggacaggttatccaacgaagacttctcagcatcacggagtgaccttgtaataccatacatggcacacactcagtgcaggaatatattgaccagtcaagaatgaaaaaagaaatcgcatatcttaaagaatactagctttcaagtgcctttctgcggtcttttcaggagcggaagatagattgggaataggaatagaggctctagttcttagacaatccgacactctctagctaagattgtatgaaaacaagagttgacaagcatagtctagtttacagaaggagtcttgtggctaggaatacgtttttaaagaggtatgtggaatacatattaaaacgtgcttgctttgttttccatggctaagttgtccaaacgcaatctgtgggtgttcggctcccagatgaaattctttgggcaaagacactaagaaagaacataatgttcacaagagaaagacgg

SEQ ID NO: 544995 - DNA, 527 bp, Homo sapiens
  misc_feature (280)..(280): n is a, c, g, or t
  misc_feature (350)..(350): n is a, c, g, or t
  misc_feature (364)..(364): n is a, c, g, or t
  misc_feature (501)..(501): n is a, c, g, or t
  misc_feature (513)..(513): n is a, c, g, or t
aggagtgtgcccttttaatctttactagttattgtgagattgctgtgtaagctaataaacacatttgtaaatacattgtttgcaggacgaaaacttctgagttacagctcaggaaaagcctgctgaatttatgttgtaagcatacttaacacagtataaagatgaaaagacaacaaaaatatcttcatacttcctcatcccctcatggaacaaaacctaaactgggagaaccttagtcccctctcttcctcttcctcctccacttcccactattgtcacntgtaatatcagagagcactggattaggatctgaatagagaatgcttacagataatcatagcccactaccntaactaaagatggnggagttgtaaagtgctttataataccatataatgttaaagcaggtgacccttgtttatttgacaggcagtcctgaaataatatgatcatacgaaaaagtcgacgcggcggattcgtatcagctatcgtacgtcgacncgagggggccgnaccattcgcccatg

SEQ ID NO: 544996 - DNA, 100 bp, Homo sapiens
atcccctccccgacgcccaatctgactgcttctaccacctcctctgtcatcacctaggtccaggtttctatcatgtctcccacagattaaccttctgtgt

SEQ ID NO: 544997 - DNA, 135 bp, Homo sapiens
tccaaaaaacatataaggaaacaaaaaacaaaaaaaccgactgttactcattgtgatggagtcacaatagtctatttggagaatatcaggcccacagcttctattgtctatttaatagcttgcccacagtcttcg

SEQ ID NO: 544998 - DNA, 165 bp, Homo sapiens
actcaacagtcatacatagctaggtgcagatggttcagcctataatcccagctctttgggtggctgaggtgggaggatggtttgagtccagagttggagaccagcctaggcaatatagggagaccccatctactgtgctcccagttactcaggaggctgaaatag

SEQ ID NO: 544999 - DNA, 897 bp, Homo sapiens
ggcagataattgagaggcttagggcctggtggctaggtcggtctgctctcctttgccagtctggagacctctgccgaaactatgctcttcgcatgatcatgcggtcaggccaagaagcatccgatgcttgatccccctcttgtatttgatggaactggcgctagtggagcagcactgtatctcttgcgtctggtcgattgtgcaatccagagtgtatgtagggacagaaataaccgcagagccctgtgaacaaatctgggtcccaagttgatcaatgacacagttctgactcagttgactgtggattacagcagctgaagaaggaacgtgccagattactaaagtgatgatgtcaatataacgttgcttgagaatgaaggtctttcaggaagccaatccgagaatgtgtcatacttaaccaggatatatttcatcttctaaatgcatgaaatcgatgtgggagatctctattgtaatctctatggagatttaggatgatttaagtcataacttaaatgatgccagaattaggggttctaaccttcggtgcatgtgggagaccttgaaatcttgaaagaaaagttctcggggtctggggggctttgtcaggaattcatcgacgaagagatctcttgaccgggttaggctgggccggctaaagggtgggtaacgcgcaacatggacagcccggctgcccgtggaagccatccggggggtttggcgcctgcgggtcaccacggctcgccactgcaaatgagcggccgggcgagcttgggaacggaaggcgcccctttctgaaggtgacccaactgtcagaaaaggcggcacaaaagaaagagaagaggcagaaccagcgagcaacaaaaagcgcagacgaaatcaacagaccatcaacac

SEQ ID NO: 545000 - DNA, 372 bp, Homo sapiens
ctaagttctaatctcaggtgatctgcccgcttcagcttcccaagtagctagggattacaggcatgtgccactatgcccagcgtaatctttctttcttttcttttcttttcttttctcttctcttctcttctcttttctttctttttcattttttgagacagagttgctctgttgcccaggctggaatgcagtgatctgatcacagctcactgtaacctccaactcaagcgatcctcctgccctcagcctcctgagcagctgggactacaggcacgtgccaccatgcctggccaattttttattttttatacagccggagtctcattatgtttctcaggctggtctcgaactcctggccattcaacgcctccg

SEQ ID NO: 545001 - DNA, 230 bp, Homo sapiens
cattttttttccagcccccccccttttaaaaattcttgaccaaagatcccagccaggccctggaggtttgacagcccctccctcccaaagggggttcctccctgggagggcaatttaagggggggcccccccccgggttccccatccccagttgaagtttaatgaattaaagtggggcctttatcccaacgggttcctttttttttcaaaaaatgttgggtttggtaata

SEQ ID NO: 545002 - DNA, 231 bp, Homo sapiens
aacgaggaggagacagagaacctgaggcaacgtgagatcgccgccgccatgcagcagatgctgactgagagctgtaagagccggctcattcagatggcctatgagtctcagaggcagagcctggtccagcaggcctgttccagcatggctgaaatggaccagcggttccagcagattctgtcatggcagcagatggatcagagcaaagccatcagccacatccttcaggag

SEQ ID NO: 545003 - DNA, 166 bp, Homo sapiens
tcgacagcactggagcaggtacttcgcaaaagctgatcaaatagtggctgggcgcagtggctgacacccataatcccggcactttgggaggctgaggtgagcggatcacctgaggtcaggagttcaagatcagcttggccaacatggtgaaacatggtctctacta

SEQ ID NO: 545004 - DNA, 158 bp, Homo sapiens
tttgccagagagagacagactccagacagcaatgtcagagggctcggcctgtcattgcctcccagagagaactagactaggaaatagaaaggcagtggcaagccactagagggttctctacgactacccattgcttaatacctcactcttatccctaa

SEQ ID NO: 545005 - DNA, 331 bp, Homo sapiens
ccgcgaccatggcagtgaccacggagctcttacagatggacctgtacgcgctgttatgcattgaggagaaagcagaggacaaagaggtaaagaaggcgtataggcacaaaggcctcttctggcacaccagacatccagataattccaaagcagctgaactcttccaccaactttctcaaggcttggaagtgctgaccgaagctgcaaccagggctggatatgacaaggtcaggaaagccaagaagcaagcagccgagaggacccagcttgatgagcaggagagatgaggaggaagaggagagcccgagcaccaggacacttgagcgagagg

SEQ ID NO: 545006 - DNA, 111 bp, Homo sapiens
ttaaccacaaccttcttgccaagcacatcacgtaccacatcaccgtctcgccaaccacatcaccgtcttgccaaccacatcaccccacatcaccgtcaaccacatcaccgg

SEQ ID NO: 545007 - DNA, 174 bp, Homo sapiens
gagcccctatgtacgtcatgggtgtgaaccatgagaagtatgacgacagactcaagatcaatcagcaaatgcctcctgcaccaccaactgcttagcacccctggaacaaggtcatccatgacaactttggtatcgtggaaggactcatgaccacccgaacaccctcctctttcg

SEQ ID NO: 545008 - DNA, 112 bp, Homo sapiens
  misc_feature (70)..(71): n is a, c, g, or t
agaagagcggggcaaaagaagaaaaaaaaccgcgagggaaatgtgttaacaaagcccacgggcaaaaatnnaaaagggagcctttgaaaaaaaaaagaaaacccccccccgg

SEQ ID NO: 545009 - DNA, 898 bp, Homo sapiens
gtcttagttgaccataggaacatcacgaaatcatgaactactttggtaatgaagagtgtgactgccacttcctcgatgaagggttctaactgccaaggacattctgggaccaagaagagttagatgaacgttatcttctgtctgtatgataaggatgccttctatgtggcagacctgggagacattctaaagaaacatctgagagtggttgagaagctctccctcgtgtcacccccttttatgcagtcgaatgtgaatgatagcaaagccatcgtgaagacccttgctgctaccggtgacaggcatttgactgttgactagcaaggactgaaatacatgtccggtagcacgaagtctgggaggtgcctccacgagaggacttcatctatgcaaatccttgtaaacaagtatctcaaattaagtatgctgcctcagataagttggacgtccagatgatgacttttgatacgttcaagttgagttgatggaagagtgggcgagactgcaatccgcaatgagcaaagtgggcgttgcggatgcctactgatgatccctgaagcgagctctgtcgtctcagatgtgaagattcggtcgccacgctcagaacatgcaggctccttttggaacgggcgatcagagctaaatatcgatgttgtaggtgtcagcttccatgtaggaagcggtgtaccgatcctgagaccttcgtgcaggcgatctctgatgcccgcgtgtgttttgaccatggggggcttgaagtagggtttcagcatgtaatctgttgatattggcggtggcttcctggatctgaggatgtgaaaacttaaatttgaagagatcaccgggggtaatccacccagcgtggacaattacttccggtcagaatcttggatgagaatca

SEQ ID NO: 545010 - DNA, 100 bp, Homo sapiens
agaggaccttctctaattatcagtgaaatcgaaaaggaaaaagaaaaggaagcatgacaatagtagaatctcacttcagcatttgtataattttttataa

SEQ ID NO: 545011 - DNA, 121 bp, Homo sapiens
aacttttatacagctctgcatgaaatattatgctgccgagatagaaagattagaaagtaaagaaacacagtgaacaaatgctttttcataagatgtatttcaagattattacatactttta

SEQ ID NO: 545012 - DNA, 620 bp, Homo sapiens
agcggattgttccgggagccgtcaccacagttaggtccctcggctcagttcggcccagcccctctcagtcctccccaactcccctacaatccgcacacgcggactcatgagacgctggctcccggacggtcgagcgagcatgcagttgcaggactatcactcgtccaccccctcgccatgcccaatgtgaaagacctgtgactcgggtactccatcgtggttctcagttcactcgagactagtccagcgccacaggtccgacagcgcccgcggttcaaagtaaccgaagttcagtagagggagagtcgccgaggagcgaggacggaatgagagaaggacggagcgaaccgagggatgacctgaagggacggcaattgagccgtggcatgagcagagtcgtgggaaaaagctgcttcgggacagagcgtcacgcgccagctggaccgggacctgtcccgcgcgtgcccccagatgatcccagagccgatcaccaatggcccgagctcaggtcggcggccctacatgacatgagatactggtcgagtcaacatgctactttcagattaccgccgtgttgaccccccgtgtggtagccacatgaactgggccgaggcatccaa

SEQ ID NO: 545013 - DNA, 1212 bp, Homo sapiens
  misc_feature (208)..(208): n is a, c, g, or t
  misc_feature (446)..(446): n is a, c, g, or t
  misc_feature (487)..(487): n is a, c, g, or t
tgctgctgtaacccgagttcgcgagccggagcctacagtcggggaatgggtgtgccgtggactggtcctgtgatgcctggcacgtgtcctgtgtggcgttcccacgtgatacctggcgtgcagtagagtcgattcctggggccccactcagtgctgagttgactgtactaccgttgcttgttcgtaggtcctcctggaccatctcatngactctagtagtgcataggaacttgtcgaggatgccgggtctaaagccccttcgaacgggcctgcacgggagatcgccatctcgttcacttctgggtttcatatcgtggtaccttcattatcacgtgtcatacctttccatggctccatggcgagtctgtacttggcttcagtggcctcccatactcatctatagaactactagctaggcgattcactacttccctggaaaggtcaanattggcctattccgtctatagtcttgtggcgcttgccttcntatcaggtcctcgtttggggcctaagtggcctcgctccccttgctggacttggcctgggtcgcaatgacacttcttgtgtcgctactttctaccgctgtacttactcactatgtctgcttaaccaaattctctcaagactactttgtgctagctaagtggggcgagcacttggtgggctgtccacggccctgttcttcttcgagcctgtcgaggcctggtatttccctgagcaccgtggaacggtcttgacgttccgctgctggagtggaatccccatgtaacctttgctcgaagcttggcttctggaaccctgtgcctgggtggtagtgggccgggtgtgtgtcaggctaaggcttgaaggcgcgccgtggaatggcgctgtgggccgtgtatcgccccttgttgggctgtgcatcccactcccgggtctgcacggggccttgtgcccttgaacttgggcggacgattaccgggcgtgccctcacaaggaccgggtggaggacatggagggaaccgcgggaaaccgagggtggtgtgggacccaaaaaacctatgaagaggagtcacaatagagatacctagagagctggttcaagagagcacacagatatacccaaacaaaacggtggtgctgagtacaacaaaaaccaagcgcgagaagagagattgtttacagacaagggcaaaagtataaacatacgcagagtggatcctacgatctctt

SEQ ID NO: 545014 - DNA, 322 bp, Homo sapiens
tgctcttgaggaaaaactacggtctgctatatctacatgttgaacaacagcattaaacatgccatgcgcggacgctcacgcatgtaatcccagcggtttgggaggcttaaagagagaggatcgctttagcccaggagttcgagaccagatagggagacccccatctctacaaaaaataaaaaaattagttgggcatggtggcaaacacctctggtcccagctacttgggaggctgagataggaggattgcttgagccagggagtttgaagttgcagtgagctgtgatcatgccattgcactccagcctggacaagagagtga

SEQ ID NO: 545015 - DNA, 1254 bp, Homo sapiens
  misc_feature (8)..(8): n is a, c, g, or t
agtttttngtgttacaccctagactacttacccttgtgctgtattatgttgaagcaagtccaagttataacatttcacttgtaaatatttcaatgtatttttaaaagaaaaaattttttgtcagtcacaataccatcatcacactctataaagtttttttttcatataattctataatatcaaatatgtagttagggttcaaatttccagttgtttcataaatatcataagtgtgtgtcttaatctgttttgtgttgctgtaaaggaatatctgaggctgggtaatttataaagaaaagacgtttatttggctcatgattcaggggctatacaagaagcaccgtgccagcatttgctaggcttctggtgagggcctctcacagcttctactcacagtggaaagtgatgaggaggtggtgtttgcagagatcacctggccagagaggaagctagagaacaagagtcaggctctttttaactaccagctctcctaggaactaacctagggagaactcattcactcttccctgccccagggaggacaggacattaatctattcatgaaggatccacacccatgacccaaacacctcccattaggtctcacctccaacgttagagatcagatttcagcttgaggcttggagggatcaaattcaaaccatagtagtatgtatgtgcttttaacagtttgttgaaccagggtccaaataaagtctatatgttatattatgttttgttaagtcttttaaaacctttatgtactccaacactcttttatccttgtgttttatttgttgaataagctgacagtttattctgtgaagtttcccccattctggagtttgccaattcttttcctgtggtatatagtttaacatgttattttctcttcatatcctgtaattgtgtagttaaatctagagatttcaacagatatttggtggggggatgtcaggaagagcaaggcgactttacgggtggtgatgtgttctagtatgatgtgtttcattatatttgattgtctctcttagcagcagttgtttgccaataccaattatttgctggtaataagattgtctcagaaataagctttttgttgacttgatcatctattcattttctacttccagggctaacaattccatttgagtaaattctacatcattttatggatgaaagaaagaagtgatgttaacatatgtatttgtgtgtgtgcgtgtgtatgtatacattatatcttttctaaattta

SEQ ID NO: 545016 - DNA, 185 bp, Homo sapiens
cacagaaatggctggaatagtgaggtcagatacgtgcttacatattttttgtcagagaacgattcttggtcacctttggcgctgtatgaacggtggtagtggcatggtatcggcagagctgcaacggtgtaatcaatagaagcttaaaaatgccaaagagtgtgttgataagtggggatctctaa

SEQ ID NO: 545017 - DNA, 143 bp, Homo sapiens
ggtatgtgtgtgtgtgtgtgtcctgggaaagcactcaatactctgatttggaagaggtgtgtgtgtgtgtgagtgtgtgtgtgtgtgtgtcctgggaaagcactcaatactctgatttggaagaggcgtggtgcggatggaag

SEQ ID NO: 545018 - DNA, 305 bp, Homo sapiens
  misc_feature (153)..(153): n is a, c, g, or t
gcatcagatgtctgagactgagacacaaagagtgaaatggtgttctgcttactgatgacttacttgtgaatcttctctggtcaaagctcccaactgagcacttgtgaccctgtccttgctgcagagaacacccctttgactgaattttccatnacctacccaaattctataaaactggcccacccctatcttcctttcgctgactctcttttttgggctcagctcgtctgcacccaggtgattaaaaagctttactgctcacacaaagcgcgtttggtggtcttttcacacggatgcacaaaccc

SEQ ID NO: 545019 - DNA, 844 bp, Homo sapiens
atggcacatgcagcgcgtgttggtctacacatgaagctacttcccctatcatagaagtagcttaatcacctttcatgatcacgccctcataatcattttccttatctgtttcctaggtcctgtagtgcccattttgtcctaactacatcaaggaacaataacttaactaatacataacaatctcaagacgcttctaggtgaagatagacaacctgtcttgtaatcgtgttccttgtccacggcctatcaatccatagtccatccatcgccctcccatccctacgcatccttttacataacagacgatggtctacgatccctcccttaccatcaaatcagatgggcagcaatggtactgaacctacgagtacaccgagctacggcggactaatcttcaactcctacatacttcccccattattcctagaaccaggcgacctggaatccttgacgttgacaatcgagtagtactcccgattgaagccccattcgtataataattacgtcacaagagtcttgcagtcatgagctgtccccacattaggttagaaacgagatgcaattcccggacgtctataccaataccagttttcacgctagacgaccgggtgtgtatactacggtcaatgctctgaaatctgttggtgcaaagcacagtttgatgccatcgtcctagaaatgagttccccttaaaatcttgaaaatagggccggatttaccctattaatacccttatcccttagaagcagagaagaagaggagataaaacaaagacagtgtggggcgccggccaaagagtttaacacacctgggggggggcccacagaaaaactggatactgcca

SEQ ID NO: 545020 - DNA, 272 bp, Homo sapiens
cccatgaggagctcctccgagctgacctctgtcgggacaagttctccaaatgtggcgtgatggccagcagcggcctgtgccaatccgtggcagcctcctgtgccaggagctgtggagctgctagggtgtgctggcatcctgagtcctggccctcttggatcttgggcctcgggcctgcctgacctggtcttttttcccatcccatgtcctttattctggaaaaggtaggtgacttcaggccttggggttcaggcttcgggtctctaggccct

SEQ ID NO: 545021 - DNA, 1805 bp, Homo sapiens
ggcaacttgccaacacaaccagcttgcaaggcacaacatgcaagcttcgctattttccatcagccagcatgcattccaccagccacagcagccatttcagtgggcaatccatgcgtgctgtttgccgtccctcagcacacacatgcacattctggcatgcacagcaccatgccatccagcacacacattgccacagggcagcattgcacacctcatctgcaacacgtgcttgttcatcgcgcacacacacctgccaccgcggcacgagcaccacacatctgtagcccacacaacacacgattttctccatgtcatttatgaggcacttgcagccaatgggtatatcaacacactcacaggcttggcagatagccaatgggtccactcactgatccgttggttggggccccacttgccacctaacacgccattggggacgttcttcttagcccaagcgccgatggcgtaggaccaatagggtatctacaccacgcaacacacaccattccacagcagcatcagcacgcaccactagtcaacatttacaaggtccacaacaggccgttccacacccgggctttctacgagcgtcccaaccgttgcggtagccacgcgattggcggcaggccacaaccttcaacaagggtggccccacaaggacaacatgccacgaacacaagacaagacggtccagtaggcggcaccactttccctagcactaccacccagttggaggacaccgccatcatgagccagccacatcgcagataaagatcaacatcccgcacaagaggacaccacacaaacgaccgacgccaaccgaccgggggggacaccagcatgttccagcccaccgttggcaaacacgaggccattcaacggaacaggatggcgaaacgctcatctaggcaacgagtacacacacaaccgggaacaccattgggcagacctacagatttaacagagtgccacaaacacgcaaaccgaaaccagtgggacgacattaccacaaacgggggtcaaccgcaacattatcaagttgggaatcacaacatacacacgagtgccgccccaatgagcacagatgaaacagcacctcctaacacacaacaggacgactcccacgcttcccgagaatctccccggaccacacaatcccaaagggagtgggcaactcagcaaacatcattacacaaaacagcacacgggggaatcttccgcgatcatacccatgtaggacaaaggtcaacatctacccatcatgccaacagacaggcgatggacaacagccgaacccggagtaaccggcaacaccattccattaggcccgaatggggccacaaaacacgcctatggcacacacgacagcaagcgcgacacgaagtgtgtgggtcaacacacagcggcgtgttcgcacacacccatgagggtggcccagtctacatcggatacgccctaacttacacccaccggcatcaatgtccaaacacgacgcggtgacgagtacacagacaccgcatggcggctctcggtgcggtcgtcgccacatgaagcaaccacccaccaaaggagacgacagaacattcaagtagcaacacaatgtccagacccatcgcacacaaggagcaactaaccactcatggtggacatcacccaggcatgggcgagcacacatgagccgagcgacaggccgcatgcacaaacgagacaaccaccccatagcactagagcaccaccggagagctacacaacaactagaccaactaacacaaagaaaacgaaccacacgggaagaggaacaacac

SEQ ID NO: 545022 - DNA, 445 bp, Homo sapiens
cctgtagtcccagctaattggaggactgaggtgggaggattgtgtgagcccaggagtttgaggctgcagtgagtcgtgtttgtccactgcactccagcctgggcgaccgagtgagaccctgtctcaaaaaagaaaaaagaaagaaatgaaagaagagggagtcctcctgtatgacacacagacgagaggtgaaagagggcacgagatcggttctcttttttgtttgttttttgagacagtttccctctgttacccaggctggaatgcagtggcgctatctcggctcactgcaacctccacctcccaggctcaagtgattctcatgccccagctgctcaagaggctgaggtaggaggatcacttgagcccaggaggttgaggctgcagtgagccgagatcatgccactttattctatcctgggcaacagagtgagactgtatctca

SEQ ID NO: 545023 - DNA, 721 bp, Homo sapiens
gcacaaactgtgctccatcatggtgaggcaggagcagaggccggagctgcccgtggaccctctggctgccgcaccttcggccatggctgccgcggccgccatggcatcactcccgctgtggagctcgtcagcactcttgtccgagtttgctctattccccaccaaggtcccctgcgtgaggagatgaaatccgccctgtcaatgtggatcggagtcgcatagcgctcatggtggttgaaccaagttccttcgaaaggtaggacgtgcggaaggcaccatgcgtgctggtatgctcgtccggcgcttcgctcctagacagcgcgaatgcgggagtgtagcgacgctgacaggcctcgctatcagatctcgctcgtctctgccccaccattcactggtggtcaggccccctgtggggctgctcccatgcagggagccaaatcttcctcctcgtcaccacgactcgctcaatttccacccgtacgatacatctatccaggggtgaccaatcgagggtgcccacgtggcgtaactgtacaatgcgcggggtacaccgcgagagactgtgaagtagcaaggggcggtacgcctgagtcctgcgaaccctgctttccctctgaccaaacaggtggccgggagaaagcgacttgggaacacgaggacgcttacggtcccctcaagaccatacgatacattttctgtgtgccacgtgcgtatgagaaag

SEQ ID NO: 545024 - DNA, 473 bp, Homo sapiens
  misc_feature (154)..(154): n is a, c, g, or t
  misc_feature (362)..(362): n is a, c, g, or t
  misc_feature (400)..(400): n is a, c, g, or t
  misc_feature (446)..(446): n is a, c, g, or t
tacagggcaggacgatattatcagatcagatcaggtgttatagtcacatgtgcgaattgcggtgtgattgcggtagagtgaaatatcaggctcgagctcaacatgcaggacaagtgaactaaatataaaatattaagattaacctcctctccgnctcctctattcctgtactctgcacttatattctcctcctcttctctcttctcattctctcctctcctccagatggtgatgtacatcggccagtgcctgaaggatgtgctgaagctagcacgccctctatcgcccccagtggtgaagctggagaagcgtgtggatgctgagtatggccttccctccacccacgtcatggccaccaccgncatcttcttcaccctactcctcagcgccccttccaggnttcacgtgagtgccatgcagcaccctgagcctcttgggtcccctgncatgcttctgcttctcagtcttggggg

SEQ ID NO: 545025 - DNA, 300 bp, Homo sapiens
cccccttcccccattggcgggtgggggtgttcggggggggggttttattacccaggcttttttttttaacccgcaggtgggccggggaccccccccccccttttttttccccccttgggggccccggggccctttcccccccccggctttttccttggccccggggggggttcccctttttccccgggggccccttttgccccttgggcctttttgggggccctttttaaccagttttttccccaaacccggggggggcccggccgggatttcccgggttttttttccccccccgtccca

SEQ ID NO: 545026 - DNA, 388 bp, Homo sapiens
gtatgagtttaaacccaccttattccatcattagataattccagttaaattacccatttagacaaagcacaggtgacagaaaccgaaattcggtgtaacagacacagcattgtaagggaaagacgaaaaaccacaattaagtacaacacagtaaggatcaattttcacattcctcgtacaacgaaccaatcagaaacaatcccgtaaggagagttaaagtcaagatttttgaaattagatgagtcattcaagaatagtcaaaagagtatatttgctcacgcagtcagcgggaagacccacaggcagaggtgataaattcattgagttcggcgacagtcggccgcttaagacagaactccagcctaatccccccgtttatagtttctcc

SEQ ID NO: 545027 - DNA, 516 bp, Homo sapiens
  misc_feature (6)..(6): n is a, c, g, or t
tccgantgtgcttcaccatcattttggtgcctttcttactacttatccaggtttctgaagtattaaacgagcacgttaagattctaaagctctattgtccacatacatgcaggttaccatccccttgtaaaaatcgagtttgttaatcacactagttacatttcaagtgctcagtagtgatcactgtaataagttgtactgggcaatgctgctctaaagggtagctgtggtattatgagtgtttcaatactgataagtaacatcgggtttgacccttgaacattgactgcttgtggggattgtattggctttttatgcctcattgtattacttgagttaccttgaaaggctggaaacaggctttttgatgtaaacttatgaggatctttatgaggttaagataatcttgatttattctactttgagtatatgttttcgcattaaaaataaaaatatggtcaggcacagtggctcacgcctgtaatcccagaaatttgggaggccaaggcgggcgga

SEQ ID NO: 545028 - DNA, 404 bp, Homo sapiens
  misc_feature (19)..(19): n is a, c, g, or t
ccccccccccccccttccncaacttaaatattgtattcggataaccccagacccccaaaagagtttgggggtgcgctttatccccttcccccataaaagtttaaaaatccctaaggcagtgtcggagggtttggctttctccccctagctctacagctatgcatgagagtatgatgatatccagaacgtggctgagtgattgctctatccccttacagcatgagagtatgatgatacctacgacaccttctgagtgtttgcctcactaccccttagatcctcagttacagcatgagagtatgataatccctagacacctcgtgagtgtgttcgctctctccccttccaccatcagcgtatgatgatctcaaggaagtatggatgaataaattaataatataatg

SEQ ID NO: 545029 - DNA, 104 bp, Homo sapiens
aagagggaggtgtcgttagtcatctccacagacaatattccaggaccattaagtttttagaagaaataaagtgtgacccaacaatattatatacagccaagata

SEQ ID NO: 545030 - DNA, 382 bp, Homo sapiens
ctattgtctagctaagggctttcggtccccccgtaaataagatcaaatgctcttaaatgttcctgttcccctcctaatgtaaaaactggatttttctgtcctttagccccctgctgcttctgtctgttttaaagctggccttaagatcatgagccctttttctccagtaggacaggctttgaaaaccacttctattaagttattgatgccatttgatattttttcataatctatatttaacccaaattccccccttgcctcctcttttttaaattcatctcccttaaaacttcccctaagctacccgattgcttttgccccccttggccctcctgtgggtttgtttgtttaatttcctttccccataaacttctgggtagta

SEQ ID NO: 545031 - DNA, 990 bp, Homo sapiens
  misc_feature (628)..(628): n is a, c, g, or t
cttactagaaacgattcgtcatgcacggcctgtcaccgagcgagttgaatgaaaatgagcaatagatgttacatcctgaaattctggtcctaacccaatagaaatctctgacatgaactgaaataacatctgaaaattctctgggcagcaacatatgaatactcacgtagaagagcatgtacctgatgtgtgcctgactgtgatctgtacgctcgagtgagatcccacgtcatagcgcggtttctagttaggccctgactctgcatattggactgttcatctactcatgtaacgtgtgactgactggaaaatgcttggagactaagcgtgacgtggcatgcttgttgcataatgtggaagagctatcatctgattccgaaacaaatgagacttgacttgttgctcaatctaatcttcgattggaaaactgctacaagtttaatggcagagcctgatctcctctggcggtggacaaagtcgtaccgggaaaggagaacacggcgctgcacttgttagaatacaggtaagtttgtggactcatgttgtcaggaccgcaggacaactcagtgtgaaacatcgtcctgtaatctttcactcagaaatctatgccttaattcgttaacggacncctttactacgcgtgctaatgaatacttcctgctcggttgtaactccctcagtgtttcggaagcattaagacttacgggttttatcggagaccctttacaatgccgtcagcattgggcattccgcgcaagttgttcacacagaaggcgtcactttcagatggctgtgcccatgggcgagcgatagtggcatctggttggctctgggttggaaagctcaatactgggtaatgcggttatcggtcacgaggtaaagccaacgagaagcggacctcgcagtgacgcactcgtacatgccggttgaggtatccagcacactagtggctaacttgtaacagaaaaaccctgcgtcttcacagtaagg

SEQ ID NO: 545032 - DNA, 110 bp, Homo sapiens
ccgaaagaaatttttaacactgtaaatcatgcaaatacgatcaacactatttcagagtacctcaatcatctaacagatgccagtcttcaaagagatataacattagaaat

SEQ ID NO: 545033 - DNA, 224 bp, Homo sapiens
  misc_feature (165)..(165): n is a, c, g, or t
  misc_feature (202)..(202): n is a, c, g, or t
  misc_feature (214)..(214): n is a, c, g, or t
aattaccctgctaagtcagtttagctggcaggaatccccggtccgccatatacttgatcagggtcctcatcccccaccatcccgcagctgatgtcagataaccttggcctgtgctcagcgagaatctcgttaggtcagtttagccagaatcctcccttacccttnatgttccctcatagtcatttcctatctgctaaccccnatcctcctcctngagtgtaatt

SEQ ID NO: 545034 - DNA, 1569 bp, Homo sapiens
  misc_feature (229)..(229): n is a, c, g, or t
tcacgctgagagcagcagcctctactgtactggctgagacgctgggtagccctgctcggtgccacacctgtggacagcaccatagtacacggtaggctaagatggctgaaaaacacggagctgctcgtgtgccgagtcactgctcgtgctctgcgaggaaccaaaccagcgtgtaggctgagattgaggctgcgcttcggaacgcgtatcgaaggactcgaatagtcanagtccttgtgcctatggatgcccccaaagagtccgccatgactgacagacatcgtatccgatgctacaataggcttggccagaaggatggtaggtaagtgcgtatccacaagctggccacctgggcattgaatgcatcggaggggaccaaaggcaccatgtatgtgcacacgaaaagctcatgggatcctagcttgacgggtggtctgagtaggcacaactttgatgtaccacgcaacgcagagggaattgcggtagaaagatttcgtggaagccaacggagggtttgctcataagcttctgctcacagatagattttttctcccaagaacacccaccttcggagtagtcggacatacgaactggacctcccatggtccatcggaagtcccgtactccgtagatatagcctacacgaccacgccctcgttgagttgtatccattcgcaatttaaaagggtcgcgaccgcaatctgggttaggatctcacttaacaaaccttttcttttgcaaccgaaccttttctttgggaacccttcttggaccgacgggcgctaatccaggtgccagagtaattgcccagcgaaattgcttcttcctggatcgcaaaaggaagaccgcggtacgcgaggcacgccgccagggtgggcacaagccgagaattcctcattgaatacgggcacattggaccggccccgcgtttgttgggttgggggatccagaggcgccgggaaaggccattaaacgcaaggggagggagcaagtgtccgacacttaacaggtgacaaccccacaaggtactctttcatcgagcaaagggggacgcgaaaaagggaatgcgttgcgcccccgttacattcacgaaacgtggcggactgtaaaaatctgtctggcacaagttgcttgcctcagaaggctcaccaataaggacccattcacagacacttctgacggttggtgagaggctagagttcttcccataggaacatttacttaagcgtatagtgggttggctctcggagagcgatatggacaggaagtttacccaacgccacaggtgggggcgggaaccattataaaaacaaagcagtttgcccgaaggggccacataccacgtagcacacaacggcttgaaccgagacaggtgccacaatataacgacaactgtgccccagtgcaacaatatcaccaaggagagcgttccacaaatgacattaaatgcgatattagttggcaccacaacattccaccaaagaaccgccaaagtacaatatccaaagacaagttattgggtgacaaaaccaaaggtgtgtgaagtaggccaccggacacataactacc

SEQ ID NO: 545035 - DNA, 192 bp, Homo sapiens
ctgtacagttgcgtaaacaaaagctttacacattgctgcagtgtacaggacgagtgaatgacgcgggccactgacgcgggtgcactcctctttcggcccggtgtcgagttgccgtcgtggcccacttttcaccggtcggtcggcttgtaacctgtcctggctgggaggaatgccgcaactggtacggcgggc

SEQ ID NO: 545036 - DNA, 418 bp, Homo sapiens
  misc_feature (32)..(32): n is a, c, g, or t
  misc_feature (47)..(47): n is a, c, g, or t
  misc_feature (56)..(56): n is a, c, g, or t
  misc_feature (303)..(303): n is a, c, g, or t
  misc_feature (363)..(363): n is a, c, g, or t
  misc_feature (406)..(406): n is a, c, g, or t
ggccatggaagatgaaagaacgcgagcgccancggccgtgctcgtcncgagcggantccgctgcgattctcacgccggacgacgactgcaacagtcccccgctttcggatacgtacttcaactggtaatccgcactgtacgcatgcaggcgattcgcagggttgaaggcctcgccaagacgcgcggcctggggctaaacgaaaaccccgtactcaaatagataacgacccaccgctgatctgcttgcatttcactgggccaagcccccgatttgtttcgattttttttaataccgttcggaantgttcaggcttatattttggttttgaatggcgtggcgacagggacgggttattcccgaantattgaaggcgacggcatctttaggccgaacgggttaggcgcnttttgggaacgg

SEQ ID NO: 545037 - DNA, 446 bp, Homo sapiens
aggcacgctatcactgctgctgtgagaagtgctaccaggatggaccatgttggattgggagtagggatacatagatcattgcttgaacgagattttaccagtgcattctctcgctacaagtacagagtttctttcacctaacttcttttatttgttcctttaaaacttccacttcttctcttactgcatacatcaaatggctttcaccagatccattgcttgtactatttagttgtccctggctacaacacctcccccagatgcactgtcttcatcaccatcaacaggaatagctatgctgaatacagccgtggccagactgtacataggatgttcactgaagggggtttgccagggcatctgcaacaggcgactacacaacaggctcatttacaccactgagagaaagtggtggttgcgcgtacgagtcctgctccacttctact

SEQ ID NO: 545038 - DNA, 431 bp, Homo sapiens
  misc_feature (40)..(40): n is a, c, g, or t
taggaaattccatctgtgtgcccataaaaattaagtgatnctaagggaaagtaatagcttttaatattccttcagtaggtcctttgtgaccagtttctgagtttggctaaaaagaagcaacacggctctgattttctttccagaagatgatgattttggaatgggagcattaatttcccttttgaattgtgtacacagctactttcccaaaaatactgaaactgaacatatcttgtccctgttttccttctgatttcaggacatataatgatttgccttccgtaactgcagatgggtgggggccctcccctttcccttagcacccttcttaaattctttgctgggattaacattaagcctaatttgaataggaattcactctcctgtgtcgggtggccagcaaaaccgcaggttctgctgcttttcacatt

SEQ ID NO: 545039 - DNA, 998 bp, Homo sapiens
gaccgtggacgattctctacgaaccacaaagacatggaacactatacctattatgcggcgcatgaggctggagtcctaggctacagctctaagcctccttattcgaagccgagctgggccagccaggcaaccttcgtaggtaacgacacactatcatacgacactgtgattcgtcaacacgccctatcgcattagtaagtaatacttcttccatagataactaccacatctatcatagtacggaggccttttgtgccaacgttggacatgaagtgttccccataagtagagtcaggtgcctcccggatgatggcggtttgcccggcagtaagacaaacaataaagcttcggactctatactctccactcgtcttccttactccctgctcggcatctgcgtatagtggaggccggacgcaggaacagggtgaacagtctacacctcccgttaggaggcaagtactcccaccgcgtggaagcctcggtagacctaagacatctgtactcctggtacagccgctagcaggtgtctcctctatctataggggcgcgaagggccgaagtttcatcacaacaattatcaatataaaaccccctgccataacccaataccaaagcgcccctcttcgtctgatccgtcctaatcacagcagtcctacttctcctatctctcccagtcctagctgctggcatcacgtatactactaacagaccgaagctcaacatcacttcgttcgacccgcggaggaggagaccccattctatatccaacacctattctgattttcgggtcccccttgaaagttaaatgcttatccttaccgggttcggaataatctcccaaatgtgagcttcctactcgaaaaaagaaccttggtacagggtgggggaggggaaaacaacaggggtcccaagggtattctggggcacccaatattgaggataaagaaccaagattttctccgcaatatggtcccggggatttagcccccaaaaaa

SEQ ID NO: 545040 - DNA, 258 bp, Homo sapiens
tttttttttttgctttttcccgggccccaaaaagggggggggttttttttttggggtgccccccaggaagcttttgggggggagggggggcccataattttttccccggggaaggaaaaggccccctttccaaacccggggggccattttggggaaacggccccccttgggttttagggtggtttttccccgggtttttggggcaatttttaaaagggggtttaggggggaaaaaaaagggggccccctttggtccca

SEQ ID NO: 545041 - DNA, 282 bp, Homo sapiens
  misc_feature (22)..(22): n is a, c, g, or t
  misc_feature (96)..(96): n is a, c, g, or t
  misc_feature (160)..(160): n is a, c, g, or t
  misc_feature (163)..(163): n is a, c, g, or t
  misc_feature (203)..(203): n is a, c, g, or t
  misc_feature (206)..(207): n is a, c, g, or t
  misc_feature (219)..(220): n is a, c, g, or t
  misc_feature (224)..(224): n is a, c, g, or t
  misc_feature (228)..(228): n is a, c, g, or t
  misc_feature (232)..(232): n is a, c, g, or t
  misc_feature (254)..(254): n is a, c, g, or t
  misc_feature (259)..(259): n is a, c, g, or t
gatcccccacagtgcctggggnttcaaaggactcgcattctgtttggagctgtcagcccagcacaggacgacatcttgttgatgcggatgacgtgnaaggggtggagccgcaccggatatggaagccatcttatgcacaactttttaccatgtacttatnggnacaaattcgggcagcctccagggcttcagaggacagctgntcnnattcatctgacnncatntggncaanaggcggaactcatccacttttnccttnttccggcccaggtcaaaaatggg

SEQ ID NO: 545042 - DNA, 1322 bp, Homo sapiens
  misc_feature (111)..(111): n is a, c, g, or t
  misc_feature (649)..(649): n is a, c, g, or t
  misc_feature (846)..(846): n is a, c, g, or t
  misc_feature (880)..(880): n is a, c, g, or t
tctaggcggacaaggggtgtatgggatggtatcaggacacactatggacgagaatggctgggactgagatatttcccttaaaatggctgggaaacaaaggtgatgaggaangatggatgcaggtgggtatgtagcctgggtcgaaatcggtccgctaacgatcttgaatcagatttcgagcaaggaagggattccgtcgttgccgagtggcacgatctctgcaggacgctggaaatgaccactggcggggactcattctgagagccagagctcttactgcgtctcgagaatccgagaaagcattgcgtcgcagaaactcgagtgcgaccgagtacggctgcaagggaagcatggtcacgcgaatagagttgtagacaggtgtccattcacatcgctggtcctggaggagatggcgaggcagggctacaggggggagctccgcgcacgtcaagtcagcgggccaagtgtgcgccgtggcgggctctactgccaacaaagaagagcaatgccaagcgtaatataagatccgcgggggactccgcctacgaacatactctggttctctgtttctacgcaaagtgtaatcgtcctttcaagagcagcgcagagcaccgcggtagcccatcgccaaggcggagatatgacagcntggagagagggaagcggcctaggccacgaccaagggggccggtgaccccgggcggccggggcgcacgggacacagggcaaaagagtctcaaattcctagagtgcggtgactaaatattttgcggtacggtgcgatgaccaacgaaagaataaggaaaggcaggtaggttgacattggttttcggaaataagactaanttcgtgcgttaaagtccctgcggagtcaattcgngtgctctcgatgttttgaacccggtggccgagctttcttgccagtgcggttatgcggaggtcttatagaacagcgatagggttacaagcggacaaaggttggtgagaaagttggtgacgtgtgtggacttcccaagctatatcctaaaattgggtagttggccacttttcgagttggccgacaccatggaagcatttcaatatcacattctgggcgctgggcagaactgggggaataacatttatcaacccacaccttggaacaaaggagcccatacatgaggagacagcagcagagaaagagcccccatatccatttgggggggtgttcccaccgcttcccacgtctgtgtggtataacacagggctggttttactcatcacaacccagggatcgagaaagaacaaggcaggggggacgaatacactcaccagcgcggggc

SEQ ID NO: 545043 - DNA, 192 bp, Homo sapiens
gacccgcttatgaggcactggtttgtacttacctcatggacaactgtgaatgatgtcactaagaaaatggctttatttaaccgagtttgccagagacctgaaatgtcccccaaactaaattagtggcccaccaggagcagaaatcggggacttcatggcaggtttttttggctgctaatcctcgttaagctt

SEQ ID NO: 545044 - DNA, 862 bp, Homo sapiens
tggaaacggagtcttgctctgtcaccaggttggagtgcagtgagctgaaatcgcgtaccacactccagcctgggtgacagagcgagactgtgttctcaaagaaaaaaaaaaacaagcagcctttggcttggtgggaatctgatttctctgtttgcgtgtcccttgtagccatagatgtgattatgtccacaccgggctgccttaatctgtcctgctgtggagagtgacttgtaagatgctgaattattcatgataatacagtgaatgtcctgggtccatgtcctcagataaacttgagaaaataggcaagaaaattggagacgggcgaaagcaaagctgtttctcatcctataattgacagttcgtgtggacgccttaacttggtggatgactccagagttcaacacgataaaaagacgccagagttctcgctgaacgaatgtgagaattcctgtgcatggttttctgatgactatctacacttggtgccctgatgtaggttgggggaacatttttaaaaccagggtgctagtgtgcctgtaatccagcacttgtgcaagctgagtggaagatcacctgtaagttcggagtttcaaaaccaggtccggccattcacggaaacctcgttttcccaaatttcaaatttgccgggttgtgacaaccctgtatttagcggtatcccggagctgagttaagtcgtgaatcggcaggagatgcattcgctgaatcgccggcttcctagtgccctcatgttccaacaaaaaaggcgcgcttatatccaggcaatcggccccttgtaagccatggaataaccggtaaaggaacttggcatatgttaccatacgtattgtttctcatcatg

SEQ ID NO: 545045 - DNA, 793 bp, Homo sapiens
ccctcgtgactcgtgttgctccttgcgccgcgatggtgggcctcactgtccgcagtcccgacgaaccccttccggttgtgcgcatccagtggctctacatgctggcagttgtgaacatgctggctgagcatgctgtgctgtgaacctccctgatgtgcctggtgctggttctgaccctgtgacctgctgcttggtttctgtgctgctgtgctggcctggatgttgaacccatgcctgtgctgctgcctctacacttgtggcctgttgtgtgagctgctgctgcctgctaagcctactcaagtgcttgtgaatgatgtctgacagctgcgccgtctgtgtgaccactatactatccatctgatgctgctgctgcaacatgtgaagtgcttgcccatagctgtgtgctgaagagctactcgtctaatgtggcatgctttgcctgagcctgtggccttggagcccctgtgttgcttgcgacttgcactacaagtgaagtggcttagcttgcccttgaatgttctgttccagcccacaagacctgttgcgaggtcttatagcacccatcactcctcatctactttcttgcttggtctgcgccatagtaccggtttttgctgcacgcatgagaacctggggcatgtttgtgcaatgagcattccttcaggtgtaccatcccttggctgatttgatttcaagctgggcgtctttgttggccaggccaaaatgcctttggaactcccctttccttaatcccctggtgccccggagtgccttgggtccttgtttccttccc

SEQ ID NO: 545046 - DNA, 124 bp, Homo sapiens
agggggtagagggggtgctatagggtaaatactggccctatttcaaagatttttcacgggaattaattctaggacgatgggcatgaaactgtgcgtttgctccaaagatattcagagacattga

SEQ ID NO: 545047 - DNA, 952 bp, Homo sapiens
  misc_feature (695)..(695): n is a, c, g, or t
aaaagtgagctgtgctgtggctcccgcggctgactggctgagtgactggctgagtatagacaactgtcatcatgccccactcatacccagctctttctgctgagcagaagaaggagttgtcggatatgctctacggatcgtgacccccggcaagggcattctggctgcagatgagtccgtaggcagcatggccaaaaggctgagccaaatggggtggagaacactgaggagaatcgccggctgtaccgccaggtcctattcagtgctgatgaccgtgtgaaaaagtgcattgggggggtcatcttcttccatgagacactctaccagaaagatgacaatggtgtccccttcgtccgcaccatccaggataagggcattctcgtaggcatcaaggttgacaagggtgtagtgcctctagctgggaccgacggggaaaccaccactcaagggctggatgggctcttggaacgctgtgctcagtataagaaggacggtgctgatttgccaaatggcgctgtgtactaaaaatcagtgatcgcacgccgtcggcactggccatattggagaatgccaacgtgctggcccgctatgccagcatctgccagcagaatgggatcgtgcctattgtggagcctgagattctgcctgaggggaccatgaactcaacgttgccagtatgtacagagaaggctggntgtggctacagggcctgagtgacatcatggtactcgaagggacctgggcagccaatggtgagcccggcagcggcctcagttagccaaaaatgcagggcacggagccgcggacatggcccacgccgggtcctcgcggggagaggaagagggccaccagggacagggacgcggggacacctggggcgggcacccgacggaaaggggggaaaagcggccaagggggcccacgcagcaggcgacacaagcggggcgtggcg

SEQ ID NO: 545048 - DNA, 830 bp, Homo sapiens
gaggcattgaggcagcacagcgcatgggcttctgttgatgtgggcaggcggagcttgagtgaaagccgcagataagtttttttctctttgaaacgcatagagaatgaatacgaacatacttatggaaagatatagatgcaataggattactaagtatattgcgttagcgttgaaaggtttgggaaacgttaatgtttaagtaggcttaggatgtttacacgatgaaaatatgattagtacttagtaagagctagacaatgaggaaggaaagagatatagagaggatttcgtaaaagcatgagcggaggttgagcatgaagcttcgtttcactggagttaagacaacactgtatttccacagaaacaatctgacgagcaaacggacttacagaatgccccgcaattatagtaccgaattagcaagggcgacatgctgtttcagaacttacaaatcgccaggctgcactgtttaacaccagcttgtcaaagcttcagttttctaaacagttgcagcgtgactaccctaattctgaaggcgactcttttagcacaccgagcattaaactcgcacaggtgattatagcatgacctttgagaatccattgaccgcatgggcagaattggcgtcgatttgagaagcccgtagttaaacggcatttactaagacgcagacgcacacactggaacagactcccgtggggagctggggagcgaatggcacaccaatctgccgtaaagattgaaaggttgcggtggtaaaatactggcaagagaggacgttcgggaagccggacaaaccggaatccacaacgctgcgagcgtacacgcta

SEQ ID NO: 545049 - DNA, 690 bp, Homo sapiens
  misc_feature (6)..(6): n is a, c, g, or t
  misc_feature (11)..(11): n is a, c, g, or t
  misc_feature (21)..(21): n is a, c, g, or t
  misc_feature (67)..(67): n is a, c, g, or t
  misc_feature (73)..(73): n is a, c, g, or t
  misc_feature (81)..(82): n is a, c, g, or t
  misc_feature (92)..(92): n is a, c, g, or t
  misc_feature (95)..(95): n is a, c, g, or t
  misc_feature (100)..(100): n is a, c, g, or t
  misc_feature (110)..(110): n is a, c, g, or t
  misc_feature (129)..(129): n is a, c, g, or t
  misc_feature (143)..(143): n is a, c, g, or t
  misc_feature (151)..(152): n is a, c, g, or t
  misc_feature (157)..(157): n is a, c, g, or t
  misc_feature (163)..(163): n is a, c, g, or t
  misc_feature (166)..(166): n is a, c, g, or t
  misc_feature (202)..(202): n is a, c, g, or t
  misc_feature (206)..(206): n is a, c, g, or t
  misc_feature (211)..(211): n is a, c, g, or t
  misc_feature (214)..(214): n is a, c, g, or t
  misc_feature (230)..(230): n is a, c, g, or t
  misc_feature (236)..(236): n is a, c, g, or t
  misc_feature (243)..(243): n is a, c, g, or t
  misc_feature (253)..(253): n is a, c, g, or t
  misc_feature (256)..(256): n is a, c, g, or t
  misc_feature (275)..(275): n is a, c, g, or t
  misc_feature (284)..(284): n is a, c, g, or t
  misc_feature (289)..(289): n is a, c, g, or t
  misc_feature (291)..(291): n is a, c, g, or t
  misc_feature (294)..(294): n is a, c, g, or t
  misc_feature (296)..(296): n is a, c, g, or t
  misc_feature (309)..(309): n is a, c, g, or t
  misc_feature (318)..(319): n is a, c, g, or t
  misc_feature (321)..(321): n is a, c, g, or t
  misc_feature (330)..(330): n is a, c, g, or t
  misc_feature (337)..(337): n is a, c, g, or t
  misc_feature (393)..(393): n is a, c, g, or t
  misc_feature (409)..(409): n is a, c, g, or t
  misc_feature (437)..(437): n is a, c, g, or t
  misc_feature (446)..(446): n is a, c, g, or t
  misc_feature (449)..(449): n is a, c, g, or t
  misc_feature (463)..(463): n is a, c, g, or t
  misc_feature (497)..(497): n is a, c, g, or t
  misc_feature (500)..(500): n is a, c, g, or t
  misc_feature (505)..(505): n is a, c, g, or t
  misc_feature (609)..(609): n is a, c, g, or t
  misc_feature (624)..(624): n is a, c, g, or t
  misc_feature (686)..(686): n is a, c, g, or t
taaaantccanctttttttantttttccccttttaaaaaaaaaaaaaaaaaaaaaaaaaaaaaggantaaaantgcaaaannagttaaacantanaaaangtatgcacanaaaaaaaccaaaaaggaanaaaggcttatttanaaagaaannaaggnaaaaanaangtagttttcttaagaaaaaaaaaaaaaaaaacaaanaaangctanaangggcaccactgttcanagcaanattaaanaggagaaaanaanacttatttaaaagggacanaaaaaccanaaggnanaanancagtgcaaaaaantcacaaaannanattacagcnagttaancagtttaagaattgttcccgtcagtcacattttttggcccccagaagttcattccnaaagatttcaactacnctaaatttctagctaccaagaagttaanaatgattanaanaagctttccaaggngttatgaaatctttgtagaccagaggccaactancancaccncaagtctgccctcaccaacagcccttgtatttttcagggggaaatctctaggaaaaaagtcagacaccagtgtagtcactatctcccatgtcaaacctaggggnctaaaatggtcagtnttaccataaaatgataattttgaggtttaccttaaaaggcttattctggtctcaaaaattanataa

SEQ ID NO: 545050 - DNA, 758 bp, Homo sapiens
tattgtccattttactctcaaatttggccaacagggaaaatataatcctataaaaaaaggtgcataataaatctatataaatatcatataatccggtatatataaaaataaatgtatcccataatagaataatcaccccatgagggggggaaaaagaaatacgagggtactaaaggtacccgagggcagtatcaaaaacagcccacggcggaaactataaaaatactaccaccagaaatcaccacaaaaagccagaaatctaaaagaaatgcgggaatataaaagaggggaggcggtggctcctgtggcaggggcccctgggcacggacaggagaatatcacaggtcaacactccatggcaggggagcagcgggtggcccccatatgccacgcctggcccactccccgtgaaaagacagcaggggacagagaagattcgcacgcatggtggcccaggggggcaggtgggcacatgaggcgtgcaaacacccgtgaggagccaggggccccagaagggggagaggcctcaatcgagaacccttattcccagccagccatccatgggcacggggcagtgggcccaacattacagggccatcgagaaacgtggaaccagggccgtgagagacgaagtacagccgtggacacactcggggccaggtgccacccccgtggatgtccatcacagggcagaagaaacaacatacccgggataaaaaaacagaatggcaaacccaagcaggagaaactccccgaaa

SEQ ID NO: 545051 - DNA, 359 bp, Homo sapiens
gatgtatctttcatggttatcagttcttaatattcagtttgagttccaccatcttttaaaacagtgcgttcccaaagtattggtccacagactcctggagcatccctaggacccttatattcgaggggttcacaagtatcaaaattattttcataattgcacttatacgttatttgccctttcactgtgaggacatttgtatgggtggtgaaagagcagtgatgtcgtaactgctggcactttaaaatgactctaggctgttttaccaaacatatgagtcctcattgtgttctttatagtctaacatcacattagcatttataaaaaatgccggttatcacttaataatccccggtcta

SEQ ID NO: 545052 - DNA, 660 bp, Homo sapiens
cgcaggcgcgtaggcagccatggcgcccagccggaatggcatggtcttgaagccccacttccacaatggactggcagcggcgcgtggccacgtggttcaaccagccggcccggaagatccgcagacgtaaggcccggcaagccaaggcgcgccgcatcgcttccgcgccccgcgtcgggtcccatccggcccatcgtgcgctgcccccacggttcgggtaccacacgaaggttgcgcgcccggcccgcgggtttcagccttggagggagctcagggtggccggcatttcacaagaaaggtggcccgggacccatcggcatttctgtggactccgaggaggcggaccaatgtccacggagtccccttgcaggccaacgtgccaagcggccttgaaggagttaccgctccaaactcatccttctttccccaggaaagccccttcggccccccaagaggcggagaacagtttctgcttgaagaactgaaactgggccacccaagtttgaccgggaccggttcatgcccgtccgggaacggtctattaagcagggagaaagctcggagtcatcacttgagggaagagaaaaattttcaaagccttcgctaggtctcccgtatggcccgtgccaacggccgggctcttcggcattcggggcaaag

SEQ ID NO: 545053 - DNA, 185 bp, Homo sapiens
ctttgttgaggcatacagaaaatttatttgggcatgccactaagtgatactgagggtcatgggtgtaggggatgattatgttgagctagtgatggcttgatgttgtgtgaccatcccatcttgtgagatgaatagttagagttgcagctgctgcttcatgtgaatggatagtctctgtggatgta

SEQ ID NO: 545054 - DNA, 352 bp, Homo sapiens
  misc_feature (291)..(291): n is a, c, g, or t
gccagccttcgttcttcgtcgatgcctgactcaggtaggggagctttccgcgtggtggacaccgagttctaatcctaggcagatccgaggaccccagcagcgcaggcggtggagaggtgatgccacacccctcacagggcgagcccctcaagtacatcttccctgcgttacgtctctgccatacctgcctgagccatgttcacctgcccacgttgtcccctgctgcctgcccagacaccccaccagttgtgcctgtcaagaccagccatttggtcctggtctgcatggtgntgcgtaaacaacagcatctcagtcagcgtctcttcaacacatagacaaagaaagaaggggg

SEQ ID NO: 545055 - DNA, 304 bp, Homo sapiens
cattaggaagggttgtttacgaccgtggccttgagtgtgaaggcctcacacggagaccgtacgaaagtccttccctgagacatggatctgggatttggtggaggtaaactcatcaggtgtggctgaggtaggagtaacattccctgacaccataaccgaagggaaggcaggggccttttgcctgtctgaagatgctggacttggtttctattgcactgcctctatcctagccttccagcccttttttgtggaccttacattgccttactatttgattgagcgtatccagtagattccaccggat

SEQ ID NO: 545056 - DNA, 172 bp, Homo sapiens
agccagacatctgggttaggcgtgaggcaggcagagtagcctgagcccaggatgttcgagagcaccctgggtcaacatgatgaaaccccgtctctaccaaaaatacaaaaaaattagctgggcatggtggcatatgcctgtagtcctggctgttcgaaaacctgaagtggga

SEQ ID NO: 545057 - DNA, 203 bp, Homo sapiens
  misc_feature (34)..(34): n is a, c, g, or t
  misc_feature (73)..(73): n is a, c, g, or t
  misc_feature (85)..(85): n is a, c, g, or t
  misc_feature (114)..(115): n is a, c, g, or t
  misc_feature (125)..(125): n is a, c, g, or t
  misc_feature (151)..(151): n is a, c, g, or t
  misc_feature (157)..(160): n is a, c, g, or t
  misc_feature (162)..(162): n is a, c, g, or t
tgacatccaaaatcttgatcagttaagaaatttnacatagcccacttacatttacaaactgaagagtaatcantctactcaaagnatgggattattagaatcaaacattttgannagtctctccnagaaggcctaatagaaaagtatgttntaaccnnnnanatgaggactctattctttaactcccattaccatgtaatgca

SEQ ID NO: 545058 - DNA, 153 bp, Homo sapiens
acagtaaaaagagtgaagtcgcccatttctgctcaggatctagctcatgtggtccttctggcttcaaaattcttgctataataactggttttcctccttatgatcttccttttgtccccagtgccagaattccagagcctactcgctcagatg

SEQ ID NO: 545059 - DNA, 330 bp, Homo sapiens
acgatatacgatcatagatcagggaggcattgttcttgatcagcttgccggtccttgataaggtagccctggccaatcttataaatcttcttgtaagatctcagtgcggtgatggtagcctttcatgcccagtgcgtgccacacgagaaggctacacgagacaggatgccatgccccaatacatggccaccttgcgcaggcctcggtgggtcttgctggggcagctacttggtgtgccaaagacctggtgaccccatttgtagccttttgcccttggtcaccccgattgacgtcgatcatctcatcctgcccaaaacacttggttgaccg

SEQ ID NO: 545060 - DNA, 190 bp, Homo sapiens
gggtggagggaatagggaagtgttccttttacacgaatatgttgcataagtgtcccttgtaggggttggatgatgtgctaaggtggtttagagccccaggttataccgtgccccttacagttaacataaaaaccacaattatgccaatgtcacttgggacttcagaagaattatggggtgtgaaagccca

SEQ ID NO: 545061 - DNA, 113 bp, Homo sapiens
tgccatgatacaatcgagctcggtacgaaatccggaggcacaacaattagaaatgacgcaatgatccaggtgagatatgatggtaacttggaccagagaggcaggaagagggg

SEQ ID NO: 545062 - DNA, 220 bp, Homo sapiens
gctgcggcgcagtcttgcagcatggcgtaccccgggcatcctggcgccggcggggggtactaccaggcgggtattgaggggctcccgaggccttccgtttcccgacaaacttaggattccctgtattggtactttgctgctgtagcttgacaagttggcagatatatgctcatgtatttcagagatgtctgtcacagactctgattctctaggtacaaac

SEQ ID NO: 545063 - DNA, 112 bp, Homo sapiens
aagatcaacatataggcctaggcgacggagaagtgtaccacctcctgagctgattgggcctatgctggagcccggtgatgaggagcctcagcaagaggaaccaccaactgaa

SEQ ID NO: 545064 - DNA, 226 bp, Homo sapiens
gtaggatcccactattggatcattgagtatagtagttcgctttgtctggtgaagtcttagcatgtactgctcggagtgttgggttctgcatccgaggtcgccccaaccgaaatttttaatgctaggtttaggtagtttatcgacctgttgggtttgtataagtactagtttgcattcaatacattaaatgctccataagtgtcgtctcacgggggataccgacgcg

SEQ ID NO: 545065 - DNA, 318 bp, Homo sapiens
gcagtataggggcggtgtgaattaactacgacacatatgcatgcatagctgtgaattctgcacgactttttttttcttcttggccccccaagaatatctctggggaaatgttggtcgtacgttacttaactttatttggctgctaattggcgcattagccggtaactggcaagtctggagaccacttacggttgagggtagctggaattttagaccctgggcagtatttaagatttagacagtttagccttgtgaaagttaccacagtgctccatgtgattcattgactgtgagcctgtcgtccatcgcacttagacg

SEQ ID NO: 545066 - DNA, 272 bp, Homo sapiens
atgcactcacatgcacacactcgcacacacacacatacctgctcgcccatcgctcttcccttgagagacaaaaggactgtatagacccagattccgattccaccccagctataggggcagtggcctaaggtgctatttgggcaaggtccagtgaaaatcctgaaggggctgtctcgtgaggtgagggtagatagggagctccttagcctgaaagggtggatcgtgacgggggcttcttgagagtggcccttgagaatgtcagtgcgtattga

SEQ ID NO: 545067 - DNA, 1094 bp, Homo sapiens
  misc_feature (177)..(177): n is a, c, g, or t
  misc_feature (282)..(282): n is a, c, g, or t
  misc_feature (1081)..(1081): n is a, c, g, or t
ttttattcacttcctttactttaaattttcatctctttcaggcgattcttaccttattgcgaaattgacaaattatgctggaaaagttactgaggacacaaagcagccgatctgcttctcctccgatcgccctggagttggtcggtcggctcacgactcatgtccaatgctcttgcnagcactgccggtcatgctagcaagcgctcattgtaatatcttagttgtcgcactcgacatgccatcgtaaaattgcaataatatcagttatgcacatgacttggngaaaaacctcggatatctgttgaaaactctcgtcgcactcgatcaatgcatggatcacacaagttaggaagaaaggtggatcctgattctatggatgctgtgaatgacaggattgcataactcttatcagtacatcacaccaattataatctactccattatgtccttgatagcctgttctacaacacataatatgtatttcatatgccattctatcacacgttacactacacctcttgttagcctattctattcttaattaacagtcacgcctcaatcataactccctaacaaacagatcgaaacgcatccatcattattactaggccaaacataattcaacttaatttgtgtaacttttctcatttttcattttacactcgctttcgttttcgtactgaactattgttactctcatgtctagtcatccatcctcccatagtctatcgcatcattcaataaacataattatcaactcgatgtcatcttggtcatctcacatatcttctacaacatcacctttcgtcgcctcactcttgaaccattcacagcgatggaacctacttgctttgacacatttactcttttattgcctgctctatatccaattactctcttctgtttacattatcattatatcgaactttagttactatacgatattacttatttaaatgagaatacaatacacattataaatcaccagataaattaagaaattccagcaccatacaggaagaaatattcactactctactcactcttcatctacacatccatatattaatctgcaaattanatcttttagactg

SEQ ID NO: 545068 - DNA, 545 bp, Homo sapiens
agcggagaggctgggcggggtgggaatggggcgcccgaggccggcctggggcgcacgcagacgcggctccggtagctgcggcggaccgtacagagaaacagaggcaagtcaagacaagtgctcgacagtaacaaagacacgcaactatacaagtacatatcagcgatcactttgtacgtaggatcgcatatccacatgaagtccagcacaatgatcaacgactgccagagctgactaaggtccctacggtcacgctactatgcaccgtgcccggtctcacgtcgtacggcgacaacaatatagcactcaaacggcactgcacaacaacaagtgcaataccggcacaaaacacaaggtccacggcaactaccatagtcagacagcacaaaagctccaagcacagcaagacagcactattctgtgaatgacgctgcaacaccagcaggcgacccaggctgaaccaacactagtccatctaggatgaaaaaagataccaatacaagccagaatccgagcacaagacaaacaagaaacgtgtacaccaa

SEQ ID NO: 545069 - DNA, 815 bp, Homo sapiens
  misc_feature (382)..(382): n is a, c, g, or t
  misc_feature (390)..(390): n is a, c, g, or t
  misc_feature (476)..(476): n is a, c, g, or t
gccggggattggattggagccaggacctcacttcctcctactgcccctgacccctgtccccatcccagcacctaggcgctcatacctcgtggcagacaccggcccatggatcatggttcctggcgtggctgatagagcatcactacgtgcgtggtcccctacatatggcctaggggtaccgctgactgcactgcgtgagcctcactgttggggccagtaccttgctccattggactggcgtacttggctactgcacttgcgcaagcgcaccgtctgtctcatctcggagatgagagatacgaccgaatcaggaggatcggaagaaatggacgattcctgtgcctccccagagagcagacttgtacatcggggtagaatgctngcgagatnagcgaccgcggctacctgcaatacggcgggatatccgacacattggtacgtgtgctatcccttagtgccccggtagctatggagtnggccttgttcgcatagatgcgacgtgcgagcgattgccgtgcgcgatgtgaggcgcctgagatggcacaggcgtcgacttgggatcgatcctgattacgcagaggcgttgcgaatacgtgggagcctcaccattggagtccagcggccaaaggattctaagtccggcgaaaggcgaaagagtaagcgcaagcggcctccgaggaatccgattgcgtaggaagaggcactcgggcccagtacggcgagccttagcctacccgccgagccacaatggagacgttgaagcaagtcaaatggacacctacattttcccgccagacccggtggaaaacccccag

SEQ ID NO: 545070 - DNA, 285 bp, Homo sapiens
  misc_feature (33)..(33): n is a, c, g, or t
  misc_feature (59)..(59): n is a, c, g, or t
  misc_feature (69)..(69): n is a, c, g, or t
  misc_feature (125)..(125): n is a, c, g, or t
  misc_feature (139)..(139): n is a, c, g, or t
  misc_feature (255)..(255): n is a, c, g, or t
  misc_feature (264)..(264): n is a, c, g, or t
atcttatcttcctaaatgactaatgaggtaagncgggtgttctttttctgacactttgnattcgccatnctgggttctgttagggttctctgaaggtgtgattctgaccttctggctgatgtggnagggaagagcaagncgccttcccagggccacagctgctcacctctcgggcagatattttagggcaagcatccgtgtgtcttcccatcttcaggagaaaggtaaatgcaccctaagtgttcacttctgganccttttttnaagttcacttgggactttttt

SEQ ID NO: 545071 - DNA, 166 bp, Homo sapiens
ggcccttgggggcccccttggcaattgccaaaaattttttccccgggggggggcccctccgggcccctttttttcccctcaaaagggggccccccggggggggggggcctttttggtggtttgggtgggggtttttgaaaaattttaaattttttttttcccccca

SEQ ID NO: 545072 - DNA, 343 bp, Homo sapiens
ctcagcattaccatgcagcgatgctatcgaggagtatcctgactcgcatggtggtcatgggttgaggtcatggtgagtgtatccgctgagattcgcgctggaggtaggatatgcgtgctgtgggtcaaacgaatatagatagggctctgtgattgagacaccccttgagcgagtgtaggaagctgaataatttatgaaggagaggggtcagggttgattcgggaggatcctattggtgcgggggctttgtatgattatgggcgttgattagtagtagttactggttgaacattgttagtaggtgtatatattgtaattgagattgctcgggggaataggttaa

SEQ ID NO: 545073 - DNA, 608 bp, Homo sapiens
  misc_feature (6)..(6): n is a, c, g, or t
  misc_feature (181)..(181): n is a, c, g, or t
cttttnccctcagttaagtcgggggcataccctctcccatcaccctttatgctcccattgcacactcaaccttttgtctctaaaactgcaaggtgcgaacaaaactctcatactagaacgcacaacagcttttatcagaacccccatcagcgtctactctttttttggggcgtggggcaantaaagtgcccccctctgaaaaaaatcacgccaaactctcccctgagagcggttatctacctttcctcacattcactaaataaaccccctctccccacgtcctttttcctcctttttaggggctcctccccccttcttttccccttttctcgctcttcctctccttctacttctctacgcccccccccccacaatattacttttctcccctcctcttttcttttccctcttttcgcccccttcttcttctctctacctcctcttccgttcctccctctcttttttttttctttctcccccccctcccccccctcctcctcttttcctcttctttttcctcctccttcttcccctctctccctctcccctccttctctcttcccccctctttctcttcctcttctctctatatttagaaaaaaaaaata

SEQ ID NO: 545074 - DNA, 277 bp, Homo sapiens
ggtggtacttgccagtgctcgtcgcctggactgtgtgctcgatgagtgtggaagcgacgcttcaccattgatgctcgcgcgactggagtggcgggccacgcatccgcagaactgcttgcatccgggacttcgcagcgagacacgtgctttgctgactggcagagaaccaagacatgttggcctaatccacgcgcgggccagtgcgtgggggtcgaactacctgctgtgcttctcttctccggcctgaatatcgccaccatgacgcccgcgacggtca

SEQ ID NO: 545075 - DNA, 246 bp, Homo sapiens
ggcggaccttccacagcaagactcatctctacaaaaagaaaacactagcccgggcgtggtggctcagctttcttaatgagccgtgaaaaatcaatgattctaagaataagaccaggatatattatttatgtaaatagggatttatgattttcctgtttattaaaactttttttcaaaggcatgtttctacttaaaagaaggcctgagaaagacttacacaggtcaagggtctttgctggtgggaag

SEQ ID NO: 545076 - DNA, 1282 bp, Homo sapiens
tacctcgcctgctgtagcctctggggcgcattccaaccttccagccatgcgaccatgcggcagcaacaacacaaattacttattttcttgccccatacataccttgaggcgagcaaaaaaattaaattttaaccatgacgggaaactcgtgcacactccaggctggctcagtgctggcacaccacgcatcgagtgaccaagcttcatggcgacggctgatcagctgactgaacatggcatcgaacccaccggcacctaccacggggacagcgaccctgcacgctggcaccgccatctctgctgctactacaactgaacgccaccagcgtggcaaaatatgcttccctcgtgccatccctggctgcgatctcaaaacctgcagcacccactggacctctgctccagctcaggctccatctttgcgccacgactcctcttagcaccacgacacactcttgctactcttgcgtcagtcatgcgcgagcacggctaacaacctgcggcccaaacggcacactacaccatgatgggtcgccgaagcctggcttgacttactgtaccctggaactgtgcgcatacggcaacggacgcgcagcagctagcctcgtgaactgtccatgcaagggacatatccagcatgcaccacacatccactgtgtgccggtggcgcaacagcgcatctgcgcaactgcggcacctctcgctctatcacgcaacgactccgacgcaaggaattaccctgcattctgcatcactgcaataccattcaggtgctggtcgccattcacaccaacaagtgctctgaacaaccgacagagcatcagacacccccataccaaatgccgcaaacactcatcccgtcccaatcaagaaaggctagaagaaacatacctgaactgcagcaccctactcagcacttgcaccagcggaaagccacccccacactgacacactcctagcctacagcaaacatctgacacagcactgccccaacaccgaaagcctacccacgccgacactccgtgacacccacaacccctgtgactcataccgacccacacacagcacagttgcactggactaaccaaaacctcgaaccatcagaactcacccacgtgcccccacccctcaaatgcctcgcaccacacggaaccgaagagaacagcctcaacaacatgatccacccataacaccacgcacctcacatctctaaacgtcccggtctcgagcacccccatatcacagaaccacgactgaccacaccaccatctcaagcatacta

SEQ ID NO: 545077 - DNA, 287 bp, Homo sapiens
ctcatgcctgtaatcccagcacttgggttttgaggccaaggtgggcagatcacttgatgtggggagtttgagaccagcctggccaacatagtgaaaccctgtctctagttaaaatacaaaaattaggccgggcatggtggctcatgcctgtaatcccagcactttgggaggccgaggcgtgtgggtcacgaggtcaggagatcgagaccatcctggctaacacgatgtagagacagggttactactacacttctctgtcccctgcactttgcaacaagtagaaaccc

SEQ ID NO: 545078 - DNA, 641 bp, Homo sapiens
ttgtgtggtaacctgccaccgagtttgatccgctcttcacccctcgggggggcgtttgtctccttccctcagcttttcttgttgcgccgtcaggtgcaggatcccggctcccccccgcgcccgaggtttctgcatgcaggttctcatccccacctccctctcgttcgcttgccgccccgtttgcgcctctgcgcgcccccgttttgttcggccccacgcccggggcctcgttgtactttcgcagctctcgtggttccttctccacgctctgtggattctccctggaccgcctccgctcgtgggtccttgtgttcttcgtcacctcggcccccgagctgctcagtgcgctcctcgtctcctcacccttgcaagtatgagggctcatgttgtcttcgtcctcgctccccccccgccccgccgcttgttttcttgttttgcctgcgtccggcagcagcgacggaggcgtccgtcccctcttttttttttcccggacgcgtgctccccctatagccagaaataacaaaacaaattaaacaaaaatacataaataaaacaaacaaaatatataaattacaaaataaaaaaacataataaaaataaataaataaactataacaaaataaaaataaaacaaaaaaata

SEQ ID NO: 545079 - DNA, 2103 bp, Homo sapiens
  misc_feature (509)..(509): n is a, c, g, or t
  misc_feature (994)..(994): n is a, c, g, or t
  misc_feature (1961)..(1961): n is a, c, g, or t
aagagtgatggaggtggtggatttggggtttggggtgtgatggtatgtgaggagcatagggtgggttggtttgaggggttgtgagtgatgggcaggagtgttgtgtttgtgctgtgtggtttggtgaggggtgtgtttggatgtgatgtatgggagggggagtggggtggagatggtattgaggtgggaactagtgatggtggggttagtgatgattgtataattgtttgtgtttgaggtggattgagggagtggtggggaggatagagtgatgggggtggggtggtggtgggggggcttgtctggtggtttcgtgttgttttttgtgcggggtggtttgtcttcgttgtcttgtgcgtcggggtgagtggtgtttgtgttaggttttgtttgttgtgtctcgtcgttctggtttgtgtgtgatgtgttggtgtgtgctggggtggggggtggggttgtgtggtggttggtgggtgtgattggtccgccgcgcctgggatgtgagtgtnttttggtgagtggggggctgggctccgactcatgtgtggtgatggttgcattatggtgcgcgctttggctgttgtgttgggtggtgggtgtttggttatggcgtccgatcggctgcctgccgtggtgtttggttgtgtgtgtgtggcgtgcgaccagcctttgagtgttggttgggtgtgtggctggctggaggggaggtggtttgctctcctcaccaggtgtgggttggtgtgcgcccgcgcattgaggtttagctcgagcggcgcgctctgtggttgttgttgtgttttagtatcgtctgcggcgctgcgcgctcgtgctcgtgtgtgttgtgtagtgtgtgtgttttagatcggcgggggcgtggtctggatgcggtgtgggttgtgttgttgggggaggagagcggcgcaacagtctagcgtttggggggtgtggggtgtgagttagtagttgtgttggtgtggctgcttgctactagcangcagtaggttgggtgggtgtgtccctccatctagtctggttgatgggtggatgttggtgtgctgcttcgcccgctgcgcctcggtcgtgggtggggtgggcttctacggcccgcttcggctgtgtgctggttttttcgtgtctcgcgtcggcgggtgggtgttgtgtgtgcttcacggcgccgtcgcgtctcgcgcgtcgccccttcgtcgtggtgttggggggtggtgctcgaccagagcaggttgtaggtgcggctgcgctcggccggggcgtgggggtgtgggggtgtggttgggaccgcccgctcctcgctgcgcgtggtgtgtctgcgctgctcgtcgcgtcgcgcgcggttggggtgggttggtgtttgttgttgtcgcgcggtcgcgctcgtggtgtggtgtttggagatgagagggggggggccgctctcgctgttcgcgcgcgtctggtctctctacagggggaggagtgagctgcgactctagctcgttgtggcggggctgctgttggtgtgttccgccccggcgtgtgagatatcggcgcgccggctcccgtcttgtctggtgcgcgctgcgctcgctcactcgcgcggcgtgtgtgttctcgctgcggtgctgtgttcgaccctatgagatgatcggctgctggtggtgtgggtggggggagatcgcgcgtggtggtgtagttgtctgctgttgctcgtcgagagctgccacgctgcgttcgctgctcttggcggcgctactagtctctctctgtgtgatagatgctccgcctctcgagctcgcggggtgcgcgcgcgacagtgtgtctgctctcgggagtgtgtcgttgatgtgtctgtggtgtgtgtgtgtgtgtgtgtccgccacagcggtgcgtgtgagataaagtcctacacagcgagcgaagaatagagagatgtccgcccatcagcatagcaggggggtggtgaaganggagcccagccctggtgtgtggtttgtggtgtcgtcacaataaaagaaaagacgtgagtaataaagacacgcaaggggtgctctctctcctcacaataaataatataatatatgataatagaataaaataaaagaagaaaaa

SEQ ID NO: 545080 - DNA, 650 bp, Homo sapiens
ggaaaaaatactgctggacgcacagcatgagtctggacggagtagctccaagagctctcactgtgacagcccacctcgctcgcagacaccacaagataccaacagagcttctgaaacagatacccatagcattggagagaaaaacagctcacagtctgaggaagatgatattgaaagaaggaaagaagttgaaagcatcttgaagaaaaactcagattggatatgggattggtcaagtcggccggaaaatattccccccaaggagttcctctttaaacacccgaagcgcacggccaccctcagcatgaggaacacgagcgtcatgaagaaagggggcatattctctgcagaatttctgaaagttttccttccatctctgctgctctctcatttgctggccatcggattggggatctatattggaaggcgtctgacaacctccaccagcaccttttgatgaagaactggagtctgacttggttcgttagtggattacttctgagcttgcaacatagctcactgaagagctgttagatcctggggtggccacgtcacttgtgtttatttgttctgtaaatgctgcgttcctaatttagtaaaactaacacgaataagacacgcaaaaaaaaaaaacaccaacccaacacaca

SEQ ID NO: 545081 - DNA, 870 bp, Homo sapiens
actccgggatgttcgtgcgccgccctgggtgccaccagtgcccccccgtgggccccggctgcccctccctccgtgttttctcctggtcccccgcggtctagtgtgcccccggggttgccgcgtctgtgtgtggttccccaccgggcacacaaggccgaagtccgaggctgccttgggttgggacgaaacaaggttcgttcccgccttcctgtggtacaaattcctggttgaggtcggccgcccactttgtttaaaccctctgctggggcaccgccccgggttataccagggctcctttggcggacacccacctttcgggtgggggacgctttctcccggagcagcccacccattcggggaccccttcacgtcctgtcctggatatgtccgcccgaccactccactccgcgtgggggttctcattcctcaccctcggtgccgcgcaatcctcttggcttgcggtcacggtcacacagcgttccccggttctcctcccctggcacagctttgtgaagaggtgctatcgatatattttctaccccttcatcagctcggccccccccctcttatcacacgagcggtgggcatgaccccgctttgtagccctttttcatctcagcggcccccttatcttacattttcaaagaaatcggtttatccgaaaccaacacggcatcttatagactcctcctcaacacaataagtgaaatatcttgctgggcaccctacgtgttctattttgtatcgatggtccacatgattacctttatcctctgttcctcataaaaccccaactatttttagtggacacgacatccccccatatgttcgcccaaaactttgggacccccctccaaccacaacattaac

SEQ ID NO: 545082 - DNA, 450 bp, Homo sapiens
  misc_feature (43)..(43): n is a, c, g, or t
aagaaggcaagaactagtcttctagagcagggatcccatcccncaggtcatggactggtactggtccatggcctgttagaaaccaggccacacagcaggagatgagtggaaagcaagtgaaacttcatgggtatttacagcaattccccgtcgctcgcattaccacctgagctgtgtctcctgtgagatcagcagcagcattagattctcaaggagcacaaacccttttggaactgtgtgtgagggatctaagttgcgcatttcttatgagaatctaatacctgatgatctgttgttgtctcccaccacccccagatgggaccatctagttgcaggaaaacaagctcaggctcccactgattctacattatagtgagttgtgtaattatttcattatatataacaatgtaataataatagaaataaagtacataataaatgtaaaaaaaa

SEQ ID NO: 545083 - DNA, 280 bp, Homo sapiens
ggagtcaggtggggacttggagaacttttatgtctagccagagaattggatatggaccaatcagcactctggggtctaactccggggttcgggatggaccaattagcactcggtatctagctatctgggtggggactggggaacctttatttctagctaaagatggttaatacaccaatcagcactcggggtctagctcaggttggtaacacaccagtcagcaaccggggtctaactcaagggttggcgcaccaatcagtggtctctgtcttctatctgc

SEQ ID NO: 545084 - DNA, 216 bp, Homo sapiens
tccatcttaggattggggccggttgtggtctgggctggcgctcaatgatcccggcgccttttatatcttcagaaacggtcagttgacgccgctgggccagcccaatccgcagatcaatcccgccacgatcggcaagactgaactcgtctactacaaggcgcgtgacggcctcgatattcccggcttcctcagcaaaccgcctgcagagatttatgg

SEQ ID NO: 545085 - DNA, 882 bp, Homo sapiens
cagcctggctgagctagaggtcccgcccagactgcagaccctccaggctggaggaccagcacgccctccttccctacctggaatggaagtcaaaagccaagctttcatccccaccctctgtgggccacacgtgcacttgcacccaccacacacacacacacacacacacacacacacagacacacagacacatacgcacacacgtgcacacacttacacacgagtatacacacacacacacacacacacacacactagtatatctgagcacgccccatcgcactgtatctcacctatgaaaccattacttccacgacttactatatgctgacagagactatatactactagtatcatcttttctcactctttctcactccacaaccacactcatactccctcacaaaaacacacactcacaacacaaacaagaggacggcagatacccgcctcacaccaactcctcccacatcaagaggagcgccccccagcatcactcgccgcccgcagtacccacagagagccataagagaagaaaaaacagaggcggcaggccactcacatacagcagagagaggagacgtgagcaaccataaacacaacaaacgagagaacgacaaaggcacacgcgcgcataacacacacggcagcgagccaccgcgcaacacacaaccagaggcaatcactaagagcagtcgcgcctctcgtcgtatggatgcaaggtgcatcacaagttacacaaaagcatgcgagaagcggcgcacgcactcatagtgggcacaaaataaagtaaccaccgcaccagaccgcatctcaccgacctcctcaccggggcacgacatatcaagccgctctaacaagtccggctaaccacggggcgat

SEQ ID NO: 545086 - DNA, 183 bp, Homo sapiens
gtagaagagaagaagaaggaggttcctgctgtgccagaaacccttaagaaaagcgaggaatttcgcagagctgaagatcaagcgcctaagaaagaggtttgcccaaaagatgcttcgaaaggcaaggaaggaagcttatcttatgaaaagcaaagcacttattcacaaggattttggccagat

SEQ ID NO: 545087 - DNA, 253 bp, Homo sapiens
ctttctgggtacgccatgcaccagcgtgaaaagaagcgagccggaactagctaaagatgtgatagaactgtggatctgcatgtgcatcacccttccttgttataagacaccaactgcttgaagacataaggatgtatcagttcccccatttgacagatatgaagagcattttaagaggtgcagcctctggaagtggatcaaactagaactcatatgccatactagatatgagtgttatgatacttatgacgtg

SEQ ID NO: 545088 - DNA, 171 bp, Homo sapiens
ctccacccgacggggcgggggcatgatcagaatttgcgcaggatgctgttttgatccaggtgaagctgcagcagaatgtgacgggggaggtaaagcctgtgacttcagtgcccctgtcctgcatgttttttgactgcatctacacacgagatgaaatagactgggggaggc

SEQ ID NO: 545089 - DNA, 195 bp, Homo sapiens
atatccaaaacaaacaaacaaaaaaaacccaacaacaacccataacaaagcaaaacccatcagactgcacttagcattgtctaaattccattctcaaattccaaatatcacagacacccttcacacatggatttataaaaactaccaccctccagcttgtgcaacgttgtaaaaccttatctatacaagaaaacc

SEQ ID NO: 545090 - DNA, 318 bp, Homo sapiens
  misc_feature (14)..(14): n is a, c, g, or t
  misc_feature (35)..(35): n is a, c, g, or t
  misc_feature (41)..(41): n is a, c, g, or t
  misc_feature (59)..(59): n is a, c, g, or t
atccgtgagactgngaaaagatgagcaatgccacnaatacnactccctcacgctttcantcccgtgactaattctgcttgtgtttgaaagaaaggtattcgctttcatcagggcttgggttaaaatgtgtcagtttgcagatcctgaacttgtttgaatttcgcaagccgtggatgtcaggatgagtttttccaggaagcaacagtcagctttgggcttagggttgtaaatagaagctcggcccattcctgtctacctgactccacctactgaggacagcatcatggcacgccttggccttgggctgcagcctaaggg

SEQ ID NO: 545091 - DNA, 599 bp, Homo sapiens
  misc_feature (43)..(43): n is a, c, g, or t
  misc_feature (71)..(71): n is a, c, g, or t
  misc_feature (94)..(94): n is a, c, g, or t
  misc_feature (98)..(98): n is a, c, g, or t
  misc_feature (106)..(106): n is a, c, g, or t
  misc_feature (111)..(111): n is a, c, g, or t
  misc_feature (116)..(116): n is a, c, g, or t
  misc_feature (147)..(147): n is a, c, g, or t
  misc_feature (152)..(152): n is a, c, g, or t
  misc_feature (190)..(190): n is a, c, g, or t
  misc_feature (201)..(202): n is a, c, g, or t
  misc_feature (215)..(215): n is a, c, g, or t
  misc_feature (258)..(260): n is a, c, g, or t
  misc_feature (268)..(268): n is a, c, g, or t
  misc_feature (272)..(272): n is a, c, g, or t
  misc_feature (312)..(312): n is a, c, g, or t
  misc_feature (358)..(358): n is a, c, g, or t
  misc_feature (364)..(365): n is a, c, g, or t
  misc_feature (369)..(369): n is a, c, g, or t
  misc_feature (372)..(373): n is a, c, g, or t
  misc_feature (380)..(380): n is a, c, g, or t
  misc_feature (396)..(396): n is a, c, g, or t
  misc_feature (437)..(437): n is a, c, g, or t
  misc_feature (464)..(464): n is a, c, g, or t
  misc_feature (473)..(473): n is a, c, g, or t
  misc_feature (476)..(476): n is a, c, g, or t
  misc_feature (554)..(554): n is a, c, g, or t
acgtttttatttccttcttgatgtactgcataatagtttaganattacttcattggccttaactccagtanttttctgttaatgcgtggggaanagcntcaaatgnctcancaaanttcttaatagcatacttttcaagtccatganatgtntctccatatgatgtgatctgtttggctaattcaatttntgttgctccanntccgggtacaagntgtttattccttgtaagaattttgtaaagtattaacaatatcnnntactgttntttntatatatatacatcagattgtctgtagagcctcgaagtantatggtagaaatggcgccatcttccttttcatgcttaaaaaccacnacctgnntatntcnnacttctnagaggtaaacactgtnacagtgtcccatttcttcaaggacaggaggtgtcaatctangaagagctgtagcaccaacagttttanaaagtcttnggngatcccattttgagtttagcctcactaacatgatattatatttatttgcataatgaagagccatgtctgccactttgncacctggtactacgacatttggcaccagtatcagcaatagctttg

SEQ ID NO: 545092 - DNA, 189 bp, Homo sapiens
gaaaaggaaaaagacacagagacacagtatagagaaagaaatgaggggacccaggaaccagcgttcagcactactggaaggatcccgccagcctcagagttcccttaggtatttgttgatcatttttgggtgtttctcagacgagtggggactgtggcagggctcatacggactaatacgtggcagacg

SEQ ID NO: 545093 - DNA, 170 bp, Homo sapiens
ggtcgtctagaggtccccagctgaggcaggagaatcgtgaacccaggaggcggaggttgcagtgagtagatatcgtgccgttgcactccagccggggcaacaagagtgaagctctgtctcaaaaaaataaaataaaaaataaataaaaatcagttaagatgctatggaaa

SEQ ID NO: 545094 - DNA, 255 bp, Homo sapiens
  misc_feature (23)..(23): n is a, c, g, or t
tgaaagggctgaggagctcatgngagcctgagttgtcctactctggagcacggtgtcttccttgtaaactgagtgactgtagtactatctgtgcctctgatggtaataaaactgacaagatgtctaatttttttttaagtaggaccaaaggaaaacaagatttagatagtctgactttgcttttgaacaacagacattgcaagtcaaaattgttgtcaaaagcaaagtcagactatctaaatcttgttttccttt

SEQ ID NO: 545095 - DNA, 134 bp, Homo sapiens
taaagcactggactcacctatcaattgctagattgtttagagaaactttaagtgatgataaatctgaatatacttcggctaagtacattataaaattctgtaattactggtccaggatgtggatggttcacgtc

SEQ ID NO: 545096 - DNA, 278 bp, Homo sapiens
  misc_feature (18)..(18): n is a, c, g, or t
  misc_feature (196)..(196): n is a, c, g, or t
  misc_feature (211)..(211): n is a, c, g, or t
aagccactgcgtgcaagntcttcatcctgggtgtatttacaaacggactgaatgtgagtggttaagaagtgaggagctgggtgacaggtgcctgcgaccccggccaagcactgcctcctgcgatcgaaggggcagggggagacagaaagccctcaagggggtgtggagatggagaagccagacccaggtggggggngcatagagctggggntcagggccacggaccccacctggcagtgccctgccttgcccacccacactgtgtcacccccagttgt

SEQ ID NO: 545097 - DNA, 186 bp, Homo sapiens
ataccaaaagttctggctgccaatggccacaactcagactgtgcaagttctccagtagctcatgaagacgtggagatgcgagcagccctgcagttcttgatgcaacacatggtgaagcgaccagtcatgcggtcacccataaacacaacatagggattagctgatctggaacgagcgcaaaccatg

SEQ ID NO: 545098 - DNA, 373 bp, Homo sapiens
gagttggcatagtatttgtaaaaaaaagattaaaaaatatcaggattgtggaaacactagatctgtgtatctctgttttggcatgcttttaatcagtatcttctagcaatggtttttctctgttgatcgaccgtactatcctatctttacgttaactcgatttcttaaggagtatcgtcatcacttctcaaggtgtcttgacttctacacaaagtatatatattcaggactttacaaaatagcagtacacatttaacactagcgaattacaccaaaatgctttactttgagatttgactaatttgcatagcagtacaatgtgtcccgcctaacatacaaatacaccaatgacccagtatcttaattgctactt

SEQ ID NO: 545099 - DNA, 654 bp, Homo sapiens
accgtcctaaggcccaaaatggaacgaagcaaagtgaagaaatgcgatcgaacccccccccaacccatcagcccccaatgtgtgagcgggacgaccgcgcacaaagcggcgcggggtcgcggacgatcttccgtgtgccccgcggcgcggattggacggcaagtgaaaagggggaaggaaaattgattgggaatgcggggcttcgggggaaagatctcggagccgatctccctcccccccaccaccgcgcaacgcgcatcggatgaatgggacttgcttccctcccggcgcggcggccgatgcggtatattagcgcgccactgccggcgccgttgtcccctggtgtgcggcatgatacccggggttttcctgggccggtgtttcctattgttccccccattcctcactgcgttcccctatccctctctctcctttggcattttctcctgtatccgtccccgggctccggtgcccccgcctccggatcctatcgagccttcggtacgtccctcctaccctgccgggtgcccacagcagcagagcaaggagagaaagggggcgccacgcctctggaaagaggcagggggggaaagagtctctctctctgtctgtcagagagagagagctgtccacaacaaagaacgcagaaaacat

SEQ ID NO: 545100 - DNA, 410 bp, Homo sapiens
  misc_feature (348)..(348): n is a, c, g, or t
gggcgatggcggtgacttacgaatggaaccataatgtccacatttcccgaagtgtatttcgggagcctcttctgtccccttctttctaggaccccgagttaaaagaaagaaaaaagaaagactagccaaaggtcggtggatgcccattaatcactaacacagggtcggacccctcaattaaatttgggatgggtatctctggggctccccaattggtcccggtataacccaaatggtctggctggattcccaatttcccacatggcttcaggcggttccttagtcaccctgggctacggtacttcccccaagatggcatctccaggttggcagggtcatgatcccggnaagagggtgatgaggatgaggtcccagcctcatagaccttttcctctgagttccccccacgg

SEQ ID NO: 545101 - DNA, 838 bp, Homo sapiens
tacgggatcccttcacgtactcggacgctcggatccagtgtggacctggactcgaatcctgttgccagctcgcgctctcggcttctgctccggggcttcttccctgcccgcccggggccctgaccgtggcttcttccccggcctgatctgcgcagcccggctgggcgcccagaaggagcatggctggctgctgtgggtgctgcagctgagggcaggggtgacggctgtggctctgtgatgctgctgagctggcaacgcgtggcttgggacttgctcgtgcctgcctccatgcaccggctgagcatgctcagaccattgtcgcctgaatgaatggacgtatctagtggttcttcttatctcacatccaccatcggacttcctctttaacgaaatgccaggtcctggagctgaaagagatagagggagcatgccagatgataggtgactggaggcatcaccacatgattacaccatggttggcccacacacaactattggcaatatacatcatggcgatccacacaaatacccatcggagagaacacatgtgagcacacatcaacttcaaagaggccaccagaacccaaagacattccaatgccccaaggcacacaatggactactagggcacatgggcacatataatcctcccctaagtacatccccatggtatcctttcccctggagggcaccgatcacagggaccttccctttggaagaccatagagacccagcattcacacagccaggccgccatatacacacccaagaattgcacacggatacaaaagcatatgcataggcctaggaaccgctctacagacacatcagagacgaa

SEQ ID NO: 545102 - DNA, 265 bp, Homo sapiens
tcagtcggtccactagtcacggttggtcactgcaactctgcctcctgggtcagcgattctcctgcctcagcttcctgagtaactgggattacaggcgtgtgccaccatgtccggctaatttttgtatttttagtagaggtggggtttcaccatgttggccaggctggtctggaactcctgacctcaaatgatccacccttctcagcatcccaaagtgttgagattacagatgtgagccactgtgtccagccaaccgtggactagt

SEQ ID NO: 545103 - DNA, 110 bp, Homo sapiens
ggaggtgtctgacctaaaatgtggtgacctggaggagagacgcttcaggaattgttactacacatatctgaaattctctggaggctgcatctgaaaggtattctgaaaag

SEQ ID NO: 545104 - DNA, 174 bp, Homo sapiens
cagcagtgagtggagctgctcagggtgccctctcctgcgaccagtctctgaatgttcaaagatgaggcctggcttccgtgctctggctttgtaacttatctggagggaaagcacaatgccttcacgggcagggtatgtccttttcttctcggggtgttgacttgcatcctgtgt

SEQ ID NO: 545105 - DNA, 1055 bp, Homo sapiens
agcgggcgatcgcttcctggctcctcgactcctccgctgtctccctggcacttcttgttcaaatcggccaggatgtctcattggtagaccccttgttcgttgagaccgagctatgtggggctgacacgtacatggctcctcaccgccatggctctgacaatcccggggcactggtggacagacgcgctgaaggtatagagaaacagtctgcacgaagtgacgttagtgcaccattgatgaccaagccatcgtgatgaggagatgctgttcatctatggccatcatataaaagcgaagacacacctgttggggcccgaaccactatatagtaactggtaaacgtggccctagctagttgttggcgcatcttacagcaggagccagatgggccagaggttggcggacttgtccctggcaaagtgcacgacttgcatagcgggtaacttcatgaggacccgaatgtcccatgtaagcgttgtacaatcaaccaaagtaagaagagagctacacacgagaagaactattcgcgggcactatagacgaggagctgggcatgttgggtatcacttgtggccgagtagtagttctagtcatgaaaacctgtcgagacagaatggccttagtttctttgttgtgcttaagttacccggtcgtgatattgtccgcgcgaacttccgtcgggacacaaattcaaacccccatgttagataaactcagaagctttactttccacacgggcttagttctagccatatgactgtgctcctagaaaccagatatttaacggggggctaaaccaccaggaatttatcttgaactttttccccttggaatgttaggttgtgtttgaatccctttgataaaggtcccagattttaaacacgatcgtttgtgactttgtttgttctcacctttttttataccatatcggattcgagcgataccatccccttaaatttacaacaccaacgccttatctaaaaatacttgaccaccttggtcccgcttattttgaagcccccacgttttcggttacaacaggttggcccttcggt

SEQ ID NO: 545106 - DNA, 225 bp, Homo sapiens
gaggattctgcagagatgcatacacacatgaccaattctatcatctgtaggctcattcatttctctaacagcaggtatattaataattttcatgatttgggaaggcttcggtttgaagcgaaaaggtctaatagtagaagaaaccttcataaaactggggggacttatattgattgccccccaacctaacaaaacatttcggagaaaccggtatgcatctcggga

SEQ ID NO: 545107 - DNA, 231 bp, Homo sapiens
  misc_feature (101)..(101): n is a, c, g, or t
ttccccccccccccccccgggtttaaaggggggtttgggtttagggccccccccaaaaccccctccttttgggggggggggggggggccgggggccccccncccccccttttttttggtttgccccccggagcccctttttttttttttttttggggggggcccgggaaattttttccccccttttttcccccccgaaataaaatttttttttcccctttccgggggggga

SEQ ID NO: 545108 - DNA, 480 bp, Homo sapiens
acgacctctagaggacccccccggtaactgtcatccgcacgctggcaaaactcagagagaatgtgttatagccactgaataccatcctggccacagctgatgagctgtacccgctcagtgtattcctgggatattgtcagtccagagagttgggtccaaactcttctttgacaagagagacaactctgactttgacctcctgacagtgagtgagactgccaatgagaccccctcaagatgaaggtaattcctatcaattcaccccgcaacctggccatggaaggcaacctacatcaaccacaactttctcccaacagtgcttgagaatggggaaggaaaagatacaatttccccaaatccaaagccgtatgtggaggccgccatggaataagaatgaaatcgcctctgttgcgtaccgttaccgcaggtggaagcttggagattatattgaccttattgtccgttgtgagcacgatgaca

SEQ ID NO: 545109 - DNA, 384 bp, Homo sapiens
tcccccccagaaatctgcatttactaaatttgtcttaagtccaattgtgtttaaaggtcatgctggtcgggtgtggtggctcacacctatagtcccagcactttgggaggccaaggtgggcagtcacctgaggtcaggagtttgagaccagcctgaccaacatggtgaaaccccatctctactaaaactacaaaaattagctgggcgtggcggcgcatgcctgtagtcccagctacctgggaggctggggcaggagaattgcttgaacccgggaggcggaggttgcagtgagcctcgtgccgaattcggcacgaggacgaaggtagccagacttccggttgtacatctgggcccttagtttttattctgtttattatatgtctc

SEQ ID NO: 545110 - DNA, 326 bp, Homo sapiens
gttgaaaagaaaaattccttactgtctctccttttcgaaccatttaatatgactgttgccaatggttgtatttagtaagatttgtagactctgttttcttttgacacagctgcaaggccaacagctgtgcaaagccacaagttatgctaagtcagcagttatgctatagattacatgacctgtgactgtatcattaactgcttttgttttgcttctgtaagtttgcctataaaaaccacactcagtctttgttcaatggtcagcttttcagatacaaatccactgagccggtgtacatctaaataaatcctcctgtttcccgtgtc

SEQ ID NO: 545111 - DNA, 1260 bp, Homo sapiens
tctcttgggggctttttttcccgggcaaaaaaacaacaccggggcacgggcccctctctggcctgaggacccgggacaacacccaacaccaaacacacacgggggagagtgggcggggggagaggcacgaggaacacagggtctccaagcacgagggtggtccacgtgggccaccgtgggtgggtcccggtggggggctctcagagggaaaagcgctctgtgcccggggggtggggtgcgcacacggaacacaccctgtgggggaacaagagcgccccagaggccagagagggccacgaggggacagggaccaggagaagagaggagagcaaataaacatacggaaaggcgcacgagagggggggacctcgcgagggtgtggccaccagtgggggggcggggggagggagagctgtgcacacaaaaagaagaggcgcctctggagggaggaggttagtggggcccatcgtgagagaaaacgtggccacgaaggagacacacaacaaccgagagagcaaaagagagccaggaacaaaaaaaaccacacaaacccaccgcgggagaggaagaaaaacggagagggacacactgagagacatcgagagagaaaacatgagggaaaattcaccacaagaggcccccccgcggaacaccaacattctccacaagactccgacgggcgacggcggcccacagcatttcccatatccgacacagggctcaacggggtacaagagaaaaacacctgaggcgcaaaccacaccgaagaaatggaggaggagagcaaacaacacataaacaccccacaagaagaaaacagggcacaggacaaaaaaccattcaacaaaaactgtataacagcaaaagcaaacaagaggacaaaccacaaaaaaacaacacaccaaaaccacacagaggagacaataggcaccacaggtaacacacatggggaccccagcaacaaagagacaaaggaacacaacgcgacccccccccacccaagagggccaacaaaagaacgaacccacaacacgaaccacccctactcaccccggaaagaaaacgacgcaagaaaacacgcacagaaaagcccaaaaaaaacaaaaaagggagaaaacgaagaacccaaaaaacacgagaaaaaaaaggagagaaaacaacacagagataacacccggaaagaaagataggcaaaacaggccaaaaaaaacgggaaaaagagaaaaacaagaaacaaaagcgacaagcaaaagaccccca

SEQ ID NO: 545112 - DNA, 171 bp, Homo sapiens
ggcaatgttccaacgcgtcctgcaacagttcgtcagcttgcaacagctgctcagcttgatcggcgagcaacatgaatacctgcaagccaacgcacccgtcgatgcgacggcggtacgctacgaagtgccgggcaaaggcttcttcggtgtgatcgccaacgagagcgtacc

SEQ ID NO: 545113 - DNA, 1211 bp, Homo sapiens
ggtcccgtgagctgcagagtgcccaggtggtcgcgctaaacactgtacctcgtgggaacaaaaccgtgaaggctaattatgtgacaatgtctggatgcagggaacgtgggactgccgtggacgtgggatgatgctgcgctcctgaagttgtgtgcatgaacctgtgaactgtgtcacatgtgaaaccctgggctgctggtgtgtagtctgtgtgcctgatgttgtgtgacctttgcccactggtccagagtgtgtcttggactctggcccacgcgtgagatggagctgcttggtgactgatcccacgtactgcttggtgactggttggaggtgtcccatgatgaagtgacctgttgcgttgcaaaaggctgaacctcggtgtgctggtgtgtccactgtgtgcaatgctggtggaggggaggggtgcgcagcaatgtgcgtgacaaatgacggactctgtcttgagtgttgcgcctcggctccggacccgctcccattcgaactgtgcccttgaaacgtgtgtctcactggtgacggggccatggactgaagggtgaccaaagtgcatagtgtgtcctcccacggagaacgcgccaaagggtagccccgggcgtgtcctgtacggcagcgctcctcgtggacagaacggcgggtgcgggggatgcggcaggggcatgcgaccactcaccaccaactatgcccccgggtgaatgtgccggaggccctagaacaaggtgaagtgcgccgtgcagtgtgcagcgggggcccggcatccagggggggcgctggcactgtccaactaggtaagaaacccagactgctgggtaggggcccagtaaaaattcccatttcttcccttcacccagtctcggtcatatggcttatgacgtatgggctttaacctgggagggtgaccccgaaaccagtagcctgtggccttggtacgtccagggattggcaccattgctatagaaaagcctttggttaactgtgtgccagagaagcttgccatgtcaatgccgtagtttcccgaggtgggcacttagccccattggcctatgagtccgaagccgagtatgacaagcgtaagaggtatataacacgcatgtagaatacaacccttatgtgcacgagtttttgagtaaagatgacatcatacaggaagcagagtaacgagggcggaattgcaaccaagtttggggtttagacag

SEQ ID NO: 545114 - DNA, 236 bp, Homo sapiens
caaagcagggggatcaattgaacccaggagtttgaatccagcctggcaacaaagcaagactcccatctgcacaaaataaaaaataaaaaattacgcaggcattgtggcacgtgcctccagtcccagctacatgggaggctgaggcagtagaactgcctgagccctggaggttaaggctactgcgagccgtgatcatgccactgccctccagtccggatgacagggatcctcatttc

SEQ ID NO: 545115 - DNA, 376 bp, Homo sapiens
ggaggccagtgtcagggtcggagtggcctggcttttagccctgaccgaccattgccatttttggcctcgctaggcccaggaaaggaaggaggccaaccagtcgggttttctggaacaatgggtgtgccagccctcagcatgactttgccaagcatccagacccccaatgcaggaatttggcttaggagcagctttaggtatggattgatgactaagtccagctacttcctgagcttttttcagatttcccaaagccaaagatgaattgtgctgcatcttgcccccatttttaggattttttttcctccgcccctgcagtgattgttaaaggtagttttttttaattaatatttaatccccgttccagcccttgtta

SEQ ID NO: 545116 - DNA, 156 bp, Homo sapiens
ccccgctcacaacatgccagcgtgcatagggactctggcctaaagggagtgtaacctgtgctcggcatgggcggattggttttaaaaaaaaccacgactggcttgtttcaaataccattctctatggtaaataaaattttttcttgggctctgggc

SEQ ID NO: 545117 - DNA, 234 bp, Homo sapiens
cccccgggggggaaaaaaaccccccccttaaaaataattttgggggccccccccccccgggccccttttctttgggggggtgtgggggcttcccccccccaaaggggggccccccctcccccccccttttttggggggggccccccccccccagggggggttttcccccccccccccccccccccccccccccggccccttttttttttaagttggggggggggggggttttta

SEQ ID NO: 545118 - DNA, 251 bp, Homo sapiens
caacactagcaacagcactctatgtacaagcacattgacgctcctgactatcctcaactaggggaccctattacttaccccctatgccttagcggacctctatactatacaaatactttacaggatactaggatactacctataggccagggaatccagccctactctattatagagcctacgtatctatcttatatccagctacttatgcactacacacagtcagagagcctacctggctaccggcccta

SEQ ID NO: 545119 - DNA, 195 bp, Homo sapiens
agcactgctcattatgtttgcagactctctgtgcgcacacggatgacccattcataagttggcattctttcagttggctgtatggaaggaggctccttattagaaacacagcacagagcccttacccggtggcccgtgtcccctacaaaagaaaaccctgagatggccgtctcataatagcaagtacctgtaccc

SEQ ID NO: 545120 - DNA, 1001 bp, Homo sapiens
gctccattatagcattgagggctacaatggccccgaggggtctttcacgtgggctcacgcactttgcgaattagctacacaatgtcggtgagggaaccggtcaccatttaaggatgctcaacagtcccactgtttgttcagtaggcgtggagatcacgcccaactttatagcgagggctcaaatcaagtgaccaatgtgtggtcgggctagacttcggcgtgtaatgtagccaaccggggtggcttgatgtgcgacgactggcttctagtctgggccccccgtggtggcttgtctggagggtcgtccctccgttccactgggatatcctcgtcgttgtgggtgcgtgcacgatttgtagtagaaccccctttccgtgtgatactcttcggggagtgcgtccggtactgattgatgttacttcgatattgccgtagagtgccctcgcccatgcgggcgtattgctaagcgtgtggtccgtgactactctcgcgccttattgttgggggcctctacatagggctccctcggcggattcatgtgctagcagagccatggggcgtctccacgtttggcttttggcgcgtgggcgtcccaagcgtccctttcagcacagcgaacgaggctctcatacaggggcccgtgtgtatgttgtaaaaaaaagactctgaggacaacgtgattgcggaagctttggtatcttgtagtcactcttagacgttgcgtgcccacaagttgtgacatgattttccggcagccccgtcgccatgccagtatccctcttttcatgtcgcttgctccccgaagctcctgtggaaaggaaggccccttattgcagggtagcaactgggacacggagacccacctgaggctcacccttgccctcagcccacctggggagtttaatacctggggaacccccttgcccaagcctccaggttccaaacaattcaattgctttttttttttggtccacaaattaaacctcagctagctctgccca

SEQ ID NO: 545121 - DNA, 1934 bp, Homo sapiens
  misc_feature (655)..(655): n is a, c, g, or t
  misc_feature (1176)..(1176): n is a, c, g, or t
  misc_feature (1186)..(1186): n is a, c, g, or t
  misc_feature (1412)..(1412): n is a, c, g, or t
  misc_feature (1523)..(1523): n is a, c, g, or t
ccttcctcttccgctgctttgtgctgtcgtgcgcttcctgccttgtttggcgcttctctctccgtcgtcctctgtctctgctgcgttctttgcgcgtatcccttcctgcctcctcctctcggcttccgtcgtctctcttcgctggcttcgtcgtgtctgtccgttgactcactggtgtgtcctgccgcgtgctctgttctcttgtctgcttctgaccgtctctcgctcttcctgggtgcgtcgcttggatcgcgctctggctcgctgtgctctcgcgcacgctgtgtagctgcattcgggttcatctctatctcgcgcgtagctgtctggccttctctgcggtatccgcatctgtgtcatctggctctcgctcgtctctctcgctatcctcttcccggcagccgctctggaatcagtgggtagctgtcgtggtcttctactgttgatctcgctggtgagcctgatcgcagttctgattgcatgattcatcggtcttgacctttgttcggtttctgtgatgtgtctcgtactctgtcgctgcgtcctgctggcattgtggttggtgggttctgcgctagtctgttgcagtggctgtgtgggtaccaccaacgtcgaagcagtgacgcagctgaacagaccttggtgacaaccaacncacgttggatgcaaccctcgtggagctcgccgaggagcccccacacgtgtgaccccaaaagcccacgctgtggtcgtaatcccccgccccctctgtctcttgtggccgggcccttaagggtttcaccgagccccttgggttggccctgaattctggctaccgagggccttggcccagccagaagttgtcttctgcggacacccccctggttccgaggccggtcctgggtgatgttctctgcttcccggggttcccagccgcctagccgccccctctagtgtcccgtggggaaccacggtgagaattttcctcagaatctgagccgttggaaggagacgttggtggtgcgcccccaggagagggatcccctgccccctttctttctgggggccaacccgcgttcagagccctgtttaaggttcgccccgtcccccccccccccgtttagagtgttcttcctgctgaggttgtttcgctggggggggaacacacacacgaccacactcggtgatcgcaggagncttatagggncccgcgtgggaggtatgtgcccccctacacactgggaaacacttcgcaggccgctcgtgtgatatgaatagcgtcgcaccccgaggaagtatataaaccgtgggtccaagaaagacgtggcccacagaacagagtagtgcagatgcacgtttgttgtggccacctctagaagagtctgtctttgggagtcctagaccagaagtgtctcgccagacagtctcccgcngccacccagagggtgtgtataaagtaaagaggcccagaggaaagagtgtctcccctgtgtcccctgcgtccaacacacaacaccagacagaaacacctgtgtggccaccanagagtgggagtgagaggtggataagtctccacccagtccaagagttctccgaagtgaagaatagaggtgtttatggtctggcgggtagacgtgtgttgggtcaccgtgaagaatgcaccagacggatggagacgtgtggtggtagtaaccaatgtctaccctggcgtggtccaacagttctgttgggtgctccattgtcctccagaaaaaacgtggccagaaatggtccgggccctgtatatagtccagcacaccccctgggccagacccccgccccctatattaaggcacacatttgtggaagtaaagttctgtagtatcccagggttgaaaaaaaaaataaagaaaacgtcgagcatcgtaaattcgggtcgagaagagtatatcaccgtcctgggtggtttggttgta

SEQ ID NO: 545122 - DNA, 309 bp, Homo sapiens
atggcgacatatcaactaaatgatttcataaacaccaaaaagtagttaaaacttttgtatacataaccaaaaaaaaaaaaaaagaaaacgggtcctttaacagtaattgggcggcggtccatcccccaaaaatacattaagggccttattggggttttaaaaaatttttataaatttaaataaaaaactttggctaataattgtgtgggatccccactttgggcattaaaattccaccttctcataaattcacaccattcaggacctctcattcctaaaattaaagttgacccacaaaattagagaggt

SEQ ID NO: 545123 - DNA, 1349 bp, Homo sapiens
  misc_feature (27)..(27): n is a, c, g, or t
  misc_feature (94)..(94): n is a, c, g, or t
  misc_feature (125)..(125): n is a, c, g, or t
  misc_feature (127)..(127): n is a, c, g, or t
  misc_feature (333)..(333): n is a, c, g, or t
  misc_feature (357)..(357): n is a, c, g, or t
  misc_feature (389)..(389): n is a, c, g, or t
  misc_feature (408)..(408): n is a, c, g, or t
  misc_feature (463)..(463): n is a, c, g, or t
  misc_feature (524)..(524): n is a, c, g, or t
  misc_feature (781)..(781): n is a, c, g, or t
tatatggccggcctcgtcattgttcgntccggaatcacgatatgagtgtctgcctttgccggccggatccgaaccccaaaatcgggctgtctcntttccgctctcggctgctggtgttgcccccncnctccctacgatcgctttgacctgaatggtggttcgtcccacggggccgtggtaccttagccgcgggttcgtctctgtccgcccgtctctttgttagcgctgcgtcgaccctgatctcgcgatggttggttattgtcgacatctccctaggcctcgaacggctcgtgtcttcaattgtggcgccctttgtcgccagcccacgactgnaccgacacgttgatacccttcatncattggagctgccgctgtgggttcaaccgagnacaactgttcgtctcaatncgctctagcgggtgcaccctctcactgaagccacactcccgtcgttttctcctanaagtggcgctctctcacatccgggggggtccttgtttctcccgctactggtgtagctctcngcgagaaacggtcgtggtttctcttcggcgcagaaggaagtgtcgtgtggcggccgcccgctttatactcaaacgtcgctgcggcgcctgttgctgcgctcatacctctcggccctacttttgtgtggtgtcggccttgcttggcgcccactaacatacgggtgtaatgtcggccctccagtacagttcttcctcctttgttatggtctccctcgcctctcctgtttgcaaccgcaccaactcgcctatttcaggcntggtcgcacttcaccaggaggtggttacgatacttcaacacctgcgacgtgcgtcacccacttcagtgtggtctttattataggactacccccgccgacgctcgcctcaattatagtgtcgtcaacgccgaccccgtgctatgttcgccacgttcttatcagcggtgcttggatggttgttaaccctcccgctcctaatggcctcgtacgtgcgtaacgtgccgtagtgtgttgcgccccatgaccgccatttgtcggacggcgcaattgttagggcggcacaccaatctgtgtgtagcgacgccgcagccgaggtcacccgggtagtactctccctacggcttgttgttgggcggtccgatacgtctccttcgctatagattgtgcttctctacttccgccgcagcataaattgttgctccacttagcaactccgccacagcgacgatcattgtaggtgttgagaatcgccgcgcgcgccgaatgcttacgcgcgctctatggagaatgggtgtttgcgtagtagtgattgaaatctccctttttttaaaaggcgtccctcataaca

SEQ ID NO: 545124 - DNA, 445 bp, Homo sapiens
ccgtctctactaaaaatacaaatagctgagcgtggtggcccatgcctgtaatcccagctacttgggatgctgaggcgggagaatagcttgaacccgggaggcagaggttgcagttaggcgagatagtgccattgcactccagcctgggcgacagagtgggactccgtctcaaaaaaaaaaaaaaaaggaacttttacctgatttttaaaaaaatcctaatacgggagtacggtccaaaaggggacatggtttagaatttaagaggggtagtaacagcctgatctggcctggtaagggatgggaggcggtggtcatgggagaagtccatgagattgtgactcggcacggtggcaacatctcgggactgaggggccaggtgacctgttacgcggaacaactcggagcgtgtcttccttctctcgtccaattttagcctcgggccagt

SEQ ID NO: 545125 - DNA, 434 bp, Homo sapiens
ctgttgccagggtgcagtgcaatggtgtgatcatagctcaccacagccttaaattcctgggctcaagtgatcctcctgcctcagcctcccaagtagccgggactacaccaccatgcccagctaatttttaaaaattttttagagatgggggtcttcctatgttgcccagtctggtctcaaactcccagcttcaagaaatcctccctgccgcagcctctgtagctgctgggatgagaggcatagcactgcacccagctatccctgccccctcctgccttttttttttatttttatttttttccagagatggggtttctctatgttgcccaggctggtctggaattcttaagctcaagcaatctgtgcccctcggcctcccaaagtgctgatcacgaggtcaggagattgagaccatcctggccaacaaggtgaaa

SEQ ID NO: 545126 - DNA, 172 bp, Homo sapiens
gcgaaaataataattcgcataagaatatatgataaacttcacatacttaccaacttatgccagatgtttaataaaaaggaaaattgaattaggctcctctagctgaaattccttttaattaattaattaattgagatggagtctcgttctgctgcccaggctggattgcagt

SEQ ID NO: 545127 - DNA, 281 bp, Homo sapiens
aaaagggttttaaaaaggttttgcccggtttttacccccctttgggggtaaaaaggggtttaaagggcaatttttttgggaattccccggtttttgggccaaaatttttcccaggtttggaggtaaggggaaaaaaagcccaaaaaaccccttggtttgtttgaccccccccgccccggtttgcccgggcaaggaaaagctgtttccggaaaaaaagaaggggaaaccccttttttgggaaaagtttttcccccaaaaaaaggaaagggggttttccccca

SEQ ID NO: 545128 - DNA, 616 bp, Homo sapiens
  misc_feature (127)..(127): n is a, c, g, or t
  misc_feature (463)..(463): n is a, c, g, or t
atgatcaggcagtttctgttctcagtgtgttagtgcctgagctgttctgtatgtagaaatcgttcccactctaagaactgtcggggctgtgagtcaaagcttcccagtggctctgctaagcccctcntgttaacatgtggtcactcctgactcactcctgcttcctttgctgtgtatgtttatggcctatgaggttgtatctgttacttctttctctattgtggttttaccagtgtccatgccaaatgttaactgccaagcttggagtgacctaaagcctttttcagagcatggctagatttaattgaggataaggtttctgcaaaccagaattgaaaagccacagtgtcggttgtcacaaaatgacatgctgccattcctggttgctgctcggatgcaatggaaactatgcttgattacatgtgaaaatcttaataaagtctgtgtctcagtagtataggtntcaatatttattaagaggacagtggtctggacaaaacttgttatattctaaaatcaactggtattctggaagcattttcctagaggactggaactgtagaaatttgtctctagagaaatattgtgattatccaatataatgatttttctacca

SEQ ID NO: 545129 - DNA, 151 bp, Homo sapiens
  misc_feature (15)..(15): n is a, c, g, or t
  misc_feature (100)..(100): n is a, c, g, or t
  misc_feature (105)..(105): n is a, c, g, or t
gagaatccaaaaatnattctaagtcattatgttacaataaaaacaatagtagcagcagcagcagcagcagcaacaacagctacgacttgttgatggccgnttganctccaggtgatgtgttaaagggctttccaggcacatttcctttagg

SEQ ID NO: 545130 - DNA, 436 bp, Homo sapiens
gtaccggacttgtactgtatatgccccagttgacagaatcatgcatcagaaagcttttatgtgaaagtggaatctttgattctggagaacatatcaaagctgtgactgtagtttgaaagccagcatcgttcgtacatgcgattgccttcttctaatgagctgcgccagtagtaactgaggtgtggtgattagcgaaaggtcactcctgccgtgccaccttccgtgccgatttccctagctaacacggggccagggaaggcagcgagcgcaataaatcagaacacaggtgcccattaacctgccgtgaggaacggtcagagagccttttccttgtttcattccaaaaaggtggggggagagagcaaggagaacaggtttttggcatattagaaccaagcacggtttgtgttaatcaaggacaccctgaatcagtgca

SEQ ID NO: 545131 - DNA, 271 bp, Homo sapiens
ttagcgaagcatgggaaacaattctgtgtatcagacatagctcgtattcggttctcgattcacgtctggccctgtagttaaatttttattcccgaacttagagaaactggattctttcaaacactgggctccagggtgtacttgcttctcaggaactcctcatactccaaagcaggaaggatataagctgagactacctttgcctcctcgctcatctgtccaacactcatttctcttgtcctttgcactatttccccaccaccccttcagc

SEQ ID NO: 545132 - DNA, 411 bp, Homo sapiens
  misc_feature (239)..(239): n is a, c, g, or t
cctgatcactatgccattttgaacatttttttaagtattccaaatgacttagaaaattctttttccatgactgcatcttactgtacagattgctgcttctgctctctttgtgatataggaataagaggatacacattgatttctttgtgcctgttttatgtgcacacattaggcattgagaatttgaacattttttttgtccatgtatctttggatctttgataaaaaaaaattaaaanaaaattatccctgttcatcataagcacttttacggggtggggggagggagtgttctgctggtctccaattaccaagaattctccaaaaattaattttctgcaggatgattgtacagaatcattgcttatgccatgatagctttctacactgtattacataaataaattaaat

SEQ ID NO: 545133 - DNA, 173 bp, Homo sapiens
gggccggcctcttgaacctctgtgtctctgagcaggtccaggttgccagaaggtccaggtatgccagaaggtccaggtatgccagaaggtccaggtatgccacgacaggtcccggtatgccacgaaggtccaggttgccagaaggtccaggtatgccagaaggtccaggtatg

SEQ ID NO: 545134 - DNA, 601 bp, Homo sapiens
cgcggtggctcacgcctgtaatcccagctctcagggaggctaagaggcgggaggatagcttgagcccaggagttcgagacctgcctgggcaatatagcgagaccccgttctccaaaaaaaaaaaaaaaaaaaaaaaaaaaaaagaggtgtgggggggccggggccccggagaaaagttttaagaaacaaggggggggggggggggcccagggggtaagaggagaaacaggggccaaagaggtgtggtcccctgagaggagaaaccggggccagagagaaaagaggggggggaattctctctcacaccaaataaaaaacgccccggggggaacaccggagaggcgtttggggaaaacaatccaagaggggagagtctgggagaggctccattagggggactctttataaaagcgggagagcccaaggcggaagccggaagaaaatacaagaatattgaccgcgcccccgcgggtcgcgggggggggcccacgccgacggacagcaaagaacgccaacacaaacacgaaaaaaaccaccacaacacaacaaccgacaggaaacgcagcaacaacacaaacaagaacagaaagaacaacaagca

SEQ ID NO: 545135 - DNA, 946 bp, Homo sapiens
ggagatagattgtgatcttccagaggaaggaggaggaggcggctgaagcgtcggacccagcctcagtctctctttcgttttccttttcccttcccccaagcctccgaacacttctctaagatcagccggccgttcctttgagcatcagatgaacccgatctggaacccggcccgatcacctcgaacggacggtgaatctcccgaccgtagagggtaacgcagcccagcgaggaacaaccagtaaggaaaggcccccgcggcaaggaggaacagaaagcacacggaagacagacacaatgggagaaacggtgggatggcccaaagagtgccccgtgacagccaaccatggtgtgttcgaagaagcccaccggtgcccgccggaaaacaggacagacagagaaccacacacggggccatgaacgccactcagggagaaggaggcaagatcacaacagacgacagcatccaaaaccacggaaacaaaaagaggcacgaacaggcacaatacaaatcacaaaggcgccaatcagagacacaaacccacacgagagcgaaacccacacggaacgcagaaaactcaggggcccactccatggcgacgcaagcgaaagcgaggaggttgaacagcacaacgacacagggcacactccaagtcacacccaccggagcacccgcaccagcccacgtaaggactccaatcaaggaagaaataacaacaacggaccaaacacacacgcaaaaagacgagcacgccactagctatcacacaacgacacaccgcgaacaaagatccctcacgaagaccgcgacgagcagcacggaccgagacgcagagacccgaaagaatgacagcacaatcgaaaaaaggagcgaacgaaccccccacgacaaagcagaagcgcacgacagaagacagacaagaacgaccagactacagagacgaaca

SEQ ID NO: 545136 - DNA, 432 bp, Homo sapiens
gcatggagagttctcagccttcggacagctccctcactgacatcacggagacccgcaggcagcctatgcccgaccctgtgcctgactgcccctgtctgacactgttgccgacttggcttggtccaccctggtacatgctgcccaagcctatgcggtcccgagagcctcattttttgctgctcgtgattaaaaccatcgccccttgagtgctcgcatccaacagtgatcagctggaggaccaggctctggcccatgattaagccttacagcagcagtaaagactcctctcccactctggcttctatagtgcaccagctcgaacgtctgctgaacatgcttcggcaagatttgaagaatgaaaaagaagaccaagctcaccttcaggcggatgtgcagcacctgcgagaggaccacctgaggctacaggaggag

SEQ ID NO: 545137 - DNA, 448 bp, Homo sapiens
ttaactagaatgccataaacagtgagttttatcttaatatcagcgggaaagtaagcagattcaaagtagtcagaaaaaagcaaacaaacaaaaaccagagagatagagaacttagaggactctacctgttaattctataattgctggattttcaagttattaccatttgagctctgaagtttccttggtgtaatttgtccatcattttaaaatgcacgcaagaatgggccatggtaggtagccagctggagtcccagaaaacctggcatggcttaatgtttcttattaatctcctgagagcaaagaatatcatataaatcctgttagggaatgttaggagttaaaaccagagttttagatggtggcaaccaccctggtttttaattagcttcttgagcccaccatccagaatgtttatttttgctcttagaatattttcaaaaacaaa

SEQ ID NO: 545138 - DNA, 1526 bp, Homo sapiens
tccctcccccccgggggtatttgggcaaaaaacacccaaagagagagagcccccccccccactgacaaggggagccccccaggggtggggggggggggggcggccccaacccctctctgtgtgcgccccctgtgtggtggagaaaaatatatattctctctcctcacaaacccttgatggaggggcgcccggggagacagggtgggagagcagcccagcgacgagagagacacacaagaacggggggcgcgggagcacgccgggcgcgcctgggggagagcagacctctgagggaccagggcgcacgtgtgtggcctgagcgcgccgtggcggcggtgggcgcgcgcggccacacacccgcgcgcgccctctctgtgtggaaacacgcgcggcgcgcacacacacacaccctctctccccacagagacgggggggggggcgcacaagaggaggagcgacaccacacacacaccacacaccggtcggccgagagagacacacccactctgtcggcgcgagcatatgtgcgcgcgcgtatacacacctctctgtcgtgtgagcgcgtatcaacacagagagcgcgccgctcctgtaggacacgcactctctcgcgcgcaagcgcgcgaccacaacctcaatctcgacgcagaacacgcgctcataggtgaagaagaagacatgctgtagagaagcgacgtccactcacttcctctactcttctcctcctcctcatatcatcgctcctcctcctatacaagaagtagtcgcagactgagcgtcctactcctcctactcgtgcctgagccactaccactacttcccttcctattcatatcatctcctcatcagacggaagacacatatctcgctgtggaggatggttggcacatcatctaccccacacaccctctccttctaattaataacacaacaacgactatgcacaagacaaaatatacttctgtagatagtcgtcgataaacatctcgcacggagtcggtcatcttacttctctgatagttgccaatacccctcacacttctgatcattgttgacggccggcaacctcaacttctttctctcgtgggatagactataacaaacgatagtcgatcactgatcttaatagcatatcatgattgacgcattgtcggccagtagatatacctcacctcacttcaccatactaatcatgctcatgttacctcaccaacgttactcatcttactgctcttctccagtcaccacataacacaactcattcccctccgtcgtagaacactcattcactctcactctcaactacactacaccacaccccacctcataacgttcattctgctacctctactcaccatcactcgcgtccacagcaaccttatactcttatcccaaacacccaaacttcactcacacatctgctcgcagtacttcctatctcatattcaacatccactcacatctcactcccactacaccatactcctctcttattacatcatcacctacctctatatacacaaccc

SEQ ID NO: 545139 - DNA, 566 bp, Homo sapiens
ggaccacccaggcaagagttcgccgcgacacaactcggtgagggcatctgcgaagtcaccaacaggcggccaccactagccgggtgcaggacaacaggcaaccccaaggaacgccccgggggtcacaccacaccgcatggagcaacaacaaggtgcctggcggcatcccaagatagcccaccatagtaccccgaaaggagtcgtccaaaagggcccacaacgggaagaatatccccccggtagacgcacgcaccccccaccgcctcaaatcaagcgggggaaacaagcgctccaggacaactgtgttttggacccaccgggcccatttacagtcagacgtccttaagcagcaggtttcaaagaaatccagggggttcgatgaccccggcccagagagagtgaagatatatctgtaggtgccagcaccttgttttgaatttattcggtgcttcgacgcaccgtatcaaggttgatatgattataatccccgtcccttttgggggaaaaaaaggtagccccccaaccccccgttgtcggccccccctaaataaaaaaaaaaaacaaac

SEQ ID NO: 545140 - DNA, 501 bp, Homo sapiens
tcatgatcaaaaactttcaacaaattagtcatagaaggatcatacctcaacataataaagaccacatgagagaaactcacagctatcatcacactgaatggggaaaggtgaaagcctttcctctaagaactagaacaatatggtcactttcaccagtctcattcaacatagcatgggaagtcctagcctgagcaatcaagcaaaagaaggaaataaacagcatccaaattggaaaagaggaagtcagatttttcctctttgcagataacatgctcttatatatagaaaatcctaaagacttcactaaaaaactcacagaactgattaacaaattcagggaagttgcaggatacgaaaatcaacatacatgagacaagaacttaggtggttaaaaaagtttaaaaatcagtgcacaaaaatcagtagtttacacaaaatatataccaacaacaaactagctgaaaaataatcaagaaaacaatcccatttacaattgctacc

SEQ ID NO: 545141 - DNA, 772 bp, Homo sapiens
agcggggggcgggccgggggcgcgcgctctgcgagctggatgtccaggctgcgggcgctgctgggcctccgggctgctggttcgcgggctcgcgcctgccgcgggtatcaaaacgccacgaccatcgcctggtcgactcgtggacccacctggctgcgttggaccgacagtcggctgaacctcgtggtgggccgcgtgggcactcagagcgtcatggcgtagcacgtgtggttgaagataccttgacccagtgagcgaggcccaaggccgtggcaccgacgagtctcatttacatcggatactatccatgtttcgagctgctggtacccaagcttactgtgaatctgggcctgggctgatgctgtgctactatgctcactccgcaaacgttgtcagtatctcccgccagcgatccattggtccatggagcactcccctacctgtgcctggtcaatcatgtgcgcccgcgaggcaactagagtgggacgagagaattgtgtgcttggatcattgttgctcagatctaccactctagagaagcattccttatgagcatcatcgggacggcgcacatcccaattcattactgtggactcccctaaaaatggtcgctaagacaaacgctccccgcttcttttccccgtagctaattcagggtagaagacctaagatgctcgaggcaaacaactgtgaacgatcgccctttatccctatgtgtgtgacacatggccccggccaagaaggccgcatggaccgactctggcatcgaacc

SEQ ID NO: 545142 - DNA, 146 bp, Homo sapiens
cattggcgtgagggtcgttggggcgagtaggtgacctcacctccgctgaggtgacctgtgtagggtctcatgcagaatgatggaatctgggcctgaaggcggcttggcgtgagtgccacggcattcacttgtatgcgctgcacctg

SEQ ID NO: 545143 - DNA, 324 bp, Homo sapiens
cctccttccctccccactacccttcccttctggtatccatccttctatcgccctgagttcagttgttttaatttttagctccacaaataattggaacatgtgaagtttgtcttcacatggcttatttcacttaacataatgtcctcgagttccatccatgctgttgcacatgacaggatctcattcttttttatggctgaatagtacttcattgtgtatatacaccacattttctttctaagtgtctgttgatggatgcttagtctgcttccagatcttggctattgtgaatagtgctgcaataaagatgggagtatctcttca

SEQ ID NO: 545144 - DNA, 1975 bp, Homo sapiens
cgccgcttcagcttctgctttagcccggagcccgaggccgaagccgaggccgcgcctggcccccggccctgtgagcggctgctgaaccgggtggctgcgctctttcctgtgctccggcccggcggctttcaggcgcactaccgcgatgaggatggggacttggttgccttttccagtgacgaggagctgacgatggcgatgtcatatgtgaaggatgacatcttccgcatttacattaaagagaagaaggagtgtcggagggatcagcgcccctcatgtgcccaggaggtgcccagaaacatggtgcaccccaacgtgatctgtgacggctgtaacgggcccgtggtggggacgcgctacaagtgcagcgtctgccctgactacgacctatgctccgcctgcgagggcaagggcctgcaccgggaacacggcaagctggctttccccagccccattgggcacttctctgagggcttctctcacagccgctggctccggaagctgaaacatgggcactttgggtggcctgcctgggacatgggcacaccggggaactggagcccacgtcctcctcaggcaggggatgcccaccctggccctgccacggaatcagcctctggtccatcggaagatcccagtgtgaatttcctcaagaacgtaggggagagtgtggcggctgccctcagccctctagggattgaagtcgatattgatgtggaacacggaggcaagagaagccgcctgacccccacctctgcaggcagttccagcacagaggagaagtgtagctctcagccaagcagctgctgctctgaccccagcaagccagacagggacgtggagggcacagcacagtctctgacggagcagatgaataagatcgccctggagtcagggggtcagcatgaggaacagatggagtctgataactgttcaggaggagatgatgactggactcatctgtcttcaaaagaggtggacccgtctacaggtgaactgcagtctctacagatgcctgagtctgaagggccaagctctctggatccttcccaggaaggacccacaggactgaaggaagctgcactgtacccacatctgccaccagaagctgacccccggctgattgagtccctctcccagatgctgtccatggggttctctgatgaaggtggctggctcaccaggcttctgcagaccaagaattacgacatcggggctgccctggacaccatccagtattcaaaacacccaccacctttgtgacgatgtttgctcacccattctgtgtcccctttcttgtctcatagtcgtgttgagttagtgtagaaccccagtgcctctaagtcccaatttctcgtcattcttctttcagaatctggggggtggggatgcacaaagccctttagggcagtagaacaagtgacacggggggagttccaagggtgtgagtgcggattctgagaaacactgatcagcttcccatggatgctggctccttccagccaggggaccccgccctggggcagagcgagagactcctcgctggggaggacgtggagaccatactgcatcttatccgtactctccctgcaggattacaccagcagtccagaagagatcttgccaaatggctttctgctttttctttcttttttaatgactataggacactgatatgtaactgattttctgctagaagtttgatatcctctgaatttagctaaaggatcaccagcattcacccggggtggaagaggctgtcctgtagcaattacagctcaggactgtggctaacatctgaggaataaagaagggctgacagaggaactgatgctgttcagagtactgcctatttcataaccactgtagttaccgtttccaaacctgtcagctgcttttaaagttaagaaaatcgctttgtaaccattctatttgtaaacaattttaattaattaaaggtataagcactttaatc

SEQ ID NO: 545145 - DNA, 157 bp, Homo sapiens
ccgggtcgtacatgtaaatatatgtatgcaatcttttgaacctatccatgtcaaagggtatttgaagccaaactgaaaactttcctagactacatgttgatgtatctagaatatccactggacgaggctagagacgaggtaccgacgctcgcaattc

SEQ ID NO: 545146 - DNA, 257 bp, Homo sapiens
  misc_feature (47)..(47): n is a, c, g, or t
gattacctcaacacagagaggcacattgaaaacatgggaagggccangcgcgatggctcatgcctgtaatcctagcattttgggaagctgaggcaggcaggtgattgagcccaggagtttgagaccagcctgggcaacacggcaagaccgtctacaaaaacatacaaaaatttacttggtgtggtggtgcgcatttgtagtcccagctactcaggaggctgaggtgggaagtcagggttttgggggaaattccctac

SEQ ID NO: 545147 - DNA, 198 bp, Homo sapiens
ggtcttctgcacgacatcgatcatgccgatcgcatgcccacgcgttggtggtgctgaatccggaacaggtcctgaagaacgaaaagtatgtgatgaaaatcaccggcgatgatgacgcaggcaaggcgcagctggataactttatcaatcctaagaaagcctacccggttatcgcgacgacctccgagttgatgacta

SEQ ID NO: 545148 - DNA, 442 bp, Homo sapiens
ggatacaggtatactgggcgtagtcttacagtgaggtgtactggtattacacgggacagcgtgttgaaagttggttccttctgcatgtggagatgtgttcagaattgcgggcttctgttgggtgcgtggtctcgttggactgaggggtgaagctgcagaccttcgcggtgagtgttacagttcttagggcggcgcgtctggagttgtcggttcctcccggtgggctcgtagtctcgctggcttcaggagtgaagctgcagaccttcgcggtgagtgttacagctcataaaggcagcgtggacctacagagtgagcagtagcaagatttattgcaaagagcaaaagaacaaagcttccacagcgtggaacgggatcccagcgggttgccactgcgggctggggcagcctgcttttattctcttatctggccccacccacatcc

SEQ ID NO: 545149 - DNA, 566 bp, Homo sapiens
gcacgaggcgtcttacgaatcccacagtttgaagtagttcctgagtagtttcagatttcagggtattgtttgaaagagattttgggtgaaaaatatgacatgatcgagacaatgtacgatatttcaacatggctatgtggaagaagtcaatcctcaaaaaaaggcgttggtcaattagtggttttgaaaggagtataaaatccttacgtctatgtttcaaatcctgttttcatttgttcatccattaccgccgtatttacaaagcagaaaattataaattaatgatcactgtttaagtttattctacaggaaataaaaggggaaaactggaagaagaaaacaagagaattgtaaaaatcttgtattgaattggtttataggttcacatgatatgagtataaatatgagtaacatacatgcgctgtctagtatttaaattatgacgacgttcattttacctaacaagttgttgcgtaaatctataaagtaaattgtcggttttaatatttcaagaatttttgataaacagtgttatcagtttcatcatgataagtgtagcctaaatc

SEQ ID NO: 545150 - DNA, 355 bp, Homo sapiens
gttgtgaactcacaggaatgcagggggctccaggagcctcatgcctcccggctggttggggaagacgtgcagcaggaagtctgaggtatgacccaccgcaatccccagaaggaccacgtggagggagtggcccagcagcagcgagaatctcatgagctctcaaggcaggaacggtgcctgcaaagtgagcagagcgaagaagttgaccctcacccgaggactgcggcggttccacacgtacaccagcatgaacgtgagggcctgccccaggaagaacagcctgcccaggaggcccaggaggatcaaaaggacgcccccgatgagaaacatgaagacgaagacgggcgtgcggccg

SEQ ID NO: 545151 - DNA, 223 bp, Homo sapiens
taaggaccagctccacagatttttctagtgtcaagagctgtctctttggactacagttaattacacgggattagagggtctggggcaacttaagtgaactaagatctatcttggacaccagctatcacccagctcggtaggtttgtcgctctactataatcttccatatttgtacctagacggtggctcttagctgtcttaggtagctcgcttggtgggagct

SEQ ID NO: 545152 - DNA, 215 bp, Homo sapiens
gcggaggtgcatgttttcatgttacttatactaacattagttcttctatcagggtgatcagcataggtcccaattgggtgtgcaggcagtccagttcatatgtttgggcattattcaggtcagcgggtgttgcagcttgacacgctttcttcaatatgcgctggctgcttcttagcgccgtcactcatgggtggacactgaaacattagccgggg

SEQ ID NO: 545153 - DNA, 110 bp, Homo sapiens
tgagctggaactttagcagcagcagcagcagcagcagcagcagcagtacccttagtaccaggtgcttgttagggagaagcttccaggagagctgccttttgaagcttctt

SEQ ID NO: 545154 - DNA, 155 bp, Homo sapiens
gccatgagatgtactgggacttgcctcaccttggcttgaggggacctcgagagcggtcccgtgcgaagcggtgttacacgtggtggtagaagtggagggcgtgtccgggtacttgagtacatagggcatatctacccgtccgcctactcagacct

SEQ ID NO: 545155 - DNA, 473 bp, Homo sapiens
acagaagtataaatctccagccccacttcctaaggaagccgctgttttgattattatttgtgtttgatgttggagtcttactctgttgcccagactagagtgcaatggcatgaacttgctcactgcgacctctgcctcctgggttcaagtgattctcttgcctcagcctcccaagtagctgggattacaggcacacaccaccatgcccagctaatatttgtatttttagtagagacggggtttcaccatgttggccaagctggtctcaaactcttgacattgggtgatctgccctgctttggcctcccaaagtgctggttttacaggtgtgagccaccatgcgtggccatgctttcactcttaaaaatgcttgggtttaagagttggtggacaaaggaaaaaaaaaaaatgccctgatctggatgatgagtttacggccatccggttgagactgttgtaaagtagaaattttc

SEQ ID NO: 545156 - DNA, 213 bp, Homo sapiens
ctacaacctcctattctcaatgaccgcgggaccctgcgagtccctgcggtcatcacgatcccactcaggcagccttctgtcagatctaatcattgctgaaccttaaagtttgccctactccttcagaatctccattatcgctgcttcttcttctttctgatcgatctcgagatgggttccgacgctcgaacttcctgatcgttgttcatggct

SEQ ID NO: 545157 - DNA, 358 bp, Homo sapiens
cgcagacatacacttctcaaactgaggctcgcactctcgcctccagcatgaaagtctctgtgcgcccttctgtgcctgctgctcatagcagccacacttcattccccaagggcttgctcaaccacgtaagggcccctcttcttctccttgagaccacattggcttctctctgaggtatcatggaccattcaagcagacgtggtacccacaggcttgcgtttaacgctacttttccaagataaggggactcagctagaattccagctgtgaacccctacagcttctttcaggaatccagctctgggcacacttagcgcaggtacttccccagctggtttcagcagagtttggggatccg

SEQ ID NO: 545158 - DNA, 271 bp, Homo sapiens
ctgcaacctctgcctcccaggtttaagtgattctcctacctcagcctcctgagtagctgggactacaggcacccaccaccacgcccagctaattttttctattttttagtagagacagggtttcaccatgttggccaggctggtctcgaactcctgacctcaggtaatccacccacctcagcctcccaaagtgctgggattccaggcgtgagccaccacgcccagccactcctttccagaggtaaaaattgagaatagatggaccctatgt

SEQ ID NO: 545159 - DNA, 166 bp, Homo sapiens
ggcaacctggaccttctggcatcctggaccttctggcataccgtggaccttctgggcatacctggagccttctggtcataccgtggaccttctggcatacgtggaccttctggcatacgtggaccttctggcatacctggaccttctggcataccttgaccgagga

SEQ ID NO: 545160 - DNA, 137 bp, Homo sapiens
ccggtcgtctactactactgttccgatgcgacaagacaacggacggggaatttcacactctggggactgacgtggggtggatggaggcaagaagcattacaacaaaccatgctgggttaataaattgcctcattcgc

SEQ ID NO: 545161 - DNA, 211 bp, Homo sapiens
gttagagatcctgaaaaacagcactatatacatgatactataacgttggcctgctttaagctacactctagggcgatgtacacatcggcactgccttacagctacactctaagaaaggttggacagccccctgctgcacagctctggggagtgcttgcccaggatgggagaggcagcatgcttgggctgagccagcatctcccagcaagag

SEQ ID NO: 545162 - DNA, 580 bp, Homo sapiens
gatccagccatgaagaaagccgtttcaaaattgctgatcagttgtcagatggaccattcatgtcctaggacttggtcatcatcattctcctgtgagctacagagcaggctgtcctctgactttgcattagtttaaatatatgttaaaaaaaaaacccacacatggagaatcctttctaaaacaggcgatccaatgaggaagttatgggaggaccgggaatagaaacgccaacatacgtgaatgcttcaggccttagctcaggtgtcctctcctcatcagggtgcacagtcttgatccaaactccctccattcctcacagacatggtgatgagacaagattgacttaacctccatgaacctcagtatcttctttagcatatgctggcatggttgtagcgagtatctaaggtggctccgggcccagagcagactacagtgggttctccagagaaacaaaagcactaggatgtgtgtctgtgtgtgcaagatggactgatttaaaggagttggcttagatgatttgaaaagggcatatcaactctgggaatgtcaaaggttgagagtaggaagagttgaatca

SEQ ID NO: 545163 - DNA, 440 bp, Homo sapiens
cgcttactaggctcgaggtcatccagcctcagtagcttctgtgagctcatccgctaaagccaccctctttcgtctctctagtcactcggtgtcatctggttattcctctaccgtatcttgcatccacactccgcggactattggcgttcaacgctccttctccttatgagcgatgctttctcagattggcccttgacatggccttgttgcctctttcaagtccatattccaactcaagtttgtcatagcggttatctctcacctcgcaatttattggtcactccccatcctttctgtacttcgcctgattacacatatcctgtaggccctggttctgtgtttgttccttctgctggtgctatgtatggggcatgaatccccgcaatagcttcgctgtgctcttctcggcggataacgggtggggaaacaggggggtcgac

SEQ ID NO: 545164 - DNA, 617 bp, Homo sapiens
ggtcgtactagaggatccccccttgacggtgctgacgtctgagagtactctaaggtagcccaggcagaggagtatatagccttatgtgccttgtcgtaggtcagcatcaggataagtaggatagggagagagtatacctataaataggtctcttaataggcttctagaaacagtagaaagataggtttatgtttctaggtacaaacaactgtatttatagttatttaaagaaaaatactacctaaaaggtgatgtaggcctttctatgacgtagcaaacttgaacactaacgtacttataaggcataactatacaagtcttcctgccgtaagtcattgctgtagcctgaaggtaactctagctaatatatttctttgtgtaacttgggagcttgtactaagagaaagtcctagcgtcttttactacactgtggtctgaggataccctggagctaaattaggcccctgacagagtcggactgggaagggggcggcagtgagcaggctgggaacagcagagataactagcagggcacaggtggataccttaccaagttctccaatactccttttatctcttatctaatttctgttaaaaataacttcgttgtcctttac

SEQ ID NO: 545165 - DNA, 837 bp, Homo sapiens
gtctagcatggggcttgtttaccactcctgctgtaagcatgccttcgacacctgtcctgccgacggtctccccaggccgtgtgcggtgagccccgtcacttgcccatgacctgactccgacagtccaccgcgggaggagcatggcatgcgtgtgtacgagcaagctcggcgctcctatccagttctgtcccagtgtgccagctgcccggtgtatcctgagtcgtgcctttaggcaggaggccttgctggatgaagatgaggcactggctggttgaggaagggtcgccctgacgtggagggatggatgctcatgctgatgattgtgccacaagcaaccagcacatgcacaatacaagagtcatacacgggcatgaaggtggggtgcataagctctgccctgtgtgattccactgagggtgcacgggacccgtttgggccaacagcaatggccatgatgaagatgtgcgcgtcaccagcgctctgtcgagagtactccaccccatgatagctacctggtcgactcctggaaggtagagtcttgtgcaagaactaactacgtcgccatgcacgcaccactgtacacaccgtggattcctggaccctcctagaaatactctgatcccactacaggggccgtgcccggagtactgccaggcggacacaggacaggaggcgcacccatacattcgaacggatgacgcaggattacaggctgtgtgtcctggatgactacttacgtcaccaaccgtgtgagtcacgtagcagtggggcaaccaggaggtctctaggggggaccttggcgaagggaaggggccttgctgccagactacggagagg

SEQ ID NO: 545166 - DNA, 255 bp, Homo sapiens
gcttcatacttcttcaaagaaaatatatatacaagatgtcaaatatgacatatgaacaggatgttcaagcatcaatcatcacatggggaaatgcagaatcaaaaccagaatgggataccacccaattcacaccgcattaggcataggttatacatttaaagaaacgaaacacagaagatggctagggcttgctggctcacacattgtaatcctcagcatttatggaggccaatgcaggcaggatcacttagaacc

SEQ ID NO: 545167 - DNA, 108 bp, Homo sapiens
ggagcccatgctggctgcatctgaataggcctaccgtcacccaccgaccagtttaatgtgcttagagcccaagaagatgggatctagcactaggaataaacctttcat

SEQ ID NO: 545168 - DNA, 104 bp, Homo sapiens
tgtaaacgacggcagttaaaactgatggccagttaaactgactggccagtgtaaaactgactggccagtgtaaaactgacggccagtgtaaaactgacggccag

SEQ ID NO: 545169 - DNA, 117 bp, Homo sapiens
  misc_feature (117)..(117): n is a, c, g, or t
tgaaacttagggaaagctcaaacattggacttaacagacaagacttttagtcaaattattattaacaacttcaaaagaataagagggaacccaggggaattatttcttacccaatan

SEQ ID NO: 545170 - DNA, 514 bp, Homo sapiens
  misc_feature (131)..(131): n is a, c, g, or t
  misc_feature (144)..(144): n is a, c, g, or t
  misc_feature (177)..(178): n is a, c, g, or t
  misc_feature (191)..(191): n is a, c, g, or t
  misc_feature (193)..(193): n is a, c, g, or t
  misc_feature (201)..(201): n is a, c, g, or t
  misc_feature (205)..(206): n is a, c, g, or t
  misc_feature (211)..(211): n is a, c, g, or t
  misc_feature (224)..(225): n is a, c, g, or t
  misc_feature (229)..(229): n is a, c, g, or t
  misc_feature (233)..(233): n is a, c, g, or t
  misc_feature (250)..(250): n is a, c, g, or t
  misc_feature (259)..(259): n is a, c, g, or t
ctcgcctgagcagatacacaaagagaaaagatccaaagcataccaatatagaaagtcatcaaaccacaaagaaggcaagagaggaaaaagaaacaaaggatttacaaaaaaaaaaaaaaaaaaaaaaaaanccatttaaaaaangggcccagggaagtccttattggtcggtatttnnttccagggtaatngnttaatttntccnntcaangggtatagggggnnggangggnataaaaaagacctaacnatgggatgnctacaagagactcacttaactttaaggactctcagacggaaggtggaggggagggagaaagacttcccatgcaatgtgggaaacaaaaaatgtctaggggtagctacttttttttcagacaaaacagattttagggaaaaaactgtgcaaaaggagacaaggaacttcattatatggtaggacgggtatccatccatcaggaggggtaaaccagtggtaattatttatggcccccaaaaccagaggccctaacat

SEQ ID NO: 545171 - DNA, 1137 bp, Homo sapiens
  misc_feature (381)..(381): n is a, c, g, or t
  misc_feature (898)..(898): n is a, c, g, or t
ggggggagacacgaggggggggtcacacgcacgcagttgtctgtttgcccccgcgggatgtgggtgtgcgacaccccggattggtgtgacgcgctgcccgccccccggcggggggagtatgcttgggagatcttttgtccgcgctctgggggtgccgcggctgctgtgtggagacgcgttttgcccctgatgaggcgcgcgggggggggcttggcggtcccacggcgcgggtggggtgcttgtggtgaaccggcgggcgcaccccgtcgtgaggggggcgctggttgtccctccggagagccgctgcgtgggccgcgaggaagaagagggggcggcagtggtgcttctccccgcgacgggggtggttggcccacacgcgcnattgtgtcccgcgggcgctgcccgcggggcctctctatggaaacgtctcgtcccgtggggcacacccacggtggaggacacgtgccggtgtcacgggccccgcgagttttcttctcgcgggtgggctgcttcacgaacccgccgtgcggcgccagcatggtgccccacgacaggggggcttcgcaccacgactgtgtgtgggcgcaccaacactgtgcgcactggtgtattggggccgcgcgcactgtcgagatgaatctctgtgggcaaaagatgtgagagcagagagcactctggggcgagatctcacgacgcgctctgtagagggggacccgctctcccagggagtcccacacagtgtggcccctctctgggagggggacagtagagtgtgtgtgccgctgtctaccgcgctagacgctgtcttgggggagacaccgcgggagaagagggcgtccagaggtagggcgctatatgtgtgttgcgcttgtgcgctgtaaagtgtttctctgggggngacacccaaaacaggagttctcccatagaggggcgctgcttcccctctcaaaacccgaggggcaccacaatgtgggagccttttctttacacctaattcacaggagaataccgtgcccttttttttataaagcgctttctattttattttgataaaaaaataagaaaatgcccccccaagcactatgctggtcatgaactgcattccaaatgtggaggtaaccccaaagcaactgtgta

SEQ ID NO: 545172 - DNA, 271 bp, Homo sapiens
taacaaaaacaagtgtatatggaaataaagtcagatggaaaattcatttaattaaattcccgtaatagtcactttatctgataaaagatggccatcttaccccttttcggccccatgtctctcagtaccccatggagctgggctcagtaaataggaattggtatacacgcactgaggcaattagacacgtttggaagactggcaataacctgatctcaccatggccgttaagcgtcatggctctaaattcacagatgctcctttcatcctc

SEQ ID NO: 545173 - DNA, 153 bp, Homo sapiens
catgtgttatatctgcggaccctgcatgggaaaatgtacattatgacaatctttggcaaatggtagcagagcaccctcttctaacaaaattactgttatcatgacaattaaccagccggtggaagaacacatctggattccaacacaagtaaa

SEQ ID NO: 545174 - DNA, 136 bp, Homo sapiens
  misc_feature (15)..(15): n is a, c, g, or t
  misc_feature (121)..(121): n is a, c, g, or t
  misc_feature (126)..(126): n is a, c, g, or t
tccctgtacttcggnttcctcatctgtaagatggagatgatggtactgcctcataggttaatgtgaccgtccagtgacattaagtgggtattcagccacagctgtggcacacagtacagtnatgcnagtacattgc

SEQ ID NO: 545175 - DNA, 290 bp, Homo sapiens
aacgatggtctcagctactggagataacctgagatgagagttgcttgagcatcaggaagtgtgatgctggtatgagacgtgtacatggcgagttgcactatattgtgtatgatgagactgaaactgtgtctcagagacataaaaatgtaaatatcgttggtagggaatcaattttttaggggagctgatagggatgctttatggaaggaaggaatcaaatgtcagtctgcctgaaatgaagaaactacctcatgactgctattttcagagcattcccaggcagtgcgtcg

SEQ ID NO: 545176 - DNA, 335 bp, Homo sapiens
gccggctccaagttatataagcgctcatgcaagactccacaatgcttttagccacagttgcgaatacagattcctgagtggtatccacatctgcaacatgatcaaacgtgaaggtcttgggctcagggttggagtgcagccggagactcgtggaggacagcacagataagcataagttctgctctccatcagctgacccagatctttctgcaggaggacgaattcgcacaaaaactttgatggcatcaccttcattacttggttggttagactgaccatttgtcacgctgcgtaactcagttttgcagccgggtgccatagcgccctcacccctc

SEQ ID NO: 545177 - DNA, 148 bp, Homo sapiens
gttttcaggacccccccggggcccttaaccgggggtgagggtcccctgttgttgggaagggaacccctccttttcccccaactcccaaccctgcctgtgggccgtttaaaagttgggggcccttaataaaaattagtaaatccttcca

SEQ ID NO: 545178 - DNA, 498 bp, Homo sapiens
tgttaatttttaatggccggatgattatataacttgattccagagcaaccaattgctcatttttggacttacaaatggcaggagttcaaagattaacagaagacactggaaacaggcttaatatttgcacttttagtgtaataaaggaaagaacgcccccgcagccaagtaatactggtataataccgctcctgatcttgtgagcaacaacctaaggcatcgggcgtttgaccggttacagaggggaagaaggccatgctgatttaatactattgggactcacatgtcttgattggaggttgaaacaaacttattggctaagcgcctgagttttccatgttttacaggacacattatttatgatttctatcatatacactatcaaattgaactgttcggctgatgaagcacaaagattgggtccctgatggaatgctcatattggagtggaggttggcacatttgccaaaacacgattacatcgccagttgaatacag

SEQ ID NO: 545179 - DNA, 541 bp, Homo sapiens
gcggccgcctactactactactactaaatacgcggccggtcgaccaggctcttgtcgatcaggaaggtgccactctgctgaccaatgcctttgaggcaatagcggctcagcaacgcgtacggcaggttgctcgcccgctccatcgggtagtgcccgctgcgggcttggcaatacctgggtgctgatatccgagccgatcacctcccacggcgtactgcccaggccctcgcagggtcatggccaggctgtagggttcttcgcccgaggagctggccgcgctccacacccggaaggtctttcccggcgcggcgcgggcaatacctgttggcgcaggaagtcgaagtgcttgggttcgcggaagaagtaggtctcgttggtggtcaacaggtcgagggccactgcagctaccagcgttctccttgcccatgatcagtttgaaataggcatcataactgtccagttcgtgatgcttgaggcgcttgaacagacgcacggcgaccagggcccttttcgcggccgacaagctgatcctcgccgccgc

SEQ ID NO: 545180 - DNA, 386 bp, Homo sapiens
  misc_feature (46)..(46): n is a, c, g, or t
  misc_feature (98)..(98): n is a, c, g, or t
  misc_feature (170)..(170): n is a, c, g, or t
atggcaagcaagggcttgcaggaccttaaacaacaggtggaggggnccgcccaggaaaccgtgtcaacggccggaacggcagctcaacaaatggtggnccaggccacaaaggcggggcaaaaaaccatggaccaactggccaagaccacccaggaaaccatcgacaagantgctaaccaggcctctgacaccttttctgggatcgggaaaaaattcggcctccttaaatgacaacagggaaacttgggtcggcctccttaaatgataacagggagacttgggtgaccccccttccaggggccatttagcacagcctggccctgatttccgggcaacccccacctcctcggtttgccccctcattaaaattcacgttccccccctga

SEQ ID NO: 545181 - DNA, 267 bp, Homo sapiens
taaaccccccccccttttcatggccaaaaaaaccggttttctttgggtgcttttccggggggtattccggggaatttgccccccctggggcccctccttgattgcctggccctggtttgccctgcccctccggggttcctccgggggggggttttttactttttgaaaaggggaagggggtttttagtggtttcccccattaaggtttttccgtttgcctgcccccccttttgccttgccccccccccccttaaaatttaacgttga

SEQ ID NO: 545182 - DNA, 584 bp, Homo sapiens
tgggccatctagctgctacgggccaccgctgaatgaggacctgtcagtactagccatcctgcttgtgggtccaatatgggctctcttgtcgagggaggttgaatgtagtacctgttggggtagaagtagaacgggtctgcacgagcgcttccatctggcatgaccgcaaggggaatgtggtccatggcgcagctccagatctggaacgggatggacgtcatggccacgagatgcccagcgggaatcacagcgactagacctagcgacccgagcaggcctccagccaggagtgcatcaacgtgcttctgcagtacggctgccccgacgagtgtgtgtagtatctgttttattggacagcagtctaccgtggtgcaaaaacaagaatgggaaaaatgataggataactcagtatttcaaaaggaaatcgacaaagttcagctaatattagcatgtgtcagtacttttaagtaaactaagtaaatacacaaaatggtgatttttctgaccataagacgtatcccaggtccttctgccaaggtggactttgttagtctaggcctcctggcacattgcccaagtatacc

SEQ ID NO: 545183 - DNA, 107 bp, Homo sapiens
gtacactctagagtatccccgtaacggacaatgcagatccacgcggccagagcagctcccatattgagcacctggctgaagatgcagctctgaggggggaaggatcc

SEQ ID NO: 545184 - DNA, 396 bp, Homo sapiens
catgatgtccgacctctctctttagcttccccggcgtcgaatacccgctctgctatctctgcggtactacactcccacgtacaccttgatacctatccgtctatcgccatgctggccaaagccaggagggtggactgcacctgtgtatggtcggtgttctcaaccaggtcgaaggcctcaaaaatgtcgtgaggctacaccccatactaggtgatggacttaacgaagtagccgatgtactccagatggtgccaatattgggtagactcattgatcttcttcacggagcctggctgcagctaatagataaactcgcaaagaatgatgccatctttgaggccgaccatgaagtagttgccgatgcgacggcctgtcaccccctcgaaccactctctc

SEQ ID NO: 545185 - DNA, 408 bp, Homo sapiens
gcacttctggccttatgatgaaaccttcgacttcagtgcactggcactgctgttacatgatcccgacgcagaacacacaggctcgtgctgtcttggacaagagaatttaacaaccttttggtcatggggactgatagaaggtttgatgaagatgatgattatagctttagatagagcaccttcatggtgccaaaagtttagaccagaggacattcgtgggcttagctgctgggtcagcagagactctccctgtaaacttccgggtgacttcttctatgtcttccccctctatgcagcctgcgaagatgcagatcgacggcaatgtatcaggaacacagaggttggattctgctacagtcaggacttactcctgctaatgtctcctgttgtttacccagactacttcta

SEQ ID NO: 545186 - DNA, 640 bp, Homo sapiens
  misc_feature (24)..(24): n is a, c, g, or t
  misc_feature (61)..(61): n is a, c, g, or t
  misc_feature (81)..(81): n is a, c, g, or t
  misc_feature (144)..(144): n is a, c, g, or t
  misc_feature (150)..(150): n is a, c, g, or t
  misc_feature (189)..(189): n is a, c, g, or t
  misc_feature (203)..(203): n is a, c, g, or t
  misc_feature (207)..(207): n is a, c, g, or t
  misc_feature (230)..(230): n is a, c, g, or t
  misc_feature (249)..(249): n is a, c, g, or t
  misc_feature (293)..(293): n is a, c, g, or t
  misc_feature (314)..(314): n is a, c, g, or t
  misc_feature (332)..(332): n is a, c, g, or t
  misc_feature (388)..(388): n is a, c, g, or t
  misc_feature (397)..(397): n is a, c, g, or t
  misc_feature (446)..(446): n is a, c, g, or t
  misc_feature (451)..(451): n is a, c, g, or t
  misc_feature (470)..(470): n is a, c, g, or t
  misc_feature (545)..(546): n is a, c, g, or t
  misc_feature (572)..(572): n is a, c, g, or t
  misc_feature (634)..(634): n is a, c, g, or t
aggtttggatgtgggcttgggttnttgctgacggaggtagttggtcctgcgtgggggattnggtggtaagggcagcttgancctcaggctgggtggatgctgatgtgctggccccagtctgcccagctcaccagctcactgatntggaancacagctggatctcccgctgggccccctccacggagttnctggcgtggatganattnctgctgatgtggacgctgaagtnaccccttatggttcctggngtagcctcagccgagtcggtgtgtccaatcatggccctcgaggngcggacgacattttacccttnccagaccatggccaccanaggcccagagctcatgtagcggatgagggcagggtagaagggcttcctccgcagtnctggtagtnctcggcaaggacgctctctggtgcctgcagcatcttcatccccattagngtgangttccgttttttaaagtgntggatcacgtccccaacgagccgccgttgcacgccatcgggcttcaccgccaccagggtccgctcccggggtccnngagggccctccttcaaaaggcaagangtcagaggcactgccacctcaccctttcacgtccccacgacccgggtttccagccagacccnaggggt

SEQ ID NO: 545187 - DNA, 948 bp, Homo sapiens
  misc_feature (260)..(260): n is a, c, g, or t
  misc_feature (262)..(262): n is a, c, g, or t
  misc_feature (307)..(307): n is a, c, g, or t
  misc_feature (311)..(311): n is a, c, g, or t
  misc_feature (329)..(329): n is a, c, g, or t
  misc_feature (347)..(347): n is a, c, g, or t
  misc_feature (382)..(382): n is a, c, g, or t
  misc_feature (415)..(415): n is a, c, g, or t
  misc_feature (429)..(429): n is a, c, g, or t
  misc_feature (431)..(431): n is a, c, g, or t
  misc_feature (439)..(439): n is a, c, g, or t
  misc_feature (443)..(443): n is a, c, g, or t
  misc_feature (467)..(467): n is a, c, g, or t
  misc_feature (485)..(485): n is a, c, g, or t
  misc_feature (488)..(488): n is a, c, g, or t
  misc_feature (499)..(499): n is a, c, g, or t
  misc_feature (508)..(509): n is a, c, g, or t
  misc_feature (511)..(511): n is a, c, g, or t
  misc_feature (520)..(520): n is a, c, g, or t
  misc_feature (620)..(620): n is a, c, g, or t
  misc_feature (644)..(644): n is a, c, g, or t
  misc_feature (651)..(652): n is a, c, g, or t
  misc_feature (654)..(654): n is a, c, g, or t
  misc_feature (663)..(663): n is a, c, g, or t
  misc_feature (667)..(667): n is a, c, g, or t
  misc_feature (676)..(676): n is a, c, g, or t
  misc_feature (680)..(680): n is a, c, g, or t
  misc_feature (692)..(692): n is a, c, g, or t
gtgatggtgaacactacatattttatagatggttaagttgagaattaattatgtttatcatggatggctactaataccaagctcatgattgttgcagcctcaacgtcttaggcagtaaaacttgtctgcagcactaaagggggagaaacccttatattttgcaaactgtccattcgttaaatttattgtaacctaataccaaaaactgccgtttttcatattatttccccacctcctactttttttttttttttggctantnggtaaaataaccctttctaaaaaataagcattaagggaatgtttnaaanaatttggcttcatttaantataagccattagtgaantcttacagagatgtactttaagataaaattagctngtgctaagtgtttaaaaacttggtttactggtnaagggggaatggcncnttatattnaacnggggatggtccctccctcagtttntttaaaaaaaagagtcanggnctcacaccaanttgtaggcnngngggagcttngccataggtagatacacgggtcaagaagtatcactttttcaacagcatgacgaagacaaggaacttcattataatgtcacaggtagaggacattattatncaagggatttgccagtcagtgaanaatgacnntnacaattttnctcngcagcttgnggcnaataaattctcntgcataaagtttgtcattcaattatgtgcctggtccctgattggcaagacatatatttttattctatggacgacagcatgactgattttggaagcaaatttcgacacggagaggtacgacggcagtaggcgggggaaaatattcaagaagttggcgtactgtcaaaaatgtacgggttgacattcacagcacggtatgccaaacgtctattagattacttccaaatagttctaaaaaaagggcagctcgacgctcg

SEQ ID NO: 545188 - DNA, 915 bp, Homo sapiens
ggggggatgtccattttggagggatccattttgatcctttgtactctataatgtgaactttcccctgttccaacacttaaaagagaattattagcacatatctaaaagatggaatttttttttttttctcttgagaacagagtctcgctctgtcgccaggctggatttgcacgtggggcgactctgggcctcactgcaacctttgtgcctccgtggggttaaagcgaattctccgtgcctaagcctcttggagttagctgggactactcgtgcattgccaccaggcccggctaattttggatattttcagtagagacagggtttcaccatatggcgccaggatggtctcgatctcttgacctcgtgatccacctgcctcggctcccaaattggctgggattacacgcactgtgccctcctaggaaattatttctcttaagtgaaacttttattctccattctttcttaaggatttgggtacgaaaaatgagtaggcctactcatcaatatcaaacgggcacattgagttccttcccttgagaacagcactttaattttaatttcagggctaatatgcatacctcagaacaagtgcgtgcatattttccttttagacacccctccagtgggtcctcaatattaccccattgttgtgttaccacgggtgactctgagaacatttgggtcggggctcaccatctaactgggcaactcatcagaattcgatttattattggcatgaaccttagacgccgaaacaataaaaggccatgttcttctacagacggtgtaacaaggcccaactttggtgatgggcctgcccctttggccattcggcgcacattggtcgatcgcagcaccaatgggactcttccccatgggggttacgccatacgtctgacagtggcgctaggt

SEQ ID NO: 545189 - DNA, 398 bp, Homo sapiens
tccggagcccttgatgtcctgcaaatgaaggaggaggatgtccttaagttccttgccagcaggcaacccacttaggtggcaccaatcttgcacttcccagcatggcaaccagtcacatctcatacaacaggcaacacagtgcatggccatctcatcatccatcaacatctccaagcaggcaccctgggcagcacagcttctgctggacagctccgtgccaattgtagcccattgacaaaccctgctgcatgtcagatgttatatccatccaggcaatacatggccagcagggcaagtgactgaacgtttgcatgctgccaactggcagccaatcccaattggctggccagcattcacatcctggacacccttcactcaaccagatcccaggacagaca

SEQ ID NO: 545190 - DNA, 130 bp, Homo sapiens
aatgggaccaggggaccttttggtgcagtgggtgtgcctgtaactcattatgatcgtactgaggcagcacttctgcagggtgcatacctgattgttgtattgtacagtactcttatagttaatgtagtga

SEQ ID NO: 545191 - DNA, 331 bp, Homo sapiens
aacgtgcgcctggaggaagaaattgctggttggcggcgaaggcggcccccgcgggaggtcaccgtggggccggacttgcctccgtggggcccggaccttggcttgggcgcagggatccgaggcaccctttttccttcgtgggcccagcggggggtccggaccgaggtaccctcccaggactctccggggtcctgtgagctcccgtcgggtgagcacgtttcccccaaaccctggaatgactgctttaaggtccgcaaggggggccagggccgggacgggggtcggttttggttaactgaaagaacccataaaatcatgttcctccccccca

SEQ ID NO: 545192 - DNA, 1912 bp, Homo sapiens
  misc_feature (1503)..(1503): n is a, c, g, or t
tttgttttttttttttgggaattaggattaacaaatttatatattctttcctagggaaaaagaaaaaaaaaaaccccaaaacaccccgggggtagggaaaaatctggaaggggtaagggcccaaggtgcgtctggcctataagcataacaaaaaggcaaaatctcagtgattccggggctttcccggtggtatttgtggagggtgggatgtgcagcctataacagcaacagcccctcgggggaaaaccggaatctcctttcaaacagagcccagagagaggccccgcgaaacccagcgggaaagaagccaacacgcggcaaaccttctcacagaatttcttctcaagcggagagggtcgccgagaagtgtggcgaggcctctcggcacatctcaagaaactgtggcccaaagagagagacagggacagccgcttctctcccgtggccagagcgtttctccccaaccgggcgcataacacagagggcgccatatttttccccctctatatataacacacagagacatgcgccaggcgcccacaacacacaaccagcgctacacagacgcgggagaagagacacacaccgagagcgctcccctctacaccgcggcgcacgagacccacaaggacaaatcttcctttacggggaaggatgcaccgcagcaaacggcggcgaggagcacactccctgaaggagagccgaccacaagctgtctccccaacacaagaacacgccgcaacaggagcgcccggagcgacgggtgcgcgagacccccaccactaccagcgaacgacacagagcgcccacagagcggcgccgcacaaccatgggggggggcgaccaccccccaccacaaaaatataaacacacaccctccctattgcggcccaacgaaacaggaggactccatggtggcacacaccaaccaaaggcgggggggaggaacagaacatactatcgtacacgacaacgtcgaccagctcagtccacggccggtgggtcaacacaccacagacagactcggacgggatccaccgagtgacgaagcccccctcacaagacagcggcactgacacgaccgatcctccccagacgacaccaacaatgtacggtggcggcccccccaagccatgagcggggcgacatcatcgactcaaacaaccacagccaggccgcgaaagttactccacccaaaaccaaacagcttctccactcacgacccaaacagacgaccgtggggaggtaaaaacaagaatgataatcagctccatcacacacagcaccagcgacctatggtgtggacaccaactaggcagacagactgcagagcagtccagcgaacaaaggagacgagagcgaactcccaccaggaaaagaggacgagacgcgaaaaaccacccccacagcagacaaccgtgtggccacgaaacgaggcgcaccaaccaagctatcgtgccaaccgagggcacacaggcgcccacacaaacactctacgagtgngagcgacacgagcacccacccgaggagggaactcaccccacctcagccacacgctgtgagcagccggacacacgagaagagatatcagggtggacaacaatccactagagcccgcgcagtggtatccacccagggagggagggcacaacaactggacaaaaacggccgggtggcgcgcacagcgggaaaacaccccccggcgtggtgcaacaacccccgcggaggaagcgagacaaaaggagagcgcagcaaactgagcgacatatacacctcccagaatgaagcgcacaagagcagacaacacaacagagcacaacacacacaaccgcagacgtaaacacacagcagaaaaacaaagaaggaacgccgacaacagagccaaccacacggcagggcaataatacacgcc

SEQ ID NO: 545193 - DNA, 491 bp, Homo sapiens
agtgcccattatggccgggggggggaaaaaaaaaaaaaaaaaaaaaaaaaaaatttttgggcggcctgggccctgaaaaagtttttaaaaccattggttggggggcggggcccagataggtatataggtgaacagtgggctcataaagggtggttttccataggaaattccgcggccatggacataggggctgtgggtattctcctcaccaataaaaaaagcgcccggggggcacacgagaggcgtttcggggaagcaaaatctcccaggaggggagcttctcgggggggctcccgataagggggatcttcttatcaacaccggggagtctccagagcgaaggctccgaaataataaaaattttaggccccccgacacgaggtgaagaatacgatgcgagatatatagctgtcaaacaactgacagccaatatcgacgccgacagaggcgatcgcaccaccaggacgggcacacgagagaacgaacaagag

SEQ ID NO: 545194 - DNA, 1493 bp, Homo sapiens
tggccaagaacaaggcgctcatacgagaaggctggtagaaaagggagccaagaagaaagtggttgatccattttctaagaaagatgggtatgatgtgaaagcacctgctatgttcaatactaagaaatacttggcaagacgctcgtcaccatggacccaaggaaccataaatggcattctgatgggtctcaacggggtcggtgtgtttgaaggtgagctcttgcgtgattctgcagatacttggatggacacgcttgcatctttaggaacatacttcagagccttgcagttgacgtcgcatatgcatgttccagtgctttaacagagactggccatgaacttaagctttcccagtggcaataggcagtctgtatcgccgagcacaaataagatgtcgataaccccagtggactccacaaacaagaatggggccagcagcgaaatgtagtgtggagagcttccgagcggtctcggagtgttctacaggtagcattacccgcgagtggggtcttagcatattggccttttgcgggtacctgggtcttcctggatgagtatggtgatatttcaaagcttagagaacacacaacggtcagacctagagtcctaggaatagctgagaatagggagccctccgttaattggccttcaaggccaccccacaatcaggactcacgacacgaaactcgcggaaaggaaatgactgcaatcgggaagagtcattgagccccggagggaatgtgtttggcaggaagcggatagcttgcatcctttggcacccacggaaaaggtttgtggattacaaacctaacagaccttgtggatgtttacccaacgaaccataagggcaaacttgggggcaaacacaacgcgtacgtaacttaggaacaccaacgcggtgattatgtcgccaaagatccattaaatttagtaatggcccctagcattgcagcaacttggtcaaactcggccgtccctctttccgggtagatagaggcacaacagagggtttacataacatagttggccttcgcgagaacggcgaaacgatcccaccaagaggagtatgcgaagaatttggggctggacaacacggagttgccatggcgacacgcttctattgtcgatcggggcatcgccaagcgagaggcgagcacctaaatgcgcacctggcggcctaagacacaaggagcccaacttaggagaggttggtacgaggaaagcaaccgacacagcacgacgtcaaacaacagggcgctgcaacacacgccaaggcgctggcactgggtgcaactaactaagcgcagcgcagcaaacccccagggacgcgcgaaacaggaaagtgcactgcgacgatcaaacaaccaatgatgcgcgcgcaccagtcgagccgaaacgacaacaagtggggcgacggaaagatacaaacacaaacgaatagggagaaccatgccgggaacggaaaagaagcaacagccaagagacaagaacaa

SEQ ID NO: 545195 - DNA, 427 bp, Homo sapiens
  misc_feature (415)..(415): n is a, c, g, or t
agtcgctgacttttcctgaatctgatcaagagaatttggctttataaatatttttcttgtcacattttgttacattgcaacggaacaacagggtgcccttccctccttttgtctgccccaaatgatgaggtagatctgaagtgagtgaggttatggaaacagccagcttttgttttattttttgagttgcaatgcgcctctaagaatcttgcctcgataacaaatgtattgtgaacttttcaccaaaagtaaaaataaagtcactttctaattttatttacgtatttttaggaatttacttattttttttaacctgttgtctcacaaaaatctgggatctaattgtgttttggattacctaatcgggcctacttagcctttggaggggtattttttaaaattttatggagtttantcatggattaaa

SEQ ID NO: 545196 - DNA, 990 bp, Homo sapiens
taacttaaaaatgctttatgggaattatttggataaaaccaaatactgtgtttttaaaacaaatttgggaaataaaacctatctcctgtgaagtcgccccctaaatttccagggctttttccccccaatagggtgacagctggcctcacacgggatattacagggaaatgttgtaagtcctaaggatatcgcccagcaccaggcgcgaaaattttggtgtcagcaaatctccatagcaaggaaggaaaacaggcatgtgggtctcctccaccttctctcccagcctgtaagggctcatagtttgcgggaactcacgtggtcataagcatttgacagccattacaaagctttctctctccagggagggggaagatctccaaacctttagacctttcatcttcaaatttagggcaaaactctcgtggtaaagggtgcttgtgctcccgtgggtgtgggcttcccagaagttcatccccgtggtaatcccagcaccttggggacaactgaggcaggaggactgtttgaccccaggagttagagaaccagccgtggacaaccttgtgcaaaacgcccgcttctttacccagggtataacaggggagataaactgttcttacaactccagttggttagagacgtacaccacggggccttgtgggcgccgatagccggatttccccctgccacagagcttaggtcaagtccccaagcaaatgaccccagaaactcccagtgttgcacaccggtagtttacaccacaatcggcacggtggggcacccggcccctttacttacccacagacaagggcccgaaaatgttggctcgccccgcccggttgtttggccagatggcgccacaaacccttgtgtgtaatcccccgtgttcccccctacattacaaggcgggccattaaaaacttctattttggccacccaagaaagcccacttccgcaaaacaaaaaacgagccgggccctatagaaaatccca

SEQ ID NO: 545197 - DNA, 193 bp, Homo sapiens
ttaggaggtggtattgataagtggggctgagggttttgccttcatgcatgaattgatccattcatgaattaatgggttatcatgggagtgagactggtggttttctaggaagaggaagagagacatgagctagcagacctagccccctcaccttgcgatggcctgtaccacctcctcacctccttaatgataa

SEQ ID NO: 545198 - DNA, 775 bp, Homo sapiens
  misc_feature (373)..(373): n is a, c, g, or t
  misc_feature (383)..(383): n is a, c, g, or t
cagcgcccctcccagcataccactccccagacgctgggaagtaggtccctgctcatcagcgaggcgggacaggcctggagtgctggccagacctgccagggtgccctgtgaagagctactcccacgcctaagcagctgcccgtggacgcaccgcccgagtgtcttccagatcccctggagccgaggacgaggaggaggactatgatgcagtgggctgtgtgatcaacagtttcatcccccagagggtagccagaacatctcgcgaaaggttgactatgagaaacttggtccagcgttctgtggcagtaagtgatggccccgagcttcatgaaacaatgtatgctcacttggacgtggacctcacgaacggatnacacctcgangcgagttgtcgccattttatgcgaccgatcatacgaattatgctcgcggcaattccgtctcactacaagcgcaacgcacaagtgtcggcttgaatatgacacgacaacgtgacacccacacggacgtgcggccgagcattgcccatctcgagcacaagttttctactcccctccagcagcgtacggtaagcaggtctcacagaaaccctttggccagaagcaacagttggcgaccagggctatcactacgtcggtaccgggggagtcccctgagcgatggcaacatcccatttggcccactccagcacaccaatcccgctgaagcacaccagggcatttcagtcattactgctatgaagccccaataagaccaaagggataccagttactac

SEQ ID NO: 545199 - DNA, 663 bp, Homo sapiens
cacgagactaagcgctttagagcatctgtagattgctgagaagtctctcaaggaaccggaagccatgttccaaccagttctttgttccctgtagcatggaaataatttaatcgaattgaacttattgcaaaagcctgctccattcagccagatgaggcactttcagagcaattagtcacaccttacttggaagccacaggatatatttaccagctgcccaggccctatgcagttgaacaagcagccaccccagggacgtgaatttctgactttaaattctctcccctaccgaaatgcttcccacttcctgaaatgactcagcaacatctgcaacaaaacaagtgtttacgtgccgcagtagcatttgcgaaaacactcactacattgacaaggtggtagtttactgctctaccagccgaaatgccagtatcaaaacctgaatgcacggcaacgacagaccagggatttcctgcaggagcaaatgagacgcgttcggccaagcgcatgctctcttgtagtcagcaccctgccccacaggacagcactgcctacacgtttaccggcagccttcccatcggccacaggacgacactcgccattgagtacacacgcacccacacctgtcaactccgtactcaccatacttctgagggcctctggccc

SEQ ID NO: 545200 - DNA, 375 bp, Homo sapiens
  misc_feature (22)..(22): n is a, c, g, or t
  misc_feature (29)..(29): n is a, c, g, or t
acttctaggtagatttcttagnactatgnaatttttttccttcataacagttaatattcttggatcaagctgcaggttttagctatactcattctctctgaaatgaattattaaccagtatcagttttacatttttcatttcttttcatagataaaagtaaattatgttgtcattgtaaaggaccagatgcagttttaaaaaatttttaacattcatggacttaataaaatttcttttctgaaacttttaaacaattttaaaagatcagtggttttttaatcaggacaactttgaaaagatgaacgtgttccagaaaggggatgacttcacattatagtaatatattgagaagatgattgttaagacggtgacaa

SEQ ID NO: 545201 - DNA, 486 bp, Homo sapiens
  misc_feature (115)..(115): n is a, c, g, or t
  misc_feature (401)..(401): n is a, c, g, or t
  misc_feature (423)..(423): n is a, c, g, or t
  misc_feature (467)..(467): n is a, c, g, or t
ttgatttcatatttatgaaacagcttaaatgtcagtttgagtgcaaaacgacaccttctccagcttctcacattagtcctctggctgcttggctgctgctgaacgtttctttctntctttttttttttaaaggcaactcgtgacttccctgcttggctcctttaaggcaggaatggaaagaagaggcatgaatggatggatggatggatggatggatggatggatggacggatggacggtcagatggatggatgcaaagatagatggatgagaccacaattaaatactctcaccagagaggagaaagaaagaaattggagaaaatgaaacaaaaatcaaatagaagaaatattttggttttatagggagttttgatcaattgagaggatcttgagacattnttgtgttatttgccctctatgntttaggttgaaaaagtaaacataaaaatttggaaaataaagatntcaagagataaaaaaaaaa

SEQ ID NO: 545202 - DNA, 149 bp, Homo sapiens
tgctgctgcggtgactctagcaggatcccgtatctctaacattacaatgaacattgatgttgaagaaaaactacagtacatggatattttcaaattgtatctagtgcagctgattttaacaataactactgtgttcctggcaatagtgt

SEQ ID NO: 545203 - DNA, 126 bp, Homo sapiens
gccatgtgaatttcttgaggcaatgggacatgagcaagcatgataccagcagggatctgattcttcctccacctcagctgaaaggcctcatcttgcagcacggcccaccattggaaaccctttgtg

SEQ ID NO: 545204 - DNA, 214 bp, Homo sapiens
tctgatactcaacgtgtgcccatcataccagaaagagctctccttgagctgtaccctgagggctacgtgcaccaaggagagtgatggggtcatccttcatacattacagaagaccgccgcactcgcatccatcgaggcacgcttgtccctccacgctggaacacagggatactgcttagagttacaggcaggtacagggtctaggggaccatga

SEQ ID NO: 545205 - DNA, 193 bp, Homo sapiens
tgtaaacattctttttcaaaattaattaagcccacattcagcttatttccacattcattcttgagtttttttgagaagaatttttgaacccaaaatctcaattagttgattaacatttattctcttcattaccaaaattactcgttgattaaattttgtggatctccagtttgattaaccgcgtttgttgatc

SEQ ID NO: 545206 - DNA, 115 bp, Homo sapiens
caggtcgatgatcggcaggacggtgccgcgcagattgatcacccccttcatatagccgggcgagcgcggcaggggggttgcgggcgtccagccgcggatttcgcgcaccgacatg

SEQ ID NO: 545207 - DNA, 578 bp, Homo sapiens
ggtccatccttacccttactggccctctgtggctgcagactgataccactgtcacatctgcagctgggggcccgtccctcattgtgttccctcctagatggttccttccccattttttttttttttcgagcacggagttctcgcttggttgcccaagctggagtccagagtggcgtgatctctgctcatggcgacctccgcttcccagattcaggcaattctcctgcctcagccttccgagtgggtgggattacaggcatgcaccgccacgcccagctaattttggtatttttagtagagatggggtttcgccatgttggccaggctggtctcgaactcctggcctcaagtgatccgcccaccttggccttacagccactgcgcctggccccaggggagcatttattcaccactcccaggagagctctgaaccactgaaggggaggaagaaatcaccagtgtgactctcagcctccctggggagctgcaccgttcttggcactgaaactccagcccctctcactcacaagtgtggggactgaggctcagaggagggaaggcacccggggcccagctgt

SEQ ID NO: 545208 - DNA, 433 bp, Homo sapiens
aatcaagataaaaaatacttatacagtgatgtgtcacttaatgacagggatatattctgagaaatggtgccgttacgggtttgtccctgtgccaacatcatagaatatacctactgcacacctaggctatatgatgtagtctattgctcctaagctacaaacctgtatagcatgttactgtactgaatactgtaggcaattgtaacagaatggtaaacatttgtgtatctaaacatagaaaaggtacagtaaaaacacagtataaaagtcaaaaaatggtacacttgcaagggcacttaccaggaatggagcttagaggttggaagttgctctgtatgagtcagtgagtgagtggtgagtgaatgtggaggcctaggaaattattctacactactgtagaatttatgaacatttgggctacactaaatttata

SEQ ID NO: 545209 - DNA, 158 bp, Homo sapiens
agcagaaccaggaatacaaaatactagctaggatagtagaagacgcggctaggagcaggagataagccacctaccgccgcctgctggagggagaggatagcccacctagactcagtacaagaaagaaccggtagaccacccgtacaggtagcgtacca

SEQ ID NO: 545210 - DNA, 293 bp, Homo sapiens
  misc_feature (135)..(135): n is a, c, g, or t
  misc_feature (192)..(192): n is a, c, g, or t
  misc_feature (203)..(203): n is a, c, g, or t
  misc_feature (263)..(263): n is a, c, g, or t
gtacgtttcagagaactttttttcctattgtgcaacacgaagcttccagaaccataaaatatcccgtcgataaggaacgaaaatgtcgttgtggttgtttttctgggaaacgtgcttgacaatccttgctgtacntctagacgctcagagaggacacagccgcgtcctccccgtgcctggctgattccatgngctgtggtgcntgattccaggtgctttcacggttggttccctggcgtgggaaactgctctcactttgcagncccaatttcccaaagctcctgttcaatgtt

SEQ ID NO: 545211 - DNA, 440 bp, Homo sapiens
actcgcaggacggacagatggagctctctatagctggagggcaggcggcttactctctggccgaggtctaagggtagtatcgcagaggtctgcaagtctgacccttaaatgcagattttcaatgctcctttgattctaagattatcatctccatccatatgtttgccaatgccattctattttacactcaagatcccagtggtactttactagaaagtaagacatctataatgataccattctgatcttgttcccatattctcaagagggcttgagttaaggtcaacagaaacgggcacgtctttctcccaagcttgggcacatccatcctcatcatgcctctaaccctcattgcgaccattagattttaggaagaacgagcaaaaaggcgcccgaagaagagaaagagaggagagaaaagtgcgagtgggacagtgggg

SEQ ID NO: 545212 - DNA, 207 bp, Homo sapiens
gggaggacctcttggctcaggagctgaagttctgagccaagaggtcctcccaacctaatgtcgaatattccctttgatgaaatgaaggaaagaatactgaaaattgtcactggatttatggtatccctttacatcagcgactattgaattgttacagatcaaggagaaactatcggaacagacaattctcagaggagtagaaagatg

SEQ ID NO: 545213 - DNA, 276 bp, Homo sapiens
gcctatctcataaagtccactaggcatattgagttggagcaatgattcgatgttgacaaagcagctgatcagcaggctcggtaggttcgtcgcgtctacctataaatcttcccactattattagctacatagtatgggtgtgctctttaagctgtacttaggtagctcgtctggttgcgaggggtcttagctttggtcctccttgccatagttgatttctagttgaatgcatgactgcagaaggtgataggggtatagaccattgcatatgcgatg

SEQ ID NO: 545214 - DNA, 465 bp, Homo sapiens
  misc_feature (104)..(104): n is a, c, g, or t
  misc_feature (133)..(133): n is a, c, g, or t
  misc_feature (164)..(164): n is a, c, g, or t
  misc_feature (169)..(169): n is a, c, g, or t
  misc_feature (173)..(173): n is a, c, g, or t
  misc_feature (187)..(187): n is a, c, g, or t
  misc_feature (191)..(191): n is a, c, g, or t
  misc_feature (193)..(193): n is a, c, g, or t
  misc_feature (225)..(225): n is a, c, g, or t
  misc_feature (228)..(228): n is a, c, g, or t
  misc_feature (278)..(278): n is a, c, g, or t
  misc_feature (294)..(295): n is a, c, g, or t
  misc_feature (297)..(297): n is a, c, g, or t
  misc_feature (303)..(303): n is a, c, g, or t
  misc_feature (346)..(347): n is a, c, g, or t
  misc_feature (352)..(352): n is a, c, g, or t
  misc_feature (354)..(354): n is a, c, g, or t
  misc_feature (356)..(356): n is a, c, g, or t
  misc_feature (364)..(364): n is a, c, g, or t
  misc_feature (381)..(381): n is a, c, g, or t
  misc_feature (393)..(393): n is a, c, g, or t
  misc_feature (399)..(399): n is a, c, g, or t
  misc_feature (405)..(405): n is a, c, g, or t
  misc_feature (458)..(458): n is a, c, g, or t
ttcgtgggcagccggcgggctccgaggccgtgagcgcaaagcctcaggccccggctccctcctgagctgcgccgtgccaggccgcccgccgggatgccgtgggncgtgggccggcggtgggcgtgggccgcgntgctcctggctgtcgcagcggtgctgacccnggtcntctngctctggctgggtncgcngngcttcgtcttccagcgcgaagagatagcgcanttngcgcggcagtacgctgggctggaccacgagctggccttctctcgtctgancgtggagctgcggcgnntncacccnagccacgtgctgcccgacgaggagctgcagtgggtgttcgtgnntacgngntncttgatgngcgccattttccttctncacgcctcgctntccgantatgtnctgactgcttcggcaccgccttgggctcccgcggccactgcggggcgctactnggctgac

SEQ ID NO: 545215 - DNA, 111 bp, Homo sapiens
cactctcgcgggggcttaccattttatcccaccgaggtcgaagcggccgtgcgctccatgccgctggttgaggacgtcgccgtcgtcggcctgcccgctgagagcggaacc

SEQ ID NO: 545216 - DNA, 393 bp, Homo sapiens
  misc_feature (5)..(5): n is a, c, g, or t
  misc_feature (243)..(243): n is a, c, g, or t
tcgtncttgaaaggagaagaagctcatggaagtcaaacttggagagctgccgagctggataatgatgcgggatttcacccccagtggcattgcggagcctttcggagagggtatgaccggtattacaacaagtacatcaacgttcggaaaggcagcatctcggggattagcatggtcctggcagcctacgtggttttcagctactgcatttcttacaaggaactcaaacatgagcggcgacgnaagtaccactgaagaggggtcgctggagggcattgcatggccgagcataactgcccgccccactccgacctaggaagaattcaactggctgaaccttcataccctgactgagaactagtgtccaataaaaggtgactggttcacatacca

SEQ ID NO: 545217 - DNA, 1359 bp, Homo sapiens
  misc_feature (322)..(322): n is a, c, g, or t
  misc_feature (396)..(396): n is a, c, g, or t
  misc_feature (693)..(693): n is a, c, g, or t
ggatcactttccaagggagcgatactaaggcagacgtgagcttctttgaaagatgggagggtcaggaggtggagagcgagaggaggatcccatctcacacaagacactgtccacagtgaggcagaggcagactttttccatttagtccatgaacctcctatgagagtgtcagttgctccaccggtcctacacggaaccgtgatcaggaaaatatttgggacaggggttcatgttgcatacattatgctagtcgatgcttgaagagcgaagagaagcacgttatgcgctagcaaggtggtggtagacgagacttttgtgctcnattctcggctcaatcaatcgagtggattctgtggcgaggtctttgtagaaaacataccttttcgaaccacgaantattagtgggcgaaggtgtttactggtaaatcgggcggtgcaaaatcggataactcgtagtagacagtttggttgtgagacaacggcaccaagatacgtacctcaagttcaataatcaagggtttcgcagggtcatattctcttccgcaaccattgggttgataaacttgcacggcataggacctgggattacctcgtttcctccctcgcattccacaccaccaaccgcacagagagaaggtgggggccggtactaagatatgctcgcagagtggaagacgttcgaaggttgaacangagaaataacaaatagcttggacagacactagtaacttagagacgtggaggtgaattgggtttgtgaggagtttagataggactcagatgggggcacccactgttgctaactggggttgaatcacgaacactgaatggaaagggctgaacgtgggtttggaaatagacagtttttaaaatatttggggcaatggggggggagtcggtgtggcgaatgggaggtgcgttcggcgtggcacggaacgcgggcaataggaaaaaaccgggcgaccacggaaaaagggactcacgggtgcggccccactacatggtaactcaacgttgccacacttgagggcacgaaacaagaaagaagcgggtcagaccaagccccacccgggagtcgggcgccacttaggtgacttcttaaccagaaagaccacactaggttggaacggttcaaagctaaaaacatacactggaacagagaaccaataccagccaccaggggcagtttcaccaccacaggagagcacaaaaaactatcaacggcttacaaaacacacaaatcacagtaggagccaaacagacagaagcagacagtcggccttcgaacagagtccctaccgggctcgttaccgcgagaggaaactaaaccgaggacgacacagaggaccagggacacag

SEQ ID NO: 545218 - DNA, 190 bp, Homo sapiens
ctgtaatggtctcagacaatgagctccaggaaatgtccaatcagggaagtaagtacgtcaataaggaaattcaagatgtttacaaatatgcgggtgtgtttcactttaagtgaaccaaaggtagagctccaagaataaaaaatatttaagaaaagagccaataatagataagaggttgcgttcaaatcta

SEQ ID NO: 545219 - DNA, 421 bp, Homo sapiens
  misc_feature (179)..(179): n is a, c, g, or t
  misc_feature (342)..(342): n is a, c, g, or t
  misc_feature (397)..(397): n is a, c, g, or t
  misc_feature (418)..(418): n is a, c, g, or t
gaaacatttggaaacaatttaaaaaaaaaccctcacagatgaaacctaccccatacccctagaaatatcaaaaaaatttaagagaaagatacggccataaatgtgtaaaaacatgtaaatactggccgggcacggtaagcctcacaactgtaaattcccagcactttgggaggcccaanacgggtgggtggatcacgaggtcaggcgtcaagatcggcccggcccaaaatggtgaaacctcatctctactaaaagtacacaaaaaattagcccaggcgtggtggtgggcgcctgcaatctcagctacttgggaggctgaggcaggagaactgcttaaacccnggaggcggaggatgtagtgagtcgagatcgcgcccctgcactactccagcctggngcgggagtgaaatccgtctcngga

SEQ ID NO: 545220 - DNA, 1077 bp, Homo sapiens
  misc_feature (1077)..(1077): n is a, c, g, or t
gacgcggtgggctagttctagatcgcgagcggccgtcctttagtgtgtgtatggttatcatttgttagaggtagtgatagcatggggagggataagacaagaagtcaaaatgaaagaacactaagggagacgaaaaaagggacgagggtttgccagaccacccccatcgaccagacacccgcccacacaccccacaacacaacccacccgcacgccccaccaacccccaacgccccacacacccactcgcccaacccacacacgcgagcacccgccgccaacgacacaccaaccccaaacaaaccaacaagacccacacacccacaacccacacacaacacggcaccacccgaacaccaccaccaaccccccacaacccaaccagaccacgcccacccacccacaccgcgcaccaaccacaacaaccaactccacggcacgcccaccccgtaaagcagctgaactcaaccacaccgcccgacaccgccaccaaagccagccacaacagccccccccaacaccaccacccacaaacaacccacgccacacaacgacccacccaccacaccacaccaactacaccaacacacagcctccagacacactgcccaccacccagcaagcccacgccctacatcaacccacaccacacacccacaccaccgcacaccccacaccacccccacccacgccccatcaccagccacacacaaacacaccacgcaccacccgccacccaccactggacccaccaaaacaccacacacaccacacctcaacacaccgcacggacagcacccgaccacacacacccaccagcgagccgctaacacacggacagacaaccacaagcaacaaacccacaccacagcagacgcaccacaagcacacaaccacacacaccaacgacccacacaaacaaccggcacacacacgcaacgacacacaccagcagcaaccacacacaacccagcaacccaccaccgcaccacccacaagcagacacacgaaacacaccccaaccacacacccagagccaccccccacacccacagcccgatcctacccccgcccgtn

SEQ ID NO: 545221 - DNA, 172 bp, Homo sapiens
gctgatcaggcatgcgtcagggcccattaaaagggagtgcttggtcgccttagggtggagttggtacggggaggtttcccatgcagttaatgttgaagccaggttctgagggatgagtaggagttatgacagtgcagaagaagcaactcgcagcaaaagctgtaagtctaaa

SEQ ID NO: 545222 - DNA, 237 bp, Homo sapiens
tcacgcggtagagtcgtcctaggtgagtgaacacagacccgtgtacctcataaagattaaacataaaagcacaaaaatggcgcaacagacaggattggcttcagacaggcaggtggcatggacgtctgacttgcagaccagtatgtccgtctccccctacgttgatgtgttctgacgatttcacagccttaactctgggaggcccgtgcagctggatgttggccgtgcccattggcc

SEQ ID NO: 545223 - DNA, 385 bp, Homo sapiens
actcagagatccgttggggctttggtttccttcgcttctttccttcgggagtggctaccttcccttatgtaccacttctcccctcatcatggctcttaaagcatcaggcctctgcctctagcgggggtggggctcaggggggtctcctcagcctccctcacagtcctctcagatttagttcctatcagggagggtgccattctctgcagggttcccaattcaaactcctacaagagaaaggcggataggccagctatctttggctcggaataggtctcggggcaagcggtggattcgcttccttccaggcagggggtcatacccggaaggaatgcagggtgctgacccaggggtcagagtcagtcctccttggaatggagccaag

SEQ ID NO: 545224 - DNA, 769 bp, Homo sapiens
agcgtatttgcacattcacttactgccatttcctgccctatgaggagttagatggtatgtgttcttcaagaaatatccagcacaacgatacagacgcaagtgacgagaagcgaagagaaagaggagggcttagagaacacgtagagcgcacaatggactagaaatggcagagacccggaaagcatggaaatggagaagcacaagatgagagcacagaaggaaggagaagaacctaacctcagaagacaggtaaatgatgagcaaatgaaatacgagagaacacaaacaagccagagcaccgccatgaacaatcaccagtccaagcggcgcacacacgcaagtgcaccagaccacgtacagcagactacagacaagcaagcatgcagcgttagtaataaccaaaaagaccagttagacacaggaacataacaaacacacaacgaacacaggaaggcgaaagaaacgaaaaaatactacaagtagtcgttgaaacagaaaaagcaagacaattaccaaaaagagccagagcacgcgaaggggcgtacaccgcacgagatccaacgttcgggacacaaagtaagtacctcggtagacagataacatagtgtcagcaaacccacatgcataacgcagcaacaaacagggaccaaccaagtgtgacgaggcgaagaagaagaacacgacaaatagaacacaaccacgagagatacagaacgctgagcgaacacaaatccagacataaagtgagaacgacggaacactcagccca

SEQ ID NO: 545225 - DNA, 405 bp, Homo sapiens
acagaatgctcaagccactgcactgccagatgaagatgatgatctgtgaggagcatgaagctggagcccagcgtcagaagtctagttttataggcaactgtcctgtgatgtggtgcagcgtgtttgccactctattatatagctgagcagaacatgtgcttaatctttttgggatgcagaaggagatgaatgggcttcggagtgaatgtggcagttcagaaaacaattcctttatattttggacctgcgtctttagctgtttggtactgcaaaatattctaccctcaagtttcaaatcttaagttaagactgctacagtctcgtcacaaaattcagtggtaaatcttgttactgtcattcccatacctttttcgtttagatcataataaagttatgtttcaaata

SEQ ID NO: 545226 - DNA, 866 bp, Homo sapiens
  misc_feature (437)..(437): n is a, c, g, or t
gccaggacacaccggccacgtctgcttcttggctgcagtccaactgccagatggcttcaacctgctctgcccaaccccagcacctcccccagatcacaggccccgataagctgcaatcactgagcacgggactccccttggcaactcgaagctccgtccctgccaggcctaaaatgctggttatctagtggaggttgatggtcgtatgagattacttcactgacttctatgcctaggttgtgaggtgcgtgaccatgtctagacgatgtgagactgctagtggtcgaagactatccgcacaaagctagctcctcctgtggagtgtttgtgacccctggtctgccggtggacccaagggagctcgcccgaccacccttgtcttcagcctgacttgtctcgtccctaatccgacacgcttacttcgcatcgacgcagtnatcccatcctgggggcatcaactatgtgcccttgcttggtctctgttctagtcttcgtgactcatgccattcctgattgggagacgacccaacttggaccaaatcaagagttcgaaggagttcttcctcggaccctctggtctgccccggatgcatttcctagttcgtgcatcgttggtgagtggcgtacttgttgggctgactcaggtactctgaacgccctggcgctggtctgctcaggtagatcccggtggagtctggatccccaccgggtgctggtgagtggctccatgtgtctgactatttggacgggtttctggagggcaggcacgaaggctgggggaaattcccatggtcacagtattttatgttccttttcacgactgttgtacctttccaggccctattttgccgtgaccctggtccctg

SEQ ID NO: 545227 - DNA, 635 bp, Homo sapiens
agaacctgcgttctctggtttccttcctgagtctggcacagacggggctattgtagttactgatcaagtccttggagtcagccttgcctggctctccttgtagcatattcagtcctacagactctctggctgccctttcagtgaacaagtatgctgtgcaattcaacctcttggacttgtctgctcctaagcctttgtttgctggccctgactattgtaagaggtgaaacattacctagtttcgtttgagaatgaccattttcctaatgtgtacaaccatctctctcaccacttttattagtaggactaacattcatatccgttataaatggttgagcaatttgaatgacttaacacagtgtcattatcttgctatataaactggtaacctcacaactgccacacttcatcaccatatgaagtattatcgcagctagctaagcggatgctgtatcaactagtaacttcgccattaaggattattttatagcatgaatttaagactatttactcaaatgatatcctactcgttgtattcactttgttcttagagttgctgacatgaatatttcagtgctgcttaattttgttctgaattcatgtttctgcttatactcctcgttggtataaactta

SEQ ID NO: 545228 - DNA, 205 bp, Homo sapiens
gtattcgacttagttgaaagtataggactatgataacagcagagacaagatgccgggtagaaacttttttaatttttttggaatggtaatcatgggtccgataactgttatagttgtttcttgatttttttctctgttgtatctctcattctgtctattgagtttcaccctattgacgttttttactgtagttattgtaactttc

SEQ ID NO: 545229 - DNA, 992 bp, Homo sapiens
ggaagtagtgagtatatcttagtcaaaagaattgtggagcttttaaaaagctgcagttcagtcctgctttggggaatgtgctatgaaagcatgctgccaaaataagctcatttattttctttcaatcccactcagtgctcaagtcacctatattctggttccctttttttttttttccacgtggtggctatattttgggttcccctttaatagtttgggaaaacgatggattttccagggcagaaacccgtgtgtttgtgtcccctttgcaaaggaggtcgatagggtctctaaactgtggtcaacggtcctttcccttgtaaggggtgggactcctctctataatggggggataatcgcaaaaactttccatgtaatacctgtagaaggtggccgacgacaagtgacactctcacacgtcgggccttttaattaaccacttgggtcatttttttgttctttggccaccttgtcaagatggttgggcccaggcctaaatttcaaggattattcccccaaaaaagaaggggcgcccaacgtgggggtcaccagcgtttttcccaatggaggcattaacctaatctctcttggccatggatgggtgaacgcctctaataatagggtcctctttggatgacctgtgttgccttacccaacaattaggagaatcagcgacaggttggtttcaagacaatctcacatagctaatgagactttacccctcagtggggtgggtatacctaataacgtgaccgtgtgttgtcgctataacagcgactaggtaggatatcgtggatagttcgatcatagagcacagaggggcgaacactcttttatcagaaccaggggacacgttttccattttcaacgcacgcttattctcttgagaaacttccttttttggtggagacacctcacaagggccgggtgggtgttgtccccaccctcctggtgtgacttcttttttattaacaccacatgttgtggctcca

SEQ ID NO: 545230 - DNA, 106 bp, Homo sapiens
tactcactttcctatctggcgactgtcactggttcagtgggcagcagagcacaggcagttacttcagaggacactgaacactatgatctgattgccattcttgctg

SEQ ID NO: 545231 - DNA, 366 bp, Homo sapiens
  misc_feature (35)..(35): n is a, c, g, or t
  misc_feature (247)..(247): n is a, c, g, or t
cgaaggcagagttcaacagggatcttttgtaaatnttcaacaagggccacaggagccatttattgaatttatccatcagttaacccaggcaattaagagcacacatggaacatcgaccattccacgggtatctcgtataaccctcaaggacaagccatagtggaacgtgcccattccacgcttaaaaatatgctttaaaaaaagggggaatatgaataaggaccctacaacactactagcacaagtnttattcacccttaatttcttaaatttagataataaatttcaatcagccctagaaaagcactttgctaaaacctccccaggtacaaggcttcagtgttttgggaaggtgttaatagtatc

SEQ ID NO: 545232 - DNA, 521 bp, Homo sapiens
  misc_feature (78)..(78): n is a, c, g, or t
  misc_feature (94)..(94): n is a, c, g, or t
  misc_feature (99)..(99): n is a, c, g, or t
  misc_feature (166)..(166): n is a, c, g, or t
  misc_feature (194)..(194): n is a, c, g, or t
  misc_feature (214)..(214): n is a, c, g, or t
  misc_feature (231)..(232): n is a, c, g, or t
  misc_feature (256)..(256): n is a, c, g, or t
  misc_feature (276)..(276): n is a, c, g, or t
  misc_feature (281)..(281): n is a, c, g, or t
  misc_feature (284)..(284): n is a, c, g, or t
  misc_feature (297)..(297): n is a, c, g, or t
  misc_feature (319)..(319): n is a, c, g, or t
  misc_feature (376)..(376): n is a, c, g, or t
  misc_feature (427)..(427): n is a, c, g, or t
  misc_feature (436)..(436): n is a, c, g, or t
  misc_feature (449)..(449): n is a, c, g, or t
  misc_feature (475)..(475): n is a, c, g, or t
  misc_feature (491)..(491): n is a, c, g, or t
  misc_feature (503)..(503): n is a, c, g, or t
atgcacgttgaatgatcgatattacatgtgactcttgatgagtgcaggagctagctgagattgttctgtccagatgtnatgtacccggacaggngacantgagcaggtggtccttctgccataggcaggccagctgttggtccagaaccgtggagcccatgggacntgtgctgagtacgtagttcatgctgacntcccaaatcttggaagtttngtccccataatcagagnncacatgggtgctgtcgagactccnactaattgtgtaaatcccancgtcntgngccttgcttccgnccagcgcgcacaccttctcccnagtcttcccgtcatagatgtatctcgggccgtcagcactggctgtggcaaatctgtncccatcaggagagaatcgcacacagttgacaaagcggctgtggtcgccaantgtgaactngaacttgaatggnggtccctcaaagaatgcgcgcagtantcatcgcttcccgtgnccagccggtatngccggctctgctagaatt

SEQ ID NO: 545233 - DNA, 1462 bp, Homo sapiens
tcttctgtgtgatgtgcctcgtgctttgttatactctttctactttttctgtgctttttgtgccttgttggggtctggggtggtctgccattattcggacttcttgtttctatcgcttgctttcttgttcttggaggttgtctctctgtttctctgcttgcttatgtctcttgtttgctatggtgttggttgtcctcgcctgctggtcgcttcggtcgtcccgagtgccgtttacgtggttctgggctcgcggtcggctcccatcttccctttttttgtccctctgttatgtttcttggtgtgctttgtttgttcatttgtttctcgtctgggctgtgctttattcgatgtgtcgtgcgttttgtggttctccttttgggtcgctgactggggtgatctggattgtcgtcaggggtggtgtccgggcctttgtttggttcctgttgtattattctccttgttgtttggtgttctggtactttgttcccgtgtgggtctgattggtgtcttgcgttgtatgcttcttttgtggaggcctgtctcggtggttccttatgtgtcgtccgtgctttttcgctttcgtgttcccttttcgtttggacgtgttcttggtctgtttgtgtttagctgtagcccattggcttgtggttgttgattgacgctgctgggggccactgggtctgtgtgttgcccgttgggttatctttcgtcgcgtttgggctgctgcttagcttctttccgttctctcttgagttgttcagtggccggtgatgccccttgtttcaatctcccctcgtgcaattgtttcggtgggtggtgtctgtattcctgtttttgtggttcttccatgtcgtgtcctcgggtctctgttcgtgccttggtcagcacctgctgctgggcgtgttggtatcccttgttccgtctgtgtggcccgtcgcccgcaggccctaattgcgggcttttattcctcccggtggtcttgttcatgtgtccctcgccagcttcttctccctttctgcccttcacacggtctctggatgatgttcgttgtacttcttccatctccctctggtgttctcggctactgtacgccagccgttctcgtctgtttgctgcgttgaacgggatgtgcgcgccggagtcctcagatggtcatgtggaatgcgagacgggtgccgtggcgtgttcgtggtgcgacgggcacactgtgccccgaccgctccatcccctcctcctccctaggaatgcatacagcctagccttgctccttcttgtcttgtgttctaaagttttcttgtgccagagtagatgtagctctattgtacagtaaagaatacttgaaaaattaattgtatgaatgtatgagaagacagagtctcctagttttgtatcttgtcgtatggactcgccatgagttccaccagaaacgccactctagttttggtctctgtgacatttgaaa

SEQ ID NO: 545234 - DNA, 241 bp, Homo sapiens
tatcgcctaaggtatcgcagcatcgcttattagacagaattcatctcttcccctttaaagtagttctctggccatacagactctttagatattcagcaaaactaaagaacaacatccttgatattatcttatcagaggaattgtatagtactgaacaggtaagtcatccctctagccatgagattagatctacttcttccatgcgtgatgtgtcgtcatctccagttaggggtaaggctga

SEQ ID NO: 545235 - DNA, 936 bp, Homo sapiens
tactaagttagtctggtccttaattttcctgtggaaaattacggggttacttatcaacaaaataactgtccatccggggtggggaagtgccatcggggggcttctatgtacaggcccatcccggggaaccacatttccagagggggcctccccctgaggcccccatgggccccctcccaggtatccaagaataagtcacatggtgacagctgccggcatgggctgagtgggacccaggcctattatacccggccaaagggttggggggcctctctccgtggaagcctgctctttccaaaccccctttcccagccaggctgtcttggacactcccggggctccgatgaggggcacatgattcccgcttgggacttcttttggacgatgtcattttaacactgaggcatcctgggcctcccttcccgagaagatgggtaattggcagtggctgagccataaccttataagtcccggttttggtccaacaaacaattgatattccccatgggacttgcattttggcccaagaaccaaaagtgcctcaacagtgtacagtttctgctgggtcactctggttccggcagggtctccttggtgacagccaggcccaacccaattccggcccgatgtccttccggagacacctcgtctccagcggtgtcagcaatacggggctcgtaaacactccaacttgtccagggaactctgcctgcgaagcgaacgggctccgcctcacaccttgctggcttgcgcatacagagaccggggctaaagtcacccggaactcaacgcctgccacaggtcgccctcctgcgacaccgttaagcccgtcccaagcggctggactccctaagggcccaacagccggatcccctcaggcttccagaggccacacaccgccggaacgctgacatgggccccaaggggacacgtacg

SEQ ID NO: 545236 - DNA, 325 bp, Homo sapiens
tcagctcaagtgcacaacagtctctgctgtcctggctgataagagaagagcaacagcacagcagcccaggaggcatgcacaggcagacccaaaggaggcctatggatgattatgaggggaaggatgtggccaccagggtcggagaggcctggcaggagaggcctggagctccaagaggtggccaaggagacccagctgtacccgctcatcaacctgcagatcccagcaccccagagcggcagagcagccccagcggatctgagcaacttgtcagacaagagagtagtggcagcagcgtgtagactgattcatacggggggaacag

SEQ ID NO: 545237 - DNA, 308 bp, Homo sapiens
cacatcatgcgtgtgtgtgtctttcatcagtcagccatgcattcatcacactcttggggtctataccccagtaatgggatgtagggtcaaatggtcatttctcattgtggatccctgaggaatcaccagactgtcttccacaatggttgaactaatttcacactcctcaccacggatgtaacacgtgtttctctttttccacatcctgtccagcatctgtggtatcctgaaaccttttcacgatcgcccttctacctggcgtgagactgatctctccttgtggattagacttcgcatttctctgatga

SEQ ID NO: 545238 - DNA, 488 bp, Homo sapiens
tctcgggccgaattcggcacgaggaaagcgaaaaaggaagctcctgcccctcctaaagctgaagccaaagcgaagggtttaaaggccaaaaagggagtgttgaaaggggtcccccgccccaaaaagaaaaaaatccgcacgtcacccacctttcggggggcgaagacactgggactccggggacagcccaaatattcttggaagagcgctcccaggagaaacaagcttggccactatgctttcattaagtttccgctgaccactgagtctgccctgaagaagattgaagacaacaacccacttgtgttcattggggatgttaaagcccacaagcaccagattaaacaggctgggaaaaagctgtatgacattgatgtggccaagggcaacaccctgattcggcctgatggagaaaaaaaaggatatgttcgactgggtcctgattaccaagctttggatgttgccaacaaaattgggatcatttaaac

SEQ ID NO: 545239 - DNA, 548 bp, Homo sapiens
acacaagactagcggataatctacaaaactggatgatctttaatatgcatgtatgtatctaaacacccacatatatttgtggtttaagtgtgcgaaatcttgctaatctatatgccacagaagagcaaaattgtctccaaatttaatgccactataaatttctctcaccacgagggcatcagcagcatgcatcactggtttttttatcttgaatttgccccatataattggtcaatggcataacttaataaattatgtgtgcatataaaagtagtgtatccatagtctcacagtttgatcttcatcccttcccattactgcaaaggtactgttagctggaacgaaaaacatttgggtacgcttagtatgccagtagtctttccctttatagtatctctataaaaactggtaataaaatcagtggaaaagggcaggttgactcaaggtgaatcaatctgaaattgagcacacctgcctgccatcgctgttccttcaactgcgtgctgcacatcatgggctctgtctgtcagagaacatcccggtgctag

SEQ ID NO: 545240 - DNA, 384 bp, Homo sapiens
gtttgctttcgtatggttctgaggtcagaaaatattaaatggaaatcgcagaaataagcacttcataagtttaaattgcacaccattctgagtattgtgatgaagttcatgccatccacttctgtcctatctggtctcacctgggacatgaatcattcctttgttcagtctatccacactatatacaccacctgccgttagtcactgtgtagccatctcggttatcagctcgactgctgtggtatcacagtgcttatgttcaagtaaccttattttacttaataatggccccaaaacacaagagttgtgatgctggcaattcaagaagctttaaagtgctccctttaagtgaaaaggtgaaagttcttgacttaagaaaggaaa

SEQ ID NO: 545241 - DNA, 482 bp, Homo sapiens
tctgctgcaccagattgatagcgagttctcctgttctcaggctcctgagtaacgtgggatcacaggcatgtcagccaccgatgcccagattatttgtatttttagtagagatggggtttaccatgattgcccaggctggtgctcgaactcttgacctcagatgatctcaccagcctctggctcccaaagtgctgggattacaggcggtgagcctagctgcccggcctagcatttcaaaatgctaaaatacaggttctggtagtcttttccttgggtccagcatcgtttgttgctgactatgtcaagtagctaccaagatggcgcagtgaaggtgatgcgcagtggagactgttcccctcgccgctccctggttcctgcagagagtcctgttggcagctcgttggaacaatggttttcccctggagtttgaggagcttgtcatgggtgtggtgcatccctacaccatgtgtacagtttccaga

SEQ ID NO: 545242 - DNA, 176 bp, Homo sapiens
tttctctgcctcccagattcaagcaattcccctgttctcagcctcccaagtactagggataacaggcatagagccaccgtgtcctgcctaatatctagtaactattagataaagtcataaagacctagttgtaagtaagtatatctacataagtaaatcaaacgtagcaagtaaat

SEQ ID NO: 545243 - DNA, 220 bp, Homo sapiens
tactaatggctgtctttactactatataaatggtgtctggacaatgctatgagggagaactacagatcattttaacttgtacttgatttttcttaataaaatgatgtttgtatggatagatcttcccagaaacgtaagggatatcattttcatcatttctgtaccttaattcaagtgtataaatattcttttggcaagggtatagaacgtaattacattt

SEQ ID NO: 545244 - DNA, 1407 bp, Homo sapiens
  misc_feature (279)..(279): n is a, c, g, or t
  misc_feature (285)..(285): n is a, c, g, or t
  misc_feature (641)..(641): n is a, c, g, or t
acatatttgagatagtttaacagatatctacaatataaaatgctatagttgtgtgataaagtaagcattagatccattcttcatgttgagtcgggactgatgttgacaagagtataatgctatggtttgggtttttaattatgttgtccaagtgtgtctgggtaaaaataaaatattgagcacttcgagacctctatgtactgttatatagacttgtcccatagtgccagcactttaacatatcaccatctatacacacgggaagggaccaggtgcgtntcactntcccttccttgggtgtcacttcggtgaggtgggtcgtgcaattaaagacgactgacaattctctgtcgaaactccagtcgagagatttagcttatgtgggctaacttatcaaagcctatagaaagcattggttagttgggtccctcggtttaagagggttccccttttgtgtccctgtgtatgtttctttacacttacacacactgggtgttcaactgcatgtgtgtgtattagccctccaataaaattcatcacctggtttaaattttatcccatgtatccacgcgcgcgaggaagtagtgggtctaacagcaaggactgttttgttctctcgaaattcactggagaggaggaanaaaaagtctaaggtaggccagtttatccgtgttcgttccatacccccccaagtttagtgtcctaactgtggggttttcttccccgtgcaaacctttagaagtcagtttggctcactccctcacgtcgtgttatagtgtcttctacgaaaaatatggccccgaaaacaaatgttattcttggagctcttcgtgggggtgtataaacaccaatttcttttctaaattctctccccaaatctcctctaaactggggataacatctgtgtgttgtcgccgtgttaacaaagttacgggggacagacccccaaaggttaattttgatcgtccctcccaagttggcttttttaaaaagagacgctgtaacagaggtgattttttttccagcaacacgttttcaaccacatttatattagggccatcttcaattctccttaaggaggagattttcgacgcaacactttgttgcccacgccggggaggcccccagaggagtccgtgggccgttgtgtgtgtgcccttagtaagtgggctcccctcccctgtgtgctgcgaacagcttttcgacatttctttgttcccacgcggggggcgtgcccactattcgcggaggaccctgttgccgcgcttctcggagacgtgccacttcttgctgctagaagcggtcatttattctcccccgagggggttccccccttttgcggaaagcaccctgtgctgtcccccccgtcggtctcggccggcaacttgtgttcccccggtctgtgcc

SEQ ID NO: 545245 - DNA, 964 bp, Homo sapiens
  misc_feature (325)..(325): n is a, c, g, or t
  misc_feature (355)..(355): n is a, c, g, or t
  misc_feature (364)..(364): n is a, c, g, or t
  misc_feature (379)..(379): n is a, c, g, or t
  misc_feature (394)..(394): n is a, c, g, or t
  misc_feature (464)..(464): n is a, c, g, or t
  misc_feature (468)..(468): n is a, c, g, or t
  misc_feature (470)..(470): n is a, c, g, or t
  misc_feature (475)..(475): n is a, c, g, or t
  misc_feature (481)..(481): n is a, c, g, or t
  misc_feature (485)..(485): n is a, c, g, or t
  misc_feature (492)..(492): n is a, c, g, or t
  misc_feature (497)..(497): n is a, c, g, or t
  misc_feature (508)..(509): n is a, c, g, or t
  misc_feature (514)..(515): n is a, c, g, or t
  misc_feature (518)..(519): n is a, c, g, or t
  misc_feature (524)..(524): n is a, c, g, or t
  misc_feature (532)..(532): n is a, c, g, or t
  misc_feature (557)..(557): n is a, c, g, or t
  misc_feature (581)..(581): n is a, c, g, or t
  misc_feature (588)..(588): n is a, c, g, or t
  misc_feature (591)..(591): n is a, c, g, or t
  misc_feature (609)..(609): n is a, c, g, or t
  misc_feature (624)..(624): n is a, c, g, or t
  misc_feature (630)..(630): n is a, c, g, or t
  misc_feature (633)..(633): n is a, c, g, or t
  misc_feature (659)..(659): n is a, c, g, or t
accagcgcttcaataacaagtaagcctgctacacttacaacaactagtgcaaccagtaagttgatccatccagatgaggatatatccctggaagagagaagggcacagttacctaagtatcaacgtaatcttcctcggccaggacaggcccccatcggtaatccaccagttggaccaattggaggtatgatgccaccacagccaggcatcccacagcaacaaggaatgagacccccaatgccacctcatggtcagtatggtggtcatcatcaaggcatgccaggataccttcctggtgctatgcgccccgtatgggcagggcccnccaatggtgcccccttcccagggtgggccncctcgcccnccgatgggaatgagnccccctgtaatgtcncaaggtggccgttactgatcttacttcatccagtctaataggtttggagattaaaccttttctccacttntgcngnttatntccccncccnccccccnataangccccattgtnnctttnncanncattntcttcccncataccaggaactattggacatttnttttactgggaaaattattggatnataagcnggnacttttcctgagttgcanttatacgtatggctnttttcntgnttctctaggtttttagagtgagtatngtaatttggttcgttaaatgtgaggcgctggattactgaactaccacctagtaaggcagttctgtaagcttacttgctatttgtaagtttgccttcacagctttcagatgctgttggacttcatgtccccaacctagcttggtgagggctgtaactgtttccaagtacttgtacattggaagtctgaatgtgtaacaatatttaatgtatttagagttcctcatgttgcagggtttaagaaatctgacccaccaaggtcatgtgacttttctgtactgttaaacttcattgtaataaaatgagac

SEQ ID NO: 545246 - DNA, 525 bp, Homo sapiens
  misc_feature (30)..(30): n is a, c, g, or t
  misc_feature (55)..(55): n is a, c, g, or t
  misc_feature (142)..(142): n is a, c, g, or t
  misc_feature (149)..(149): n is a, c, g, or t
  misc_feature (152)..(152): n is a, c, g, or t
  misc_feature (170)..(170): n is a, c, g, or t
  misc_feature (185)..(185): n is a, c, g, or t
  misc_feature (191)..(191): n is a, c, g, or t
  misc_feature (194)..(194): n is a, c, g, or t
  misc_feature (220)..(220): n is a, c, g, or t
ggccctgactactctccgtctatggttggngattaaccttctcactgtgctgttnttagcccagctccgtcataaggctccttgtacaccaactttctcccactaccggaactatggacattactgggaaaattattggatnataagcnggnacttttcctgagttgcanttatacgtatggctnttttcntgnttctctaggtttttagagtgagtatngtaatttggttcgttaaatgtgaggcgctggattactgaactaccacctagtaaggcagttctgtaagcttacttgctatttgtaagtttgccttcacagctttcagatgctgttggacttcatgtccccaacctagcttggtgagggctgtaactgtttccaagtacttgtacattggaagtctgaatgtgtaacaatatttaatgtatttagagttcctcatgttgcagggtttaagaaatctgacccaccaaggtcatgtgacttttctgtactgttaaacttcattgtaataaaatgagac

SEQ ID NO: 545247 - DNA, 382 bp, Homo sapiens
agcagtgaatgtgcagcggaatctgtgcaaaccgagccgttgatcattgttgggcctatcattgctatgcaaagtcctatgtagtggaaaagacagaggaggcactcacataccttttagatgaacatatatatagacataacatacaatctgtgggtgaggtgacacatagtagtagggggtccagtctgcataccctagtgagaaaataaaatacaatgtatcccccccaaccccatcctttactgtgcaggattctgctccaaagtaccaagtgaccagctaaagcaatgaggtacacaagaacaatattcccagctaactcatccaagcatctacgtgtggcacttgaggatggagctgcacagtgccctggacagag

SEQ ID NO: 545248 - DNA, 690 bp, Homo sapiens
  misc_feature (557)..(557): n is a, c, g, or t
accagggtgctcggtcttatatgtggccttggaagactgaggtccactcatgggtggtcagcgatatgtgacaagtgtgtccttatattacatgggactgttctatcattcgtgggccatacgttgagagttatgcctgaaataacagctctttgccatgccgactctttgtgatacttgttgcagaatgtgtgagacccgacctgcagcctggactaccctatcctcatctacagagacggaatgtaactgatcgcagtgacaggtgtcagggacctggggttccatgagacaggccatacacatggcttgtgcctatgaggcatctgacgcctgctgctgatatggtgtccatgagctacatcatggatgacagagtgccactcggtctttagctactcatgatactgctgcactctgagtctaactcatgtagctgcgctactcctagcagccgtccgagaacatgtcgagagtgaacgtagtcactgacaagactgacatcatagcattagcctgagcatcctgatacccttcatgtagctgatcatgacggntgcatgcatgcttaccgagcacgtccgttgctgcacgggcaagattgccttgacaccttagcagtagtaggcacttacccgctattacgcgttcagcaatgtccagagaggtgccctcgtggatcctagggtc

SEQ ID NO: 545249 - DNA, 487 bp, Homo sapiens
ctatccgacttcttgactgaagctttcttgtatagctatgttgtcaggaactgatgagacacctgatactaaatgagtatatatctatgtaagacaccaattagcagagacaagactgaacttcatgtgtcatgctcctctttgaatccggttcatcctagcatgaagcttgaacaggcaccaggacagaaatcaatagggtgggatgtgaagggaaaatacctatttttaatgactcagttgtccaatttccaacatgcaaccttggagttgcaaattttagagctgggagggattacatatatacacacacacacacacacacacacacacacacacacacacacacacacacacacacagagatatattcaaatctatattttctgtttcactgttgagaaacagaaaacagacagacaaacacaaaatctgttttgtccccaaaagagcacttatatagactgtatataaagtacacgccttc

SEQ ID NO: 545250 - DNA, 217 bp, Homo sapiens
gtacagatatgtggtgctgggcgcggtctcggcgggttgcgtgctggttgggaggctcacggaggaccccgccgagcgcgtgctgctgctggagtccgggcccaaggacgtgctcgcggggagcaagcggctttcgtggaagatccacatgcccgcgaccctggtggccaacctgtgcgacgacagggacaactggttctaccacaccgaagtgccg

SEQ ID NO: 545251 - DNA, 284 bp, Homo sapiens
ctgactctagaggagcttatgggtgcatgcatgtgcccaggtcagcctttcagccctcacctagcagcaggacaccgagtcacccccttctccaggacgacaccccgggcacaccaggggcacctccaggactcacagccacatgcacacccagcaagacccgcacctcgagcctgctgcccagcagccccacatcggcccccataaccacggtggtgaccacgggcctgtgaagccccaagtgtgcctgagtcagcagtggcctggactaacagctaacccca

SEQ ID NO: 545252 - DNA, 385 bp, Homo sapiens
acataccacatgtctagtaaccgcataggccctcaacatagacctacaacagacccatagacacagataattagcctgggactagaccatccctactaggaatgtgccacgcccctaaatagagactagtagagttttctctgcttaaagacaatcagaaaccaaaagctattatagctttctccttccagagatccaaggggcctcaaaaaatcttaaaatagggaaagcttagaaaggcagagttctgaggattcaacgattaggctgccttgagaaactcagagcagaaacctatgtagggtattaccctcgaggaacagagttagggatcaacaattcatggttctctgactggggccagaaccacaaatatcgggggatc

SEQ ID NO: 545253 - DNA, 171 bp, Homo sapiens
ctcatctcaccttaccgtcctcatctcccttaacgactcatctacccttaccgtcctcatctcccttacacgactacataatgtaaagcaaaccttgtcctcgtaaataatctgactatcccactccatatcacccgggaaacatcagtcctaccctgaattggagaggca

SEQ ID NO: 545254 - DNA, 1556 bp, Homo sapiens
  misc_feature (361)..(361): n is a, c, g, or t
gccgacacatcactgtggtttacatgcttttgatcgctacttctatgtccctcctgtactttttgcgggtcgcaacctcgtattatagagaacaacagctgttgtgtgttgtcaacacacgaaatacccacggtgctgtgggtcatccccgggtcctctcgcgtgatattttctcccgtccgggggaaattaatttctgctgctgtgataccctacctaaacgtgcgcttcctgcctcgcggggaaaccacgccctcgtggcgtgggaaattctttcctttgttgtaaagatattgtggcctcgcgccttcgagagaaacgctctgcgggcgctcgttcctccacatagtataggggactntctgtgtttatatgtcgctgctatctcccacatgggtctgtgtgcccgcgtctgtgtttggctttgttataaaaaggggcgccgacacatttttttaaagagagaaatttttgtaatcttcttcgcaggaatcctctcgtggcggagaggtagtgctctcctcccgccccgacgttgtttgcttgtgcccacaagtgacctggggcgctgctttaaccactatggtgtgtaaataaagagttaataattgttaatgggggaagaaaaggtgtttggttgtcctctttgtaataaaagcgtttgtgggtttatataatttatagtgaataataataggggggaatttttatagcgcgcacgtttagagatattcctaatttccacgccctcttggggggaaaccacgccttctttgtgtggctttttgttctccaccgctttttttctggggttacccccccgcgttaaacctgtggggttgatagagagaccggggggacccccccttttgtcgcgcgagataaataaggcgccccactggtggtttgtaccagcattgtgtctgtaatatcacaccgctgtccacacagcaccccgcgtctgtggtcgcgcctcggaggaaaacacacagcgtggagaaattccgtcgtggggtttagagaacacgcaccagcgcgctctgtgtaggggcttatacaaaattagaggggtatattatcacgctcatgagagatggttcccacacagtatatagacccacgagttccccccagcagggtatacactcgggcgttataggaaaaaattctcttttgacacactccctttaaactctcactcgtgtgagagtttgttggctcgtgggtggtcaccccacgaattctccacagagttaaccacgccccacgcgctcttgcccacaagcctctcttgtttttgtctctagactattataaatatttaataaagagttcccttgagatgtgcccacatatatatcccccgaggcactctcttcaccctctgcctccctccttggggccacacttgctaaagcccacaggtttcttctccacatgtccacactctttttcttaaggctcccctatttaactaattcacattttggacttcctttctgttttatttttttccccttagccttgcaagtgaataagcaaataatgtttaaaga

SEQ ID NO: 545255 - DNA, 264 bp, Homo sapiens
  misc_feature (83)..(83): n is a, c, g, or t
gagaagccgaaaagggacttgctttggacacagagcaagcggtttcagctgtactctgctaatgaaacagggaatgacttttntggagtgttttaagccaaggaaaggggatttgactcccttcctgcgcttgaaagcaagaaagaaacacacgttcacctctgtgaagggccccactctttctgagatctacatggttggaagtaaacttttggtttagatccagaagccaccttccaatatcaagaactccagaatgaccca

SEQ ID NO: 545256 - DNA, 217 bp, Homo sapiens
gtaatagacaacaggtgggagccaagacaagcaaatcacctgagagagatcctgtgattacagatataccagtggaatggtggaacaaaatggcggaggttttagaataaagcaaaatgcagagtagctaataagaagtattgggaaaatctgaaggctagagacagcacctcagctgtaaggctggtttataaggtctctggggaatacagaaaaa

SEQ ID NO: 545257 - DNA, 152 bp, Homo sapiens
cgagttgagtggaggagaccgcaagttgagtggaggaggcggcggtaggtcccggaccaggtgcctccatgcaggctctgaagagctagggctccaggaagacacgtgagggtcctagctgccttccttaggcgtggaaggctgccggctct

SEQ ID NO: 545258 - DNA, 181 bp, Homo sapiens
tcagagcgcaggcacatcatgtagacaacctagaatctgaagaagatgtgtcccgagcttaccttgaggctgttgctgaggacaagcctcatgtacagaccctattactctaagaccatcgcgatttagaagttgtggcgggcacgtgctgctcgctttgcctgcacgattgacggatacc

SEQ ID NO: 545259 - DNA, 115 bp, Homo sapiens
  misc_feature (12)..(12): n is a, c, g, or t
  misc_feature (21)..(21): n is a, c, g, or t
  misc_feature (47)..(47): n is a, c, g, or t
  misc_feature (60)..(60): n is a, c, g, or t
aaggttgtaagncagatgttnatttattaaatacaagttttgaaaanactactgccaggnaagtttgacaagaagtacccttcctggaatgtttcaaaatacagtcgcgttgatc

SEQ ID NO: 545260 - DNA, 629 bp, Homo sapiens
tgtgtacacttgagaaaaatatatattcttatgcttttgagtgggaagcactatagatgtctgttaagtctcatcggtttatattgttcaagtcttttatttccttactgttcttctgccttgttgttctaaccactattgaaagtgaggcattgaggccaggcatggttgcttacacctgtaatcccagcactttgggaggctgaggcaggtggatcatgaggtcaggagatcgagaccatcctggctaacacggtgaaaccccatctctactgctacaattagccaggcgtggtggtggttgcctgtagtcccagctacttgggaggctgtggcaggagaatggcgcgaacctgcgaggcggagcttgcagtgagctgagatcgcaccactgcactccgtcgtgcgtgacagagcgagactccgtctcacaacaacaactggatagatacctccaactattgctacatgtccgttcctcccttcacttctaactggtttggttcatggatttcggtgctctgttatgggggcatatcgggttatactcatatctttccctgatgagtttaccgtcgtttatagctattggcatccgtccctcaccttcgtcttctcttttcttccct

SEQ ID NO: 545261 - DNA, 438 bp, Homo sapiens
accccttcatggggttctggaggtgcgtgggttgtgtgcacaggtctaattaggggcctttagtcaacggtaggaacctgacccagctggcagctccttggcctgtgattcttcttctcctaagtactcagtgcagcgatgatgtctgaggtggtgtccaacgtccaggagtatcgtgagtttgtgcctcgttgtgagaagcctctgtgtggtatccagccgtaagggtcatttgaaagcccaactggaggttggctttccacctgtcatgtaacgttatatcctctgcagtttccatggatcaagacctcacattgtctacgtgaggcctgtatgggaggtattgacaagattttttgtttttagcaatttcatatgacagtgctattttggccttccttgtaagtactttatgtccatttgtcaattatttccctt

SEQ ID NO: 545262 - DNA, 832 bp, Homo sapiens
  misc_feature (452)..(453): n is a, c, g, or t
tgggatgctggggtccttgggggttccctcctaccctttttttttttggtttttgaaagtttccatgataaaaatgtttttaaaaaaaaaagggtgtcccttggcgtccaaacaatgttctggttatttaatctggaaaaaaaaatatatttggctttccctaatctgggccttgattaagaagggagaataaatgtgtcctggggaagataagatgaggctatgtgtttggtgagaaaagatatagaagggttgtagaaagaagtatagagatcatatccaggcgcccccccgaggacaccaagagaggaaacacactttatttacgagcaagagtataaagacacgtttgttagcttcatctctgtgtggcgctgtgaaagaggtatagagggtgcaaactatagagtgtggtctcaaagtctccgaggtctctccaaactctctgtggnncccccaaactctccccagagtctcccgatgtgggtctctctcacactactctcctttttctccccacaacagacggcctttctcctgtggagacgcttacgcaagagagagaagaggtgtgttcccccccaccctgtgagagaacacttaatctcccatattgtgggggcctgtgaaacaccgaaggccctcttttgtggcacacagagatgacacccccagaggaggcgcgagagaagtcatttattgcccccgaggtgaggggggggcgagcgccctgtgggacacgtaaaggatgaggcccttctgtgctcccttaaggggttcccctcaaacggagcctctctagggaactttccacctgtgggggggacagcgg

SEQ ID NO: 545263 - DNA, 185 bp, Homo sapiens
tgtgatctacagatcctaaggccgcccttttattaagggagggtgtagtagggaggtgatgattgggtttcgccatgtagcccaggctggtctcgaaactccttgagctcaagcgatccaacagcctcggcctcccaaagtgctggaattacaggtgtgagccaccatgcccggccgcaagtttt

SEQ ID NO: 545264 - DNA, 731 bp, Homo sapiens
  misc_feature (1)..(1): n is a, c, g, or t
  misc_feature (25)..(25): n is a, c, g, or t
  misc_feature (686)..(686): n is a, c, g, or t
ntcggtttgggatcggcgcccctgngggggccaacgggattcggccattatggccggggaggcttactttcaattggaagaagagagagcggtcaactatcacacatcaactgcacctacaaagccacccctgcccatgtacagcccctagaccctgaacaatatcactttttgcgagtaaacgctaccacgaagaaaaggacaggccgcaagaccctcagaaagcgcctatgttatttaaaaaggagggcggggccaaccagctcgcaagagaaggctttatgtggacgcgggcgcttgtccagagggaatgcggcacaatacactctgcaatcctgaaaaacgctcgcagcaaacacgaggaaatatggggagagacacggcaataatctagagggcgccagacccacaggagggggtaccatggcacgccgcatatctgaaagagaaaaggacgattgcatacacaagaactataaaccgggcccacccgtgatcccaaaaaggcgcaatagttccaccagagcccggcaagttttatcactccaacgggtgagccagttcggagggggacagggaaaatagaacggggacccaggctcacagaactgaatcgccccaatacgggggaaattgtcaaagcgagaaccacagaaagagcggagttttgtggagcgcgacagaanctagaggtaccctaacccgaggcgggctataagagagccgaaaac

SEQ ID NO: 545265 - DNA, 230 bp, Homo sapiens
gtaagatcctgcagacgcgagtacaggctgcaggtcgatcgcacactgaattcaggaacttgaaaagcttcccgggtcctggccgtgatttgcgaaccaaagcgaccattgagctcatggccctcaggctgctgaacttccagaggcagctgcgccaggaggtggtggtgtgccatgggagggacacagcgcttgagacagccctcaatgctcaggcttacaaagcgcag

SEQ ID NO: 545266 - DNA, 601 bp, Homo sapiens
ttcttatattggcaaattgtatgtccttgaagtttagtataggaatgatcccatcacccaggtagtgagcatagtacctaataggtaattttagaaccctcaccccactcccgacctccctcctagtagtactcagtgcattttgtttccatcttcatgtctgtgtatacacaatgtttaggtttagctctcacttataagtgaagacatactgtatttgatttcctgttcctgtgttgggttacttaggacaatggcttccagctgcatccattttgctgcaaaggatattaatttctttttttaaggctgcatggtattccatagtacatgtgtaccacatttttttaatccaatccactgttgatggacactagagttgattgcatgtctttgctattgtgaatagtgctgcagtgaacttacaagtgtatttgtctttttggtagaatattctatttttctttgagtatatacccagtaatgggattgctaggtcaaatggtagttctgttttaagttctttgagaaactccaaactgcttttcacagtggctgaactaatttgcattcccttttctcttccacctcaccaacatct

SEQ ID NO: 545267 - DNA, 796 bp, Homo sapiens
  misc_feature (1)..(1): n is a, c, g, or t
  misc_feature (31)..(32): n is a, c, g, or t
  misc_feature (38)..(38): n is a, c, g, or t
  misc_feature (41)..(41): n is a, c, g, or t
  misc_feature (212)..(212): n is a, c, g, or t
  misc_feature (638)..(638): n is a, c, g, or t
naaaggacttgcactgccgggtcacttgttnncaatcntgncaaccttttggacaacgtttttgaaattagcatccctttctggagatgtatgtacatatacagttcattagctctagaacatgttcatttaccactattttactctaaattccctagctggctgctttcaaagacattttgagagtaggaatcttcctaacactctctttngtgaggagtaagtagaataattcaaggaatcgtttggagtctgtccaatgaacgaatgctgcttctttaatcatgctgtaacccacctcctttaaggggtcagctggcatagctcctaaatgctgctttctgtggccctcaccttgtcacacggacagttctcatttgtgtctgttctctctcccttttacagaagctacagttttccccaccatccgcccccctctctggccttgtagaatggtgtgtgtgtgttttaactcctgctcttgttctgtggtgctgggcttcctatgatggggctttaaagtctctagatttcctgtggattgtttactttgttagcagtgcttttacattactttactaatgcatttccttactacttgcatctcatgatttttcttttttttttttttttttgtnattgacctgtactcacctgtcctacaggttcgtttttttcctcttttctcactgtggaagatgagtctaggtcctctttgcctcagttgtgatgatctgctaacatctctctctcctagaacctaccgtatgcagctgccatgttgtcacgattgtca

SEQ ID NO: 545268 - DNA, 249 bp, Homo sapiens
ctaaacgcactcactcatgtaacagcgaatgtgtttgctcaattaatgattaaaggtattaataaagtgactcatatacatgaagaaaaagtgtgtgtgtgcttgcgtgcgtgaagtgggttgtggtggtgatggcatgttcatacttagggccgttgtagtagcctaggtagttcacagaggtaattggattagcatgatggcagtgtagagaagtacatggaatagaaagatatttagatgataaag

SEQ ID NO: 545269 - DNA, 547 bp, Homo sapiens
attttaggttctgacttgggcaaacaacacaatactcgaatggagcgcctgtccagagcacatgaacatgtcgagtgtgattccacagtgcccatatgcataacagagtcctatccatgcttatattgtaattgacaaggtgacagtgactatgacgatcggaaacggattggaataagaaccacaatgcctattagagacaacatatattaaaaagatttggagaacttatgtataacaggagctaccctaactaaattgaactcacatttgcaaatcatattcgagcactggacattaaataatgaacttcttatgtctctgagaactactaactgatagagcacagttagagaaatgctgtcaggaacatggcctggatcgttagatctagtcatgacgatgagtggatcgaccatacttggtgttttctcgagtgctaacatattacatgggacagcagatccagcaactcagtatgggtgcatagtagcttacaccttggatgataaaataccttgattgaaataagagtgaatcattatgg

SEQ ID NO: 545270 - DNA, 139 bp, Homo sapiens
atggagacgccgagtgtccagactcttaaaatcaggtcttagtggacgaagttgttgctgcacacgccgaatgcccacacccacggggacctgcaacaacttcgtccattcggatttgtatggacactcggcgtgtgca

SEQ ID NO: 545271 - DNA, 124 bp, Homo sapiens
ttcattttctacactctacaagcatgcaggcttggatgcgaatccttttccctgataggttcatatgacatgagtgaggcgcaatcgggaaaagaattcgcatccaagctgcatgcttgttgaa

SEQ ID NO: 545272 - DNA, 216 bp, Homo sapiens
gagaagtttgtggtatataatgtttacatggcagggaggcagctgtgttctaagcggtacccggagtttgctatcctacaccagaacctgaagggagaggtttgccaactttacattttctggacttccaggggaggttggcatttttattattagacaacaatttaggttgcccacggtcgggatttggaaggatattcaggaaaaggtgtgtta

SEQ ID NO: 545273 - DNA, 1008 bp, Homo sapiens
gagcggagaagagaacggacggtgatggtcgacggtcgcagtccaaatccagctggctgctgcggcgagcatgtgcgcggcggcagcggcggtgactgaggatagagagccacagcacgaggagctgccaggcctggacatgccatgtgtgcgccagatagaaaactggctgagagtgggcgataactgtccactgcgggccggcgaaagctggttccttgtggagaatgcactggtataatgcagttgtggatggcataccgtgcatgtgggaggggaccagtgactccaagcaccttccctggctgcatcaacaatgccacactctttcaagatgacgataacactcggcgcctcaacggagggactggtggaaggcgaggatcactgtgctgctcccagcagctgcttgggcattacctggtcagctggtatggtctaagagcatggccagccacccattgaaccgcaggtccatagagctgcccaacatccagaaggtcgaacgttgtacccagtacgaacctgctgcttgtccgggcacattgattctgggccaaatctcacactgtatcagtttcagccactaccgatctctatagcgcctaggtatttgcgcacagctcgggaagcggttactggtggacagccccagtgacagacacctcgggctttgggcccatgaactccgacaggctcttttgcataggcttgcatgacacacaccatcaccggttctcgactgccgccccttgacaaactggtgcagagcttaggaaacccatccagttgcactaacccccgctaaccaaacatgactttgcccctttttgtctcccccttgcgcaccagaacgttgcctttgtcctggttgaacccccttgcgggcaaatactgggctccgatctgcggcgcggtcacacgcagaagggcacatggttatcgccacactcacaaattgcagccctatgcacgcatgccctcacgtcatcaggtcttcatctcacc

SEQ ID NO: 545274 - DNA, 200 bp, Homo sapiens
tgagatggagtctccgccctgttgcccaggctggagtgcagtggcatgatcttggctcactgcaagctccgcctcccgggttcatgccattctcctgcctcattcctcccatagtatactgtacagtacacaagctagaagaggagagctcattaataaagtcaccataaaggatattttttatatgaataaagacatca

SEQ ID NO: 545275 - DNA, 181 bp, Homo sapiens
cacctgaccagtgtgacaagtgccgggagatcttgtctgtggactgttccaccaacaacccctcccaggctaagttgcggcgcgagctcgacgaatccctccaggccgctgagaggttgaccaggaaatacaacgagctcgctaaagtcctaccagaggaagatgctcaacacctcctcct

SEQ ID NO: 545276 - DNA, 837 bp, Homo sapiens
catggtggctcacgcctgtcatcccagcactttgggatgtcgatgcgggcagatcacctgatggtattaggaggtggggcctttggcaggtgattagaagttacgggattgatgcccttataaaagagaccttggagagctcctttacctcttccaccatataaagacatggtaagaatatggctgtctgtgaaccagaaagcaggccctcaccagacatgaaatctgtcaacactttgatctagcaaggcccagcctccagatttagtttataaaacaattattctctatattactcacaattgtctgtgaatttacagttatctcaataaaaataaatggaatgagatgtgcaagggactgctgagttttacaacaaactttttttgtactattttaccttacctatgaacatgtattattttgactaaaaagaaaacatgttttcccttaaatgaggtactctatgcaaagtgcttgacatatagaaagctttcaataaaagctctctttcctctctttccctttggtttgaggaataagacaacctctaggccaggcacagtggttcacgctgtaaccccagcactttggggaggccaaggagaaagaacggcttgaggtccaggaattcgagaaccaggctcgggaacacagcaagaactctatctctacaaataactttcaattattagccaggcacagtggcaatgccctgtggtcccagttactcaggaggcgaaatgcgaggatcacttgagccaggagctcaagaatgaagtgagcatgatagcaccctgaacccagctgggcgacagagtagactgtctcaaaaaa

SEQ ID NO: 545277 - DNA, 668 bp, Homo sapiens
catggcttctgtgcaatctgcgaggatggcttgtggccgaagggttgctctgcccggcgcgcgctcagctgtgagctgcagcagaagctcctgggctcgagcagaaccgccaaaagcctgtggcttcagtcctgcgtctgcaccgacagattcaatcaggatcgtttcgttatggtgtttaaaggaaaggtgagattgcgctctggttcttcatgagcacattgtgatataggcgtcttatgtctgtcaattccttgctcatttcgttatcggggaacgaaatctgtactgtaattgggattgtacacacgagcagtcctctggccactccacgacagggttctagcagcaacattaaactgcttgtgtccctgtcgttctgtccaaaacataatcaagcacagacacagaacgagacacaagaagagagagaaactcgcgggaggccctgttacccgtggggtgtgtcggccagacatagtgagcgcaggtcactgtaaaggacgggacgcaccagtgttcacgcaaaaacgtcgagttcgccaggcagggagccaccctatcgattggtgtctgacgcaacggggctggaactataccttcgcacggggggcctccgcacagtttgaggggcctgcgcaagtatcaacctttcgtcacaataaaac

SEQ ID NO: 545278 - DNA, 657 bp, Homo sapiens
tctcttcctcttaaactccttgtttccgttgatggcaccacttcttccctcattgcacaaactggaaacctgtgtcttttccctctttctgtgcctaattcttcctcaaggccctctcctttttacttgctgtatcctttagaccgtgaccctctatttcaacccgatggctgctgcctccattcagactttgctcattttaactggccatggctcccacctgccccctgctctacttgccccttctctccttagacacctgttagtgatgtcgcctcctgcttaaactcatcctgccttcttagtttaatgctaagaagaaagggaataaatgaactagatgctgaacttgagctgcgagaagaggtaataagggaaattagaaggcctaatacagcaaagctggtataaatgaattagaaataaagcagcagtggaattgagaaatagacccgggttgtttttttaaaaaaagaatgattaagaagttctggaggtcagtgtgcatatacctaatactactgaaccatacaaactaaaaatggctaaggcgattgcttttatgtgatgtgtgttttttttttaaccacaataaaacaaaaaggcccccccccccaccaccataggaaaacaaattcttaagtgataaaaaaaaaa

SEQ ID NO: 545279 - DNA, 854 bp, Homo sapiens
tgggccccgggcaagcgcggttacacgagctgggcagcggcatgtagtgcgtgaagggccaggcccaagcatgtctgggacgaccattggagaggcgaaattggatgccacaacacaagcgccacctgtacgtacgacagtcacgtcggcagccacgcgcgctcggcagcctcaaaggaggccaagtcgggcccaacgtccagcggagcaaaggtgggcgtctagcgccaaggtcccatgagtgacaagcgccgtcggagaagctgcaaggagtgaggtcgcttcaagggagacaagtatggtcaggcaggccagggagccagcgagtacaccgactgactgtcgcgcaccttcccttcatcagccttcgctcagggccaaggacggagacagcaggatgacatcagtctagcataggggcaaagtgatccttactcatgcgtcggtctggtttattggaacagctgatcatccgaggctggtgtctgagctccaggagcagactgcacgcagcttcacagtcgcgctcagtctcctaagcactctctttcccgcatgcgtgtccccatgtcgaccgctcagctcctctggtgtccgctcgtgccgcgatgcacagccatcctcagccagcccccaggtagaaacgtgggttaagctcttgcgtgccccgttacagcttcactcccacccttgtcagcagtcctgcccctatcaccttgacccgggttccccacactcccattccgtggcatctgccataatattgttgttcaactgctccctccttccagaggggcctacagggcttgtggggggtaggctgagaccccattaccaaagggtaagtgagtccc

SEQ ID NO: 545280 - DNA, 523 bp, Homo sapiens
agccccggcaaaaaaccttcagtcagcacgtggaaaactgcgagccagcattacccccgggaccattttgttcatcctccctggacgccacaggggcaaaagggtggttttcctaaaacagctgggtagtggcttattacttggggctgggcctttggtcctcaatcgggttcctttacgaagaaccccccagaaatttgtctttgccccttcaaccaaaatggatatcagcaatggaaaaatccccaaacctttttttgatgctttcttcaaaaagaagaagctgcggaagccccgcccccaggaaggtgggtttttcgccccagaaaaagagaaatttgggatttcggggcagggcaagattggtcagaaagctgggggctccccaatttttcccaaaaatcaaaggttttcctcagctccaggggtccctgcgatttgggtttgctttgacgaatgggatttttccccccaaattggggttttaaatgttttaagaccctaatttaatagctggccccca

SEQ ID NO: 545281 - DNA, 927 bp, Homo sapiens
ggctgcggagggagccgccgacatgtctgcgcatctgcaatggatggtcgtgctggatactgctcgcagttatcctgcatcaatgaggcaatagagcagacctaccagcagtgagcccaataacttgaaggcccgcaattccttccggtacaacggactgattctccgcaagacctgtgggcgtggacaccggtaagccgagcggcaatgggtgtcgctggtggtcagttacagcggcgactccgggccaggcgtgaacgcctgtccacgcatccgtagtggtggcggaccacgcatcaaacatagacatgctcgacgccaccggctcacgcatgcaatcagacagcatgaatccgacaaggaatcaagatacacggcacccgtaccatgccgccatggcccagcactagtccagccaaggggaacagcgctcaatcctagctgacagaccaagcaagaccgggtgcatggggtggcaaagcagagcaacgcggagaacacctgccgcctaaccaaatgagaggtacactagaagaacccacctagtctcagccacagtaagccaacatgaacacagtcacagattagggactgtaaccgtacagaacttggccctccgaaactaggacggaccatacacactataataacgaacaaacggcaatccatgagcgtaaacgcacactccctagagcaaccccgtaggataggattggattcagagatcgaaatcacccacaagggacacaccaaataggttacaatgtcacaacacaaacatcgttacattgccaagatggcgtaaaaaccacagtctgggctaaccaaaatacaattgcgcacagaggttgccactcgattcacaaatctggtgcaattgatcgaaccacacgatggcaataggaaagagtccaccgatggaaatag

SEQ ID NO: 545282 - DNA, 357 bp, Homo sapiens
cccatgcaataaagaaaaatcacgacgtcctcttcagaacagtactcctcatcacaatatataaatatgttaaataggaacacaagggcaggggcgaggaaaactggcattttccagaatactgcagaagccgacagagactacaatttgagggcttaggtttggggacaaacaaagaggcacaaattcaaatacaatttcgaacatgacttcaaggctgggcgcaatggctcacacccacccataatcccagcacttagggaagtcaaggtgggcggatcgcttgaggccaggagtttgagaccaatctggccaacatggcaaaacactgtgtctactaaaaattcaaaaattacc

SEQ ID NO: 545283 - DNA, 139 bp, Homo sapiens
aatgtctacggtgagtggtacgaacttttcacataccatgtgttataaaatcggttcttacctggaatcaccccgtatggtgttcgaattcataagaacagggaggttagaagcagggtcttgggaccagcacaacctg

SEQ ID NO: 545284 - DNA, 489 bp, Homo sapiens
gggcgacctgaggaccccgaggacgcatcatttgacttcatacaaagatatgttatcttcaatgaatagaaatgattgaaatatggtatatacaaacatcaaatcacatcagtcccaaaaagaccatacctaccaattatttgcatagcggagagagaactgagacagagctcagatgacaacgtgatccttatatagataaagttttctttctactacagttcctagtatgatcacatcagaaagttcatcacaagatacttcccgctacttagcatgtatgtcagaaatggaacacaagtcacatgggcccagtctttagaagctagatgggaattagatgaaagctccaaggtattcccgggagctggactaatcctggggctccttgacccacagcaagaggacagctgcctggagtacgggtggtgaaagctgccttcaattacagtgccctggatggggggacaggatactgaatgcgtccgt

SEQ ID NO: 545285 - DNA, 702 bp, Homo sapiens
tgcccctgcgggcagcagtattcatcatgtgtgagctgccgcagccgtcttcgtggaccacatgatagaacatgctgctctcagctcacaaccatcatggtgcgcagggacccgtagacgcatcccaccgtgtgtagagccactgtctgatgtgggagagagctactccatagtgagcactacccactccgctcgaaggacagatcgacatgagacctgttctcagggaaggggtgacatcgatacctgctgcattctgtctgagtgactcggtggatctagtcgtaacatgggaatgctggttgtggcgcatacccgacatgacatactatgtgtctctagcccacactgataccacagcggcgtgtcggatagttgcacacccaagtgcggatgctgctcgagttatagagctggtgaagataatgctacacgcttatgctcgttgactgtagctaacatctgcgcagtgggactgagactatcatgtggacacagcgatgtactacctcgtttattacaagcgctgctgttacgtgctctgtatattgtgagatattgttgtaacgcggactgctgagcttacacaacctggtagaatggtgtatctgcccacaaattgacactctacctctcgaatgtgtgacacgagagtagaagggcacgccttctgtcttgaaacacgtgtggctactggggtgc

SEQ ID NO: 545286 - DNA, 292 bp, Homo sapiens
tcatggggtacctggagacatcataaagactatatagagcgaggaagactggccctgtagcttgtcgcaaatgccggaacggcagcagtaggacacactgatcagattgggagattgaaagaactctgtgagcagtatggcatatggcttcatgtggagggtgtgaatctggcaacattgggtctgggttatgtctcctcatcagtgctggctgcagccgaatgtgattgcatgacgataactcctggcccgtggcctgggttggccagctgttcctgccgtgacactgtat

SEQ ID NO: 545287 - DNA, 1627 bp, Homo sapiens
cctcatacacaacactaacacatccagacaacatagaagcaacataatcttctattttgaattaacttctcctgcctctttatgtatgatcctggttccgtatatcattatactcgtttttctttcttccatactcccattgggttttcttgaacactactccatttgaccccgttttctacaataaaccaacaccattgttgttcccccccacaatttttcttgctcacaatgatttttgtcgcaacgaccaccagtttggttttactgaaggcccaatcgttggtggtaccacccacaatgtttatatcgggcgctttttcgccgccccatagtagtggcaacattgttgtttcacaaggcgcccagtggtccgcgggttctcttgggagggcgcttttttattccagaggggcccagtatgttttttgcggggcctcccccccccccttggtttgggggccctttcctgttctcaacagctcctattggtcgtgccacccccacggagacttttttggttggtgtccgcccctagcctgtgcggtgggacaccactttcatggggctccagccgctttggggtgtgtttaattctttgtcggagggcagttttgggggggtgatagcgccacactcccctgttgctctggcgccttgttcccaggtgctctacggccccacagggttaacccccagggcccccgggtccaagaaaccataggggccccccttggggggagtgatataaaaaaatttagcccccttgtatagagttgtggaattacaccccattggaggcgtttctgtccaaccactatggtccggcgaggatcttgggtcgagagctttccgcacacaataggtgtgggaaatattcccgcaaaaaagtgttttctcccccttataatggggtgggccttcttctatagatgtcctcttttgagagccccctcgtctctataggaatttataggttgggtgccctccaccacgagcggttggggcgcactacaccacagcgttccctgccctgccacagctgtcacatagctggccacagttttcctcgttctctgtgttttcacccaccatttccccaccacacccacacttgccacacttaatttatattgcacttctcacaggaaaatataaagagaaagtgttcttgcgaataagtttataacaggcactcacgttcttaacttacacctggtccccccaccccccaccttatagggaaaatgtcctatgaactcctgggaaaattgaggcgcttcttttgaatggtgaagtggaagaacaaagattatagaaggaagaaaggtctgcccctgaaagctgctgttataggagaaggcaggatagaggaatccagccttaggagggttcccatgcccagctgtccatttggccaagagaccctggcaccagatgacattttgcctcttgaacattccactcgttcttcttttcctccaaatgggcgttcataatagctttcccctcaaggcttaacactgagaatttaatgaggtgcaccaatgtgaagacctggcaccagtaccaccaccagatattcccattaaagtgtggtcccccattaaacaaaagaaaaaaaaaa

SEQ ID NO: 545288 - DNA, 673 bp, Homo sapiens
cgcttccacaattttttccactttattcttccggaatcgtatgttgccccaacatcttgaactgaatatctttttcacacgggggacaccaatgcaccataattacggcaaactccgggtgaaccctcgcgagaagggcacaaaagctggcgcgccacccggttgtgggcggttctactttgagtggatcccccgggggcatgttattcggcacgagggaaaacctaaaaacagtgaggcggccataatttgataaaaaactaccacaattggggcaagcagtaacaaccagcgtgttaaaaggcagacgattgttcatcatcctgtgtatggcccagaacaaaacgtagaagattacatgtaccctttgaaatttcagtgatccatcatgattttgacctgcatctactcgtgaaaccaacataaatttttcatcacttcccaaatttccccatgcccctccagagggggcaggcaaacattgtttcattgtgcttaacaaaaaatgctagtattttttttttttaattaaaggtctgtggctcccttgcaacaagcaagtcaccgcgcaccctttttccaatggcatctgcatgcttcttgtctatgtgtcacaacctggtaatttttacaataaaacaagctttcccataatgaattgctgcaatcccat

SEQ ID NO: 545289 - DNA, 218 bp, Homo sapiens
aggggcagtgcacagacttatcgagctctgaatgtcgcggtcgcacgacgcgatcgatggcgcagtgcaggcggcgcaatgcatctaggcctatatattcggagatacgtagccggtactgtaacaccggtactctagaatatagtagcatgcgcaaattaaagcgctgatatcgatcgcgcgcagatctgtcatgatgatcattgcaattggctcca

SEQ ID NO: 545290 - DNA, 714 bp, Homo sapiens
attatctgagcaactatcctatgccttgagaagatagatcctaacttctaatgatacagcaagatgctccactcccatacaaggattctttggaaatgtacactcattttgctttttgtttatttttgtattttctatatgtaaatacattgagaaagatttccttttttgggtgacttctggcactcaaaattctataaatacatggaagttgtaaaggagcttataaaggttttgaggaccttataaagatatcttctaaggttttgtttattttattttatttttgccatacattttggaaagcgatgcatggagctgattacaactggcaccgtcatcgtttataagccatgtttcttcccataggagattttgccacttaagggtctctgtatatttttagtcttaaaatgtttcatgttatttattccatcactaattttatttcacagttttcagcttgggatatttttaaacttgtttatgacacctgtaaaaataaaaatattgcatttataacaaacaaaaaaacaaaaaacaaacaaaaacaaacaaaaaccaacacaaccaaaaaaaacaccagaggggcggggcacaaaaaagacaccccacgacggggcacaccggtgcaggtcacactcggggacaacacgtgcccccaaacatgggccaaatataacacagaacctgggccgcgaaacaccctgggca

SEQ ID NO: 545291 - DNA, 206 bp, Homo sapiens
tataactaaatgtgaaatcacatgttactaccgtatcatataaacagccaaccacaggaaacagactggccaagattcaaacatgtaggcaaaaaccggcagagcactgaatagacgtccatcatggacccaaggcagcatccagaaaacggcacatcacagacggtaagaaaggcagacgcatcaaggagggaacagggatgccc

SEQ ID NO: 545292 - DNA, 809 bp, Homo sapiens
  misc_feature (498)..(498): n is a, c, g, or t
acccaggctggagtgcagtggcacgatcttggctcactgcaacctccatctcccgggttcaggcaattcttctgcctcagcctcctgagtagctgggactacaggcgcgtgccaccatgcccggctagtttattgtatttttggtagagatggggttttactgtgttggccaggatggtctcaatctcctgacctcataatctgcccacctcagcctcccaaagtgctgggattacaggcgtgagccactgcacccagcctttttaaagtttttaattgacatataattgtacgtatttacagggtaaataatgatgttttgatacatatataatgatcagatcagaacaattagcatatccatcacattgaacatttatcatttatttgtgttgagcctttagttctttttgttttttggggatagagtctcactctgtcacccaggctggagtacaggggtgtgatctgggctcacggaaacctccacccaccggnttcaacgcgattctcctgcctcagcctccctagtaactggggattacaggcacctgccaccagacccaattttggtattttgagtagagacggggtttcaccatctgtggccaggccaggcgggtcttgatctcctgacctgtgtgatccacccagctcagtttcccaaactgtgggattacaggcatgagccaggccccagccagagacagtcttgcttgtcgccaggctggagtgtagtgggcatcctgggtcactggaactccaatccctggttcaggcgggtctcctgcctcagctcccaagtagtg

SEQ ID NO: 545293 - DNA, 410 bp, Homo sapiens
  misc_feature (367)..(367): n is a, c, g, or t
ttagagtatccccgccgttgaccagtgcacagcgtatcatcaatcaagttatttcgttgttcctaccaagcaggattaatagctgctctcatcccagttctacggagctctccctccattcgcatgctcccaactcctaaaacgtagtggtaaaacccagttcagatttttttcctgtatttaacatgactcgtaaaaattataagaacacataattaactgatatgatcaaactagctcctatgagacacaaagcagtcttgtgaaatggttacttgtcacgatagttatgttcatttttccagctagtttttattcttggattgtcgtcagcacataggtgatctcttaactgaaattacggatnatgtacatttatgacaagttttacaaatcactaccaaaaagca

SEQ ID NO: 545294 - DNA, 160 bp, Homo sapiens
atccttccctcctcacggttatcctgcctgagcagcctgactgggcagtcttgctgcattctctgatgactccgtcttcctctttccacaatggctattcttttttttgagacggattttcactcttgtcacccaggctggagggcagtggcacaatttt

SEQ ID NO: 545295 - DNA, 299 bp, Homo sapiens
tgccccaatctctctctgaacacccccattctccacctgttggtggggggtgctcctcgtcccacccagatttgaccgttcagggggcctcccctgctatccctcctcccttcctgtaccccccttttctggggcctcatcactgtggaagacggggatcgtaagagataagtgggtgagagacacggggtagattttggagtagataaccggggtgtgtttgaaagggggaagactttgatcccctggagaggagcccatcattgtctaaaggctacgtcggcatttttaaaaaacaa

SEQ ID NO: 545296 - DNA, 493 bp, Homo sapiens
ttcttttcataacttttttggtgactcctatttgatagatggcagctagccagggaagattactgagctaattataactggaggggtctccgaggaatacagagatgagaagcattctggggcctggttcttctcaaatcctaaaaccaaatttagcctgttgctgattatttagatgatgaggacacttttagcacagggatagtggcatggatttgagtgaggacaagagccatgaaaataatgactagggcatacccctcattttttaaagatctgatttaagatttattatattatttgaagagaagggtttagttaaattcagtcacagttataaatgtaaaaaaaaattctaaagaaatttaaaatgaagagttgagctgatgaaaagtgctgttttccaacatggaccttgtaatctctgtggttaaattgtccgtgttcttgctaactcagcctttcttctaataagatggatgattttcatttg

SEQ ID NO: 545297 - DNA, 243 bp, Homo sapiens
ggtttccacgcatggagcacatagaatcacctgtaagggtcaccacgcatggagcacatcagaatcacctggagggtcaccacgcttggagcacatcagaatcacctggagggtcaccacgcttggagcacatcagaatcacctggagggtcaccacgcttggagcacatcagaatcacctggagggtcaccacgcttggagcacatcagacacctggagggtcaccatgcgtggattgccag

SEQ ID NO: 545298 - DNA, 180 bp, Homo sapiens
gtaccagcttcatataccacttattagaggttgccacgtgtgatatctaggtcttaatctagaaattacgctaatgaggccctatttacacaatagactcctctatcccccttagtcactttttatttaagaatagtcttgtcctataaatcagatctcttgtgtgttatctgtacctgt

SEQ ID NO: 545299 - DNA, 172 bp, Homo sapiens
cggtgacctagaggaccccatcgtgcagaagaaagaatcagtgagcttacaagcatagcacggtttgaaaatgccaatcagcaggagaacagcaaaaggtatgaagatctaccaagatataaaatattatctcaaaagattaaatctaatgaattggtactcgagggaggga

SEQ ID NO: 545300 - DNA, 122 bp, Homo sapiens
cagccatcatcagcgtagatctattcagtatggataaaacacgtatctcaggatagaggtggatcagtgtaatgacacctgccactatggcaactgactgatgaccctggtggaatggtgtc

SEQ ID NO: 545301 - DNA, 291 bp, Homo sapiens
cggtcctgggagatgaggcggcagatactgaggtcaggagtcagaccagctgacaacatggagaaacctcgtctctacaaaaaaatacaaaagaattagccaggcatggtggcgtgtgcctgtagtcccagctaccccagagactgaggtgggaagatcgattgagcacaggtggttgaggctgcagtgaaccagtcattgcaccactgtacttcagcctgagtcacagaacgagaccctgtctcaaaaaaataaataaataaaattctattactgagtgttgggcgataa

SEQ ID NO: 545302 - DNA, 247 bp, Homo sapiens
gaattcgggcgggcttagagaggaggggacagagaggtgtcctgggcctgaccctgcccatgagcttgagaattgctcctgccctgggaagaggctcagcacagaaagaggaaggacagcacagctgacagccgtgctcagagagtttctggatcctaggcttatctccacagaggagaacacacaagcagcagagaccatgggaaccctctcagcccctccctgcacacagcgcatcaaatggaag

SEQ ID NO: 545303 - DNA, 116 bp, Homo sapiens
tggtgatagaggatctggctccatggtgcggtctctgcctatcggtcctaacaagtcacaaggcccaaagacaccctccagtcccttcccttccttagccaagcaagggggaggcg

SEQ ID NO: 545304 - DNA, 1005 bp, Homo sapiens
  misc_feature (1)..(1): n is a, c, g, or t
  misc_feature (267)..(267): n is a, c, g, or t
  misc_feature (393)..(393): n is a, c, g, or t
  misc_feature (399)..(399): n is a, c, g, or t
  misc_feature (402)..(402): n is a, c, g, or t
  misc_feature (490)..(490): n is a, c, g, or t
  misc_feature (527)..(527): n is a, c, g, or t
  misc_feature (531)..(531): n is a, c, g, or t
  misc_feature (533)..(534): n is a, c, g, or t
  misc_feature (537)..(538): n is a, c, g, or t
  misc_feature (549)..(549): n is a, c, g, or t
  misc_feature (655)..(655): n is a, c, g, or t
  misc_feature (672)..(672): n is a, c, g, or t
  misc_feature (914)..(914): n is a, c, g, or t
  misc_feature (922)..(922): n is a, c, g, or t
  misc_feature (937)..(937): n is a, c, g, or t
  misc_feature (991)..(991): n is a, c, g, or t
ntataaatgaaaattatgtttataaataatattagaaataaaagaaagaatgattataaaataatgtgaaatttaaaatttaagaaatatggatgaataaatggtggaaaaagtaaatgaaaaatgaaaaaataatttgtggagtggagtagagttaagtgttagaagtagaatattaaaaaaatgtttaaaaaagaaatgataggtttgattttataaaagtggttgataattgtattaagttgatgataagtgattttgaaaatntaatttataataatagaaataaaattaaataagtaatgtttatgaaggttaaaatgtatgataagataagtaatataaatttaaaagttaataatgaaaatgaaaaagagggaaagtgtaaatatnattgtnttnattagaaggaaggatgaaaaaaaatgtgagaaaaatgatgttaataaaagtagtttaattttagagggatgtgagaattagtttgaanttaattaaagatgtgaatgaataaaaagaaaaataanattntnnttnnttttggggagnaattttggtggaaaaaaggatggtgtggggtagtggagagagaaatgagattagagtaaaaaaaagatgaaaatgatatggtattaaatagatgtgtgaattgggnaagaagattgaagtatntgagaatatgagataaatgatggaagaggagaaaaatgaaaaaataaaaaggatgtgatgagagagggaattgatattggatatgaaaatgatgaaatggaaaagaggtaggagatgagaaaaaatgatggatgaataaaaaaatgtaatgaagggtgaaaagaaaatttaatatgaaaaagatggaaggaaaagattaaatatgaaaaaaaaaagaaatgagtggaaaattaatttgttgnatttttgnaaggttgatgtttgnaaagaagggaaatattataaaaatttaaaaaaaaaaataagagggggaataaanattgtttaaatata

SEQ ID NO: 545305 - DNA, 378 bp, Homo sapiens
ataagaggtggtgtctcccgcacctgtttgtcagcacctccatcacttctcctgcacaggagggttgaatactgtggtcgacgccatacggtctcgcatgtagtacggtgggaccttcgcctgcggtggggcggcgttgttgggcctggccttcgtgagcactctccgatacctcgttcttttccccactctcactattctggtaattttgctggtaattgcgtggaggaccccctacgacgtggatagcgtctataatggttacggtctgctgcatattttactgccttgaactggaacaccaccaggacccgtaacatttgctggctccggacccttttctccttcaacaacatcaaactccacagtctctccatc

SEQ ID NO: 545306 - DNA, 193 bp, Homo sapiens
tgggctcgggcctatttcctctatcgcgacgcccgacctctcatccctggcccgatcctccggagctggacctggatcggttactcgtctacgttgggtggttgggtaccctgcgtgcggacggaccccggacggtacgacggcaccccgcgacggtacgacggaccccgcgacggtcacgggtaccgacgct

SEQ ID NO: 545307 - DNA, 200 bp, Homo sapiens
attgtatgactcaggctgtatcactcctgtgtagcacagagcactgaaacgcactaggcaaggagcgcagagttcctgggttccactcatggcactatgcaggcccaaatgggcagcacagcacttgcactgctttcttcacgggagcgggagcagggtggtggtggtaaatcatatctgtgatctgggatacgtcatca

SEQ ID NO: 545308 - DNA, 476 bp, Homo sapiens
gacttagtagcggactggcgtggtctaagctcgttctgtgacagagaggtgcgcactcgatggaggtattgtccagaacagcagacaagaagggtcgggtagaattgacaggactggtgggtgacatcatatggtcccggagccctgaagcttttctccgggagctgcccagcctctggtgccaacactgctgctgtcccatttcccgttgctgcccttggggtgatagcacactcagataagaatcgcatgacaccccacaagctgggaattgtgtttgggccaaacccctgtttctggcagagcaggagacatctgacccagcagcccatgctctctacccagggcagcttggtccagctgatgctcaccaacttcaccagcctcttcccctgatgcagggaaggacgaagagaaaacatatttccggtcatctctggtggtgagaggctggtgttctgtcttgaggatatccc

SEQ ID NO: 545309 - DNA, 420 bp, Homo sapiens
gacaaaatacaaaaattagctgggcatgatagcgggcgcccgtaatcccagctactgaggaggctgaggcaggagaattgcttgaacccaggaggcggaggttgcagtgagccgagatcacaccactgtactccagcctgggcaacagagtgggactccatcttaaaaaaaaaaaaaaaaaaagtattgtaggctgggcgtggtagctcacgcttgtaatcccacatgttgggagggcgaggcaggcagatcacctgaggtcaggaggcaagaccagcctggccaacatggcgaaaccccgtctctacaaaaatacaaaagattagccgagtgtggtgtctcgtgcctgtgtgtgtgtgtgtatgtgcatgtgtatatatgtgtacacacacacacacacgttgttctgccttgtcgacg

SEQ ID NO: 545310 - DNA, 104 bp, Homo sapiens
acggccgtgtattactgtgtgagactcttgggtgattacgtttgggggagttatcgtttgaatgcttttgatatctggggccaagggacaatggtcaccgtctc

SEQ ID NO: 545311 - DNA, 397 bp, Homo sapiens
atttctggcaaggccagaggtgcgggacactgaatggtcccgcgacgcgggaagggcgaaggcactcgaagcgaagagctttaactcatcttctccaggattgggggcacgggaccctgtctcctgaccttcgtgccttacctcggagggtgctgcccacgacgggacttggtgacctcgcggggtctggtccccatacgttccggggacgaccggacactacccaggagaccacgaccggaaccgacacggaccccgggacgacggacgcgacggcagacggaccggggacacggtcgtttgcctgggaagggccctcataaaactacccctgtgttatcctcctcggctgacctgtgggggacacggcagacggaccaattcaccccaccttaca

SEQ ID NO: 545312 - DNA, 1636 bp, Homo sapiens
actttctctatctttcgccacccgacctcctgcgtgccccctccactacgggtctcctctagtattgtgtacgtcgtggtctgtcctctgtcctcgcttctccctgttctccgctctctctgtctatctgctctatcgtgtcgtgttgcttgctttttcttatctcttttctctttgcctcgtctcctccgatcttctctccctcctcttccttcccttgtctctcccctctcttccctctcccgctcttcgtctcttgttgctgtgccttgtgtgttcgtttctgcttgttctggtctttgctcttgtgggtcctgtgttgcgccgctgcgtgttcatctttccgtgtcttcgctcgcccgttccgctctggctgtgtctctcttgttcttcgtgttcgttgcttctctcgtactgtctgttgttgtatttgtgctcgattgctttgtctcgactgccccgcttctggtcttctgttgcttcgtggcgccgtgtttcttctcgtcttcgtctctgttcttctggtttgtgtgatgtcgttattgattgttgtggcgttatacacgatttattgagatgattatgacaatatatctagtaagcgttcgtataacgcctatggtgtttgtatgtcggaggctttccctgctagtggggttctcaagaatctctgtcttaagaacgggttctcgtgacccccttctaaagagatccttaagggtcttacaggggtctcccgaagaagatggctcttggagaaaatcttctttgggtgatccccttgtgtgtttagtttgaaaagcaatttagacgtgtacgccaatttacccatttttaggctttgaaaggaggaaactgtggattcatgggagaggacccggaaggccaccctctgctggagttcttgctggaacaagccaaaggttgtctggccaattccgggggaaagcagatttggataagtggacagtgacttctggataagacgattggaggcagaagtgaagtgtttttgaaaatgggcaagaataaccaatagtgcactgctatatggaactctgagctctgaggcgcctcaggacgagggagtctacccgtaagtgggatactgctgcaagtgatatccacggattcacaaggggtgcattttgaagaggaagatgtcttacgatttggtcccagcttcaataactactgtatctccgatgtaacgtgagggaatgctcaaggccatatggatggatgaatattcaaggaggatcacagatttcttccagaggacgaatcagatgtatagttacttcactgttcacccgcctgggggaccctactggcaggaggtcaagacttcctattttccacaatttttcttctctaatcgaggaaagaatccgggatgttcagcatgagcgttccgcttgataagatcatcttctataggattcaccttggctgataaagtggatgcatccattcttcctggacgatagattgttaattggcgtgtttacatgatccagcatcatacagaagaatttgcgctatgaaaattctaccagagcttaacccaggctttattaaataaagatcatactggtagtttttacttacctaaggtctaagggtactagcatca

SEQ ID NO: 545313 - DNA, 610 bp, Homo sapiens
aagcttagtaggcgccgccggaccagcggaccggggccgctttgcaccagcagcgcccgtgggcaccagccagccactcgcgtccccgtacagtagagcttgatcctggactgctgcgcggacacgcctgggcggtaggcgcacgggacagtgtcagtctgcaactaccacggtgtcggcgtgagccaagggctaagcccatctgaccgggacggccgctgcgtgtccaacggagtggggcggctaaccaggaccttacgggccctaagatactcgaggatcgggccctaagaggaacgcccggtaagactcctctggctggctgcctaaggccctagctggcctatagactcgtactctctcctagagccggccttagcagtagcgcgtaaagcctaagactggccttaggtgactgaagggcagagtagagctagttaagttcaagactgagttaaagcgattacgtagacctagaatcaaggatccttaggtgactgaagggcagagtagagctagttaagttcaagactgagttaaagcgattacgagacctagaatcaaggatcttagaccagacctgggaagctggttacctgggatcctgtgc

SEQ ID NO: 545314 - DNA, 531 bp, Homo sapiens
taggaaacaaaaggtttattgaaatgcatgaagataaattatcattaccataaaactgaaatggagatttcaacatggggacgtaaagctcttaaaatgaagcgaagcttatgcatgacacattgtccaataggaaaaataatatatatctctgtacagaaaaagtcctttaaaaacagacaatctttatagaaacggtctcttaaacgtatacagactgttaggctccccccaggtggtgaatgctagcccttctccaattgtgaacatgtatgaatgggaggtatcacacatacatggaattcttcatggaataccacgcgttgtctcaagtagcccaaataatgccatgctcataaccatcactagaccatgctactgagctagggccaacatgcggataaactccatacaaatgggcagggtgacaatcgtacatgcaccaaccagagccatgctgctcagtacagatgccttaaaacatatcattggcatcggaccaagtactgaactgaatgccattctggcctg

SEQ ID NO: 545315 - DNA, 213 bp, Homo sapiens
aggatcctatacggctctgtgtaggagtagttcctgtctagagagggtagactgttcaactgttctgctcgggctcactatagcagatggcgagcaggagtaggagagaagggaaggtaaagaagtcagaaagcttatgttgtttatgcggggaaacgccatatcgggggcaccgattattaggggaactagccagttgccaaaagcctccga

SEQ ID NO: 545316 - DNA, 1222 bp, Homo sapiens
  misc_feature (280)..(280): n is a, c, g, or t
tcacttccttattgactgaatctatattagacgtcccctctaaattcatgcatgagtactttctttattcaagagtaccgaggcatacaaacaatcaggtatccaagcctgcatctacattgccttcaccatgaatctcccttcgattgtctgccacctggcattagaacagagcatgattagcaagtgtcactcaggtaaaactaagaatgaacatagcaaaaacagaatgatacacgctttctgcaagagaagcaggatggcttagacatcagagagncaacatgcgaattcacgaagttacgaagtagaccatgtgcattcttattctaatagagacaggtcactttaagtcttgaggccttagagtgactcaagagcagtgcttgtcttgcatgtgttgtatcgaagcctcgagtggcctgtcgtcacaggtggtggactaaattagtcacttacgatgcattgtgaaatataggcttacagaatcaaataccgtaattacgttgcaactgtaacatgtgactttcacgtttagttatgcctaacaagggttgtttaacagttaccaattgcatggttactttaagctaatatgtcgtcgaaataacctcctttcgtcagaaaggtgagccttggcctgttaccgtactagtaccaagcttttcctcaagtgtctttccaacttttcccaatgccaaatagttcacgcggaaggaagacaagaccaaccagaataccacgaggaccttttcccttctatggaaactctgtttgacacacggtaagcacggttctccgtgtgtctaatacggacactgtctactttaacgacgtttgggatctcccgttttacttgttacactttgggacctatccagcctaactgggccttggggttaccctgtaaggtgtttaatcccacgtggattgcggccaaagtacaagaaatttaatcaacaaagccaacactaggaaaaaggaccaagcgttaacgtgtttcttcgaacgaagaggtgtttaactccaagaaggaattatactccaaagtttggaccacttgaaacagtcaaagggacacggcgtcgacatgggttattacctcttgccccattgcacacacttctcgcagcgggagacaaaatgtgaaccccaacatttcaaccattctgaatggtccaagcgtctaagagcaaggacctatattaaacccttggttgga

SEQ ID NO: 545317 - DNA, 918 bp, Homo sapiens
ccattgtccataaaagaagaaatccagaggacttggacttcgccgccagcagaaggctgaccgataagaacctgggcttccagatgctgcagcaagatgggctggaaggagggccatggcctgggctccctcggaaagggcatcagggagtccggtcagcgtgggaaccccctcggaaggggaagggttgggtgctgacgggcaggagcacggagaagaagacacattcgatgtgttgcctgactagaggtatgatgcaggatgtacagcacacaagcggtgccgaacacaatagttccagggtcacccccgtagaggactaacaggcatctggaagatgctctctcgaccaacgtctgggtgcttacactagtctctggcttgttttcccatcactggaaatcacttatgaagaattgtagtgtctcagggtccttgataataggcgctagaagacatttgtgatgttacagaaatggaagttttctttttagtatatgctggttctctaagatctaagaatgttgtgaatgttgtgaatcatttaagcccgttgcaaataaatgtagaggaaatgcaggtgtgagcaaaacaaaagcagcagcacccaagaccaacgaatgaagcagagagcccaggctgaaaaacgagggagggagggggccgcacgaatagtggccacacccagggaaggggccgccaacttcgggggaacatgccacgggctctcggtaacgaagcagagggacgcgacagatgacgagaaggctttacatgaaaagcgaactaacgcagaggcgcggtctgcaacacaagaccgcggggaggcaacaaaaggctgacggagcgtcagacttggcgagaagccacgcagaacgcaggagcgccaagcacagggagccaacacccgcggaggac

SEQ ID NO: 545318 - DNA, 129 bp, Homo sapiens
tatacgaagcccggaataataggatcctcaggatatacaaccctgcacccgtctccttcatatcttattcagcttcctacactattaaagtttaccacaaccaccaccccatcatactctttcacccac

SEQ ID NO: 545319 - DNA, 226 bp, Homo sapiens
acggacgacgacgacgacgacgacgacgacgacgacgaacgacgacgacgacgacgacgacgacgacgacgacgacgacgacgacgacgacgacgacgacgacgacgacgacgacagacaaaaacgacgacaatgacgaagacgacgaaatcgcccacggacgtagcacgtgactaacgcatgagacctaaactagaggccgcaagcaacactctaccagtagtcc

SEQ ID NO: 545320 - DNA, 402 bp, Homo sapiens
cgagccccaccactgcaatgatcaaacctttatttatttgttacagataatgtatttcatttgatattttcttttgagaccaagtctcgctctgtcaccctggcttgagtgcagtggtgcaatcacagttcactgcagcctcgaactcctggacttaagtgatcctcctgccttggccttccgagtagctggcactaaaggtgtgcaccaccaggcctagataatttttcgtatttttagtagagacggggtttcaccatgttggccaggatggtcttgatctcctgacctgatgatccgcccgcctcggcctcacaaagtgctgggattacaggcataagccaccgcacccggccctgaagagcttttttaaaaactgcccatcccaaaaacttaatttca

SEQ ID NO: 545321 - DNA, 1085 bp, Homo sapiens
gaccggaacgtggggcgaggcgctgttgcatcaaagaaaaagggttcttttaggtcacccaccactggtccccatggctgccgtgcagatggatcctgagcgtagccaagacgcctcttctttgaagggggccactgatggtcatcctgaagcatgcccaagggaagcagagtattgggatatgactataactcctgggagtgtcagggcccgaagtatccgggagacgtgaagcatgatcccatccagtggatcctagcttgcctccgacgtacaagcatcgtgatgtgacaaggagctatatcacgagaggacagtacggcaccatcagttatgaggatttcgttaccattatgccatgcagccatgcgaggcggctgcacatgtgactgcagatgtgagcacgactcgagggcaagacggtagaccatgtcagccagtaccacaggtagtctgagagtgagaggccagatgagggcacaagcctccaaggaagctggacgcagtagccatggcgacattagccgatatgccaaccatgaagaagtggatgtcactcaccaacgttcatcagagaagacacagtggagaagctacagaccgagaatcgacagatctgtgcctaagacgatgtgctacctgtgctctccatgaaagcacacaaggaacgcgtggggcagaatctacccgatgtggcatagagtgcaaaagctaccaagagggacctgggaccggataacgagaagatgcagcccagaagcgtgaccgcagatccgaatcacagacagatgccaaagcgagatgtccagagggtccacggcaagaatgaaaaacacagacagctggacgctacgctatgccggcacgggcccaaaaaggagaaccgccaaaacgcccaagcagtgcaaggcaaacacgatgcgcgaggagacacagcagggaagtgatcgaagagcctagcaccgataccggcgaccagagcctctacggccaaaagcaggaagaaagacgaaccgcagacgcacgatacgaggaagcgtggcaacacgagacaagaaaggacaaagcaagaggcgagagagacg

SEQ ID NO: 545322 - DNA, 157 bp, Homo sapiens
tgaggtgtactggcggcctccggatcttcactacgacaatcatgtgtcatagctgacacccaatgagaatttaccacatgtttaaaaaagaattaatacaaagacacagaaaagaaccaaagtataccactacagaaaataatcagggtaccgagct

SEQ ID NO: 545323 - DNA, 141 bp, Homo sapiens
  misc_feature (45)..(45): n is a, c, g, or t
  misc_feature (65)..(65): n is a, c, g, or t
tttgcaatagcccaatctcattttttaaatcacctagacatttgnaaaatttttcaaagttaggnaaatgcagttattaatatgcttcattcagttaacctatatctgcaaatatcctgtacaccttagtacaactggatc

SEQ ID NO: 545324 - DNA, 971 bp, Homo sapiens
ggaatcacctgtgtgtaagtcaccatgtagcggggttcatcgacctgattgtgcttgccggcctagctgaacgcatagcttgggccacttgctcgtgaacactggtgctcgcttccctcgacctgcttttgcttcactgcctcggattggtgcccctgaaccagccggggtatacacacacttcctgggcgctcactgggtgacctcggcatgctcaatgcccacgtcataaattgcttcgacgtacgccagatatatctttgagtggctcgatctgctatgccggatcctcggccgatatctgagtgtgtttgcctatctttccgagtggctcttgtgtcgcattacagtgaggtggagcgagtcgatgactgcctcaaacgtgcatgagatcaaagaacagctatgctagcttcgtggagtgtatccccgaacaacgtgaagacggccgtgtgcgagctatcccgtcgctcctgggaggcctgatagatgtcaggccaccttcatcggctacagcacgggcatccaggagctgttcaagctgcatctccgatgcagttcacggccatgttccggcgcaaggccttcctgcactggtacacgggcgagggcatggacgagatggagttcacctgaggccgatagcaacatgaacgacctggtgtcctgagtaccagcagtacccagggacgcccacgggcgacgaacaaggggaggtcgagaaggaaggaggccaagaacgaacggctttaaaaacgttcttcagaattcattcgtggcaatcccttagggtgaagctttctgttgtccttcaagccttgtcttcttacttggtaaccctattgcgcccacgattggcctctgttaaaaattcccctgtccgtgtattgatgtggcatctcctaaataccccattgccggaaaggccatccatacaaaaccttttaaacacacactcaaagatggcgctc

SEQ ID NO: 545325 - DNA, 187 bp, Homo sapiens
gtctgctgctcatgtcacccctctcgtgcgtccatggctactcgctctccttcctcatggctgcggcctgctcgtgcgcattgcttctgcagtggtctcttgcttttgccacgtctgcctggcccttgctgcaccactctgcctcacccgcctccaccattcacactccagccgttctttttttttt

SEQ ID NO: 545326 - DNA, 161 bp, Homo sapiens
gggggggggggggtttttttttttgggggggggcccccccccctccccccggggggttttttttgcccccggccccccccccgtggggggggggctttttttttttggggggcccgttttttttttttttccccccccaatttttttttttggggggggga

SEQ ID NO: 545327 - DNA, 334 bp, Homo sapiens
tcataggttcgcaggaaggagacatttggaaagaaaatgaaatgagaatatgaattcgcctacagaaatcaaatcaaggccagtcttcaagtactccaacagctgtgtcatgaaccttctacaatgtcattaggaagaagcagaaacaagctcagctgttggtcaagaccaagcctgccttttatcttactatatgttatgctcgtagcagagtaatactataatactgtgcataattacgtgttacctgttcgtctcaataggagctattctatctagatcaatttaaactgtgaagtttcactatacatgaaggattaatacaagttactct

SEQ ID NO: 545328 - DNA, 370 bp, Homo sapiens
cgccttctagtgctccatccacccctctctccacagacgcacccgaatttctgtccgttcccaaagatcggccccggaaaaagtctgccccagaaactctcacacttccagaccctgagaaaaaagccaccctgaatttacccggcatgcactcttcagataagccatgtcggcccaaatctgagtaactctatataaatatctcatggggttgtatattaccattaggcgttgttgtatgttacaaaaatcttctgatccagaaaacgactgctgtggcactcaaacatgtcccttcgacctttcatggtgcatgtgactgccgaacttagcatagaatatgataccctaggtatgctacactgcatcc

SEQ ID NO: 545329 - DNA, 107 bp, Homo sapiens
  misc_feature (76)..(76): n is a, c, g, or t
ccgctctaccacaggcccctaggtgtggcggacctttggacatataaaggaagcagttttagtatcagaaaagatntattagaaaattctcacgctgaactggtgta

SEQ ID NO: 545330 - DNA, 1184 bp, Homo sapiens
agcggaatcggaagataggcaggatttaggaatctatttgaaatattcattacctattttgaattggtcttaccaatttaacagaacatagtaaagctggataattaaagaataaactaactacacacggaacgaactgcaacggttatctatgctgtgacacgcaacctgagacttacttactgactccttcggcggcacgtcgacacttcgttctctacgaacgctctctcgtccggccacctaccaggcagacaacggaacgaacgaacaaactgaccctctggaatcgaaacaactttcacagttacctccactctaacccacctatgcaatgatcagtccttagtctacaccacaccccaagccccatcactctgctctgccacctcgcgcagctcagcacctcttaaccacaaagacagatcatctctaaccctagcccctcactagactaccctgaacgcacgcgcctaatgacctgaaaacaagccaacacactaaacctcctctagccccttatcccgccgctgacgcgcaccagcagcctatcctccccagcgcctctgcacactctgcaacacactccacccctgcgacacgccgcggacctcccgactctcccataccacgcgaacgcctacgagatatcaccccataaacgcgttcccgtaccactctacgcacgaatcacaccacaaggcaaacgaacctctcctacctccacaccgcaacgccaacacaacctcctcactcttgcacccaaacccactccacctgcacgcaacccacactaccaactggcagccacactcacacccgctctccccacacggccttacctctcctcaacttcacacatgctccacctcacgcacaacgccaccaaccacgcccacaaacacgccgacacaccctccacggcgcacccacacactcacccacttacacccctcccgcgcaagccaactcctggcaacccaccacacacgggctcacaccacacacagctcgcacaatcacactagcagcatcgcaccacacagcacacacacatcacccatcgcgcccagcaccacatcccccagcacaccggcacatcgcgccccacaccccccccacaacgcacaacgcctcatcacccccacacacacacgcccgccaagcccacatcccacgcagag

SEQ ID NO: 545331 - DNA, 115 bp, Homo sapiens
tggcaagcaccgtatattatggaggctctgtgactgggcactgcagagctggcagcagctgatgtgatgcttctcgtggtggtgcttcctcagccgaatcgtgcacatcatcaat

SEQ ID NO: 545332 - DNA, 694 bp, Homo sapiens
cttaaagccatagattttattccagaaaggagaaagtacatggcattaataaaccacacatgccatgaattttagaacactaaattatttttctctggcttatcaaccagttatatccatgggctgcaaattatatccatgacaaaattgataacattttgcaacatgtcaaagaaagaccaacatttttgcctgagtgtcccactaatctttatctagagttattattcttggactttctacaaaagtttcttttcaaataatttatgaattacaacaactggaaagaatactgggagaacctgaatacttcaattaaacacttgaaggaacaattttcctctttaaaccaatttttctggctgaaattttatattctaaaataaccccactcctttattttttgaggaagtggccaaataaagggggatttctttggccgcacaaattccaaggcaaaacatcttcattctttaatggtctaaccaaaagttcttgccctgcaactcaaggcttggtgaaataaacttggtctcaatgagagagaccttttcccaagttaaaaaaacttgaaagcggtcttggaataagaaggacttgttaaggccctataaaaactggcgggattatagggttaagacaaattgcattttttttccccacaatttgtttgccggtagtgaacctttttaca

SEQ ID NO: 545333 - DNA, 163 bp, Homo sapiens
ttattctgctcactcctaatagtggattaaggtgctgtagcacactggtgatgttgatttagagagacggcgtcacatgttgatcaggttgactcgaactctaactcagtgatcaccgcttggctcccaagtgtggcattcaggcgtgagtcactgcacgggc

SEQ ID NO: 545334 - DNA, 387 bp, Homo sapiens
  misc_feature (380)..(380): n is a, c, g, or t
aaacaatggagaataattaatgacatcaaaagttggttctttgaaaagattaataaagtcagtaaatcctacctagactaatcaagaaagttaaataaaaggggggaaggcagaaataaattaccaatattgggaatgaagaggagctatcttatagttccttcatatagtaaaaggttagttaaggaatgttatggtcaaactttatgtcaacaaattcaacaacctagatgaagtgaacatatttcatcacaacttatcaaaactcacagaaaaaaatataaaaatctggaatagtcttttgtgtattctagggcccagatgtcttcacttgtgaattctagccaaacatttaaggaaataatgcccatcttacacanacttttc

SEQ ID NO: 545335 - DNA, 340 bp, Homo sapiens
ggttcctctccttccacagggagatgggtggtgcatgtggatgcagcccaggccttcctgctgctctcggatctgcgtcagaggccagagtgggtacttatagcactatcggagcgtgcgagctagtgtcagcaggtagacgaggacgacgccatctaccagtcacagtccctgccctcggaggtcacagaaagccccaggacttcgtgatcctggtctcgagggctggacgccttgtgactagagtggtggagcccctatgtcagtcgcgcgtagaggtcggtcacgctgcccaggaccaccgagagacgccagagtacagaggcggagagaccctctg

SEQ ID NO: 545336 - DNA, 100 bp, Homo sapiens
ggtcaatcagcagcaccaagaccccctcacacagtactcccagatacactagcatcaatcagcaccacatgagatccacatcacacagtactccacagct

SEQ ID NO: 545337 - DNA, 538 bp, Homo sapiens
tcactttttttctagatttaaggtcttgaatcataaaatacttaccaaaactacctcacacaaaatattacctatgtaaaaatcatcaagtcgatccacgtacgcatccatagaactcaaaagcagaatccggaaacccaaaacagaaagagtcacatcaaccggagaagacacacaacaaggagagagagaagagatagcacgaagacaagagaagcgcgcaagagcacagaccagaaaaacgaaaaaaagcgcagtgcagcaaccaacacaaggaagaagagagagcacaggaagagcagatgagataacgagaagaagacaagaaagaacgaaacgacaacagcgaacaacaacaaacagaacacaaaagacgaaacacgcaaagaacagaagaaaaaacaaacaggcgacaaccaccaggccgacgagagcaacaaaagaaaagacagacgaacgagaaaaaaaaagaaggagcacaagacccacaacagagacaggaccaacagagacaaggagagagaacgagcgcccacag

SEQ ID NO: 545338 - DNA, 266 bp, Homo sapiens
cccccttgtggcttcacaacaggtgactcggaaagcaaaggcgcttggctaagctggtggaagctatcagggccaatttccaatgacagattcgatgagatccccccgtccctggggtggcaatgtcctgggtcctaagtttgtggctcggatcgccaagctcgaaaaggcaaagggtaaagaacttgcccctaaactggggtaaatggaccctggtgagttttctggacataaaaataattgaaataataccaattttccttcca

SEQ ID NO: 545339 - DNA, 352 bp, Homo sapiens
aggatatagcaaaaagatagaataatacatggtcaagaatataagaatcggatggatacttatcctctacttaacttgatgcatacaaaagcaacgactggataaaaatcaatgtaaaaaagaaaaatagatacccatgccaaaatacaagggtataaacagccaacagagccaaacttacaaagaaaataaaagactagtatctggacagtgattttattggtacagatataagacatataggctctataaaaaactcaggtcataaagccctaagccttattaatgtattgctacagtctctttcttctaaggggaagaaaatctccccaagaataggatgctacctgag

SEQ ID NO: 545340 - DNA, 115 bp, Homo sapiens
ctgcatgtgttgactctatgagtgattccccgtgtgaggctgagtgcagtgagaatctgcttgtaacctagtgagcctggagtgtgtgtagtaatgtggtgtacctgatgctcga

SEQ ID NO: 545341 - DNA, 359 bp, Homo sapiens
agtctaaaaaggacagagtcactaagtagtcgtcatccttaacactgtgcatgcagactactgtgactctttcctttttagactcacatatcatcgtctcatcatcccatatcatggatcactgccctgttctctccttccttaccctcttcttggaattggaagtatttttcaaagactgaggcaaaacaatttcgcttcaacatgccagcttgatgcacctatggagtccttggtatgccgcgaagtattttcaagtgtcatataggcagagcagtacattgtactccttgattctggtatttaccaggtaaactcccgatagaccactctttcaataactcatcctccatggctgg

SEQ ID NO: 545342 - DNA, 720 bp, Homo sapiens
  misc_feature (104)..(104): n is a, c, g, or t
gacagcaacagagccttggcagagggacggctctagctcagtgtagcactaacagcaccattatcgagcagcgccggagggatgtagggatgagagagtgtgcntatgggccgggctagaacagtgggtcagggccccccacccgggaaaaccaacggagtcctaagacgtgtcttattttcttgaattggttggttgctttgtgggtgcgtctcataaggtccttcctttgtttgcttctttctgtctccttgttgcggtgggccccgagatttgtagagtgtgctcgtttgtctggagggagccttggtgccaagcttgtccatggggcgaggcctgggtctctcctctcctcaggactggagttcacacgaagtcggtggcattgggaaaccgggtgcacagggacggatttcctcgtggctggcaatgacactatccttcccctggggaaagcagcccacgggttctggagtggaggtcttggctggggtctgtgggacccgctgcccctgcccgccccttcccccggcttgcacggttgccgcgtcgctggaagaatgaatggaattgcctgggaatccggggagcgtgaagacacccgggacctcagggaacccgtgacttcgccctcagggtcggtcccgtcgcgccaggataggagccgggctctggtggggctgccgagagtcggagtgggacccggacgggctcacatga

SEQ ID NO: 545343 - DNA, 1167 bp, Homo sapiens
ccaccaacaagcacgaaagagttaggaagaacgagtacgggtgtgtttatttcagttacgaggcggggggttgtcctcataccggatggatcagcaggcatgacgattccgccagctgcctagtttcctccccctcctcttctccctcctctctcctcttcccagaccacctccttctttcccgcccctgcgcttcttttcccttacccatctgtcctccctccctccccatcatgcccatcatcaacattacaccatatacatcacatacacaacccaaatacacacaccacaaacccaccacatcacaaacaacacacacacacccccacacacagaaacataacacagacatacacacactaaaaaaacaaaagaaacaaccagaaaaaaaaaccacaaaacacacaacacagatcctcccagactacattcaacttcccattccacctcctccccacgccatcccatacaaaacaaactgcaaacaaactagaccctacaccatccacacacctccaacacacaaacaaacatgacaaacaaccactcacgaagccaacaaacaatcacataccgctctaaaaccacagacaacaacaacaacaaccacaataaaccatcacaacacaacgccatgaaataattaactacagtaccacaccacaactccccatacatcaaaaacaaaacgaaataactaactaacacaacaacctaccccgagagcaaactcatcatcacataccacaacactcaaccaaacgaacaataaaacttacaaaaaccatcaataaactcgacaaccaaacaaaccaaagttacaaatagcaaccatcatacagtacacgcatacacactacatcatgctatcacgagcctaccccaccagataaacaaccaagactcatatacacgtcatcagtaaacaagatatcacacatatatacctacataacgcgacactattacatctactcagtatcatacactctgacacatccacagtagatctcacacactcagtaacgcctacagcatagacaccacacaccacactactaaccaacgaaccaccaataccaatacgccaacggcaaactcacaacgccacacaaccagacaagctcactacagacttgccccacaagatcactcctccacaca

SEQ ID NO: 545344 - DNA, 671 bp, Homo sapiens
  misc_feature (268)..(268): n is a, c, g, or t
  misc_feature (292)..(292): n is a, c, g, or t
  misc_feature (308)..(309): n is a, c, g, or t
  misc_feature (312)..(313): n is a, c, g, or t
aactgcatccgttggaaaaatgctcgtcaaggttttcaaaagtaaaacaaaagacccaagttatccggccagttcaatttaagaagtgtttttctcccagacgcaacgccaaatttcctttaaggccttcgccaatccgggggccccattttttgccctcttcttaccccaatttttttgtattaccctcccaaaaaaattttttattgagcactttgcggcggaaaggcggcctctcccctttttttttttaaattttaaataatcnaaattaattgtttgttgtggggtnaaaagcaaagtttttnnatnnaatttttcccccatcccatcccccccctggattcatttgagaaaacttgaaaaatgttttaaaactccccctgctgcatgtagctcttgcttatttactggtttgggaaacaggatgtgtttcctttttttaaaagccaattgacagattacccctaaaaactcccccttttggatcattcacccctttgttttaggtttggtaagttttaaaaaatttcaccaccaaagttgttattcagtgggcccaatggactccaaatcccccaagttatgtaaacctgtcccaaatgtaaacttcattgtcctttgttggatgatattttaaatggaaataaaataaattggtttaaagggca

SEQ ID NO: 545345 - DNA, 930 bp, Homo sapiens
atctcacgatggagcgggaccgacagcagatgagggatatggccttgagattccagacctgctacatgcaccgtaatcgtcgaaaacatttagggaatgggagttatgattctgaagaaattatcaagatattaaaatgagtagaaatttttgcagtctaaatgatggtcatattccgctagaggacgtgcaagaggtaggagactactataagctgtaggaccaagcactgttgtgggcaattggagagctaagagcgagttgagatgcaagtgattcagatgaggaatgtgagtgcaggtggcctaaagtatgtccttcatgtttgatatctgaacacataatatagagttgtgagaggcttgcaaattatattgcatggattggatggtacctgaagttgtcaaagatacgagaaacatttgagtactgacgagttctcttatgatgatgagagttgtgcagtttgcgtttccaaaacaaatggtgttgatgatacttatttgtaaaaatgaagatggcttttcattatccattgaagttgctacccatagatagatgtgatctgcagaagttgtgtagtcttcatctgaatttcaggctgggagggagcaatataactgaggtccagacttgatggttgttcgctctcggtgttttatgctcacctacttcccgtttgggtactggccgtacctgtttcctgaagatgctgggggttcttggggctgtggtaatagccacctgctgccgggcttatatcccacatggctcgttaaccttaaccggtggtcctcttaccgaccacgcccgggccgagtcgcgtccccgcgggtcccatttttcctgggcccccggccgaaaccgtgtgtttttgttccccatcttgggagcggaggggcccgggacctgggcgtgggcgaagaggtc

SEQ ID NO: 545346 - DNA, 858 bp, Homo sapiens
aaactacgggtccaagacgggtatttgcagaggagaacaagtggggtgagaaggccgtgcgctttgccacaagatctcgttgtcaaaaaaaaaggcccgttacccctatgtgaagtctggtagagccagttgaagctgcaccatgtgaatcccggcccccaacgccccctgggtgtatatcccccgcaccccggccaggagcgaggcttccgcattttatggaaatcgaaaggggttaaccgccctggacccccatcggctttatggttcgacccgccacgcctccgtccaggggtatctgtcgaacagacacctaaagcatactggcgaataaacaaaggcctgctcgccccaggtggaacgagcgccccccaggccaagggggaagcagagccccgcagcagcacctgttagcgaccccggtgacccctccgtaaaccccgggccaagccgaagatgaaacataactggaataaggcgaacaaacatgcaagaagaaacccccagaggacattgtaccaacgtgagaaaagatgggatatcctcaatagttgatactttcgcaccccttacgactcccagtgtacgagagagggaatgagcaaacactacatccattcttccctatgggagagacgatacatgtggatccgcccacatatccgccaggtctcacgtctgcgaacttgctaaaactgtgggattatcggtgccaccacggcaacaaactcgggttattttagaggataactactctggtagacccactaccctccatcgaacagtaatattggtaccatttaactgggcgaatttgggaaggaacatattgccaacgggtataaacaataaacaaga

SEQ ID NO: 545347 - DNA, 1007 bp, Homo sapiens
gcacgaaggaacttaattcagagtccgtgagagcaatgcacggaagcagaaccaggctgctccccctcctggctctagaacatcactggcagccactgctaacgggagggacaaggctggtgggatgccaggactcagctgggtgccagtggctcctgtcctcttccccgtgacattccggcttgccttatggcgggacacccaggggcagggaacgggaaatgtcaggtgctgttagggaaacacagcctgaggaagcccccagggagagacacgctgggacatcccagacgttacacggacgctgggcacacgagaagacttgcttctctaggacgacaatggtctcataacgaacgacaggacggacactcactaaaccaaccagaaactgtattctctcatagcttctggagaccagaaatctgaactcagggtgtaggcagagctgcactccctctagagattctagggggagacttcattctttccccatgtgcgacaacggccgggagggatgccaggcaccgacctatgcacctaactgcgagcaacagatacaggatgcagaggcatgcaatggtggcccccagccgacatgcccactgcgcatatgttgccccagaaaacgtgagaactgttgacttcatatggacacaaccgggctcctccacaacaccacgacttaccttcagggaacccctgcagcactgagactgcatcctggcttaatccagggctgggccactggcacatcaaaagcacccgtggaccttgcaacgagcacacagaactaaccccaccccacgtcccaccaagccggccagccgcagaatcggacgtgcccgccttgcccaccaatcccacacacgcgtaaccatggcacccggcccacccacctctaccccccgcacccgacgcaaaccacacggcgcatggtaaacgagcaccgtcccacaacactcctcggctgccacacgcccccggcgacctcgccaccaatccgc

SEQ ID NO: 545348 - DNA, 1011 bp, Homo sapiens
aaggcagaggggctccaggtcctgtttccagctcccctcactgcacatggtgaagctcgctccctccctcccctcccttcccgcttttccccagagctaatacacaggtgctattattcagaaaaaaactggtcagctctagccaaagtgaggtatcatgtttacttctgccctagctatgtgtagcctcttatgctgaagtcggctactgctggctcctcgcgctttcagagcccctgacacaacgacacacaggatctgtccctacccagcaccagcacaactggtctgtagtacttgccacaacgcccctcataacgccctccggcttgagggcgcagagtgtctcgctcatgggttctgcctctgtgcccttgctggccgcttctcctctgccttctttctggatctccagcggtgtggggactgagcctgtacagggacctcatgcacgacttgcatgtgagacaactccacaaagatgtgaccctacttcccatcttacacacatcaaggtgtctctggcacaggactttgggcacctaaagactcccatgctcgagtacaccagggctatgtgcggccccacccgttgtatccacgcctgctcccttagcaagcccgaccgtgctctcagtcaggacacctaaaatgctcgttgaaggagacctgggcagccagtcaagaacagtggacaggcaggccagaagaagcggttgtcccacataggagactggtgcgtgcaagcacaggcattggccgtccaggcctagaatgaatttaccccacatgcggcctgcaaagatacctgacgactacgtcactgaacttcacggaaggggtagtgacgggatcgaaagcagagccctgtcggacgacacctagcacaacgcctccgaaaggagaaacttacaacccacgtcccccaacaccacggtgcatcagccgcaacgtgcacaaactacacgtaggcacatagcagagtcacacaacttccacctttgtatacac

SEQ ID NO: 545349 - DNA, 963 bp, Homo sapiens
attcgcggccgcgtcgaccttcagcatgagcatcaaccagtatccttgtcaggtggcccccattcctctacattcctggatggtttgggatcccacagaactctaatgattacataagaagagtggcccgtcctctctccggtccgtgcctccaagatgacaaagaaaagaaggaacaatggtcgtgccaaaaagggccgcggccacgtgcagcctattcgctgcactaactgtgcccgatgcgtgcccaaggacaaggccattaagaaattcgtcattcgaaacatagtggaggccgcagcagtcagggacatttctgaagcgagcgtcttcgatgcctatgtgcttcccaagctgtatgtgaagctacattactgtgtgagttgtgcaattcacagcaaagtagtcaggaatcgatctcgtgaagcccgcaaggaccgaacacccccaccccgatttagacctgcgggtgctgccccacgtcccccaccaaagcccatgtaaggagctgagttcttaaagactgaagacaggctattctctggagaaaaataaaatggaaattgtacttaaaaaaaaaaaaaaaaaaaaaaaaaaaaaaaaaaaaaaaaaaaaaaaaaaaaaaaaaaaaaaaaaaaaaaaaaaaaaaaaaaaaaaaaaaaaaaaaaaaaacaaaaaaaaaaaacaaaaaaaaaaaaaaagggggggcccccacaacaggccatagcaggggagagaacgaaagacacccacaacaaaagcaacactaggagaggacaaagaaaagcaagcaaaaagaacaacacagcagcgcgggaggacacaacagaaggagaagaacgacacaccaacaggcagagagaccgcagagaagaacaaaacaaagggaaggagggaggaaccgagccgacaacacacgcccaacacaaagagcgcgagcacaaacagacagaaaacagaaag

SEQ ID NO: 545350 - DNA, 745 bp, Homo sapiens
  misc_feature (602)..(602): n is a, c, g, or t
  misc_feature (634)..(634): n is a, c, g, or t
  misc_feature (643)..(644): n is a, c, g, or t
  misc_feature (646)..(646): n is a, c, g, or t
  misc_feature (650)..(651): n is a, c, g, or t
  misc_feature (662)..(662): n is a, c, g, or t
  misc_feature (680)..(680): n is a, c, g, or t
  misc_feature (686)..(686): n is a, c, g, or t
attcgcggccgcgtcgaccttcagcatgagcatcaaccagtatccttgtcaggtggcccccattcctctacattcctggatggtttgggatcccacagaactctaatgattacataagaagagtggcccgtcctctctccggtccgtgcctccaagatgacaaagaaaagaaggaacaatggtcgtgccaaaaagggccgcggccacgtgcagcctattcgctgcactaactgtgcccgatgcgtgcccaaggacaaggccattaagaaattcgtcattcgaaacatagtggaggccgcagcagtcagggacatttctgaagcgagcgtcttcgatgcctatgtgcttcccaagctgtatgtgaagctacattactgtgtgagttgtgcaattcacagcaaagtagtcaggaatcgatctcgtgaagcccgcaaggaccgaacacccccaccccgatttagacctgcgggtgctgccccacgtcccccaccaaagcccatgtaaggagctgagttcttaaagactgaagacaggctattctctggagaaaaataaaatggaaattgtacaaaaaaacaaaaaaaacaagaaaaaaaaacaanttgtggcgcgccacctagggccctggaaaacntttttaaanncnattnngttgggcaccngggccccagtatgttacntgaacnctggccaaaaagatgtccccaagaaaaaccctggtcagagcactggtgctgatttcccc

SEQ ID NO: 545351 - DNA, 920 bp, Homo sapiens
attcgcggccgcgtcgaccttcagcatgagcatcaaccagtatccttgtcaggtggcccccattcctctacattcctggatggtttgggatcccacagaactctaatgattacataagaagagtggcccgtcctctctccggtccgtgcctccaagatgacaaagaaaagaaggaacaatggtcgtgccaaaaagggccgcggccacgtgcagcctattcgctgcactaactgtgcccgatgcgtgcccaaggacaaggccattaagaaattcgtcattcgaaacatagtggaggccgcagcagtcagggacatttctgaagcgagcgtcttcgatgcctatgtgcttcccaagctgtatgtgaagctacattactgtgtgagttgtgcaattcacagcaaagtagtcaggaatcgatctcgtgaagcccgcaaggaccgaacacccccaccccgatttagacctgcgggtgctgccccacgtcccccaccaaagcccatgtaaggagctgagttcttaaagactgaagacaggctattctctggagaaaaataaaatggaaattgtacaaaaaaaaaaaaaaaaaaaaaaaaaaaaaaaaaaaaaaaaaaaaaaaagggggggggcataaaaaaacgccaggagggcgcaacaacgcacagacaacccgcctaggagaaaaaggggaccacaagagagggacaatacaagcaacgaaagccagaccagaaaacccccccacgaggaaaacaacgcgcccgaaacacacgagagaaaaccaaaccccagagagggagcaaacaaaggagcacacacacaacgacagacacaacacaacagaagcacaacaccaccaggagagcacaggaaaaacaagcgaacgccgccacacaaaaagaccagaaaaaaaaacaaatcgg

SEQ ID NO: 545352 - DNA, 131 bp, Homo sapiens
gaggcaaacgggaaaggagaggaatgcttaaaatatacagtgaaatttgagttggattctctactcaaagacttctctgggaaggtgtccagaagttgaccacacagtgtgctgacgagtagaaacgaaca

SEQ ID NO: 545353 - DNA, 706 bp, Homo sapiens
attcgcggccgcgtcgaccttcagcatgagcatcaaccagtatccttgtcaggtggcccccattcctctacattcctggatggtttgggatcccacagaactctaatgattacataagaagagtggcccgtcctctctccggtccgtgcctccaagatgacaaagaaaagaaggaacaatggtcgtgccaaaaagggccgcggccacgtgcagcctattcgctgcactaactgtgcccgatgcgtgcccaaggacaaggccattaagaaattcgtcattcgaaacatagtggaggccgcagcagtcagggacatttctgaagcgagcgtcttcgatgcctatgtgcttcccaagctgtatgtgaagctacattactgtgtgagttgtgcaattcacagcaaagtagtcaggaatcgatctcgtgaagcccgcaaggaccgaacacccccaccccgatttagacctgcgggtgctgccccacgtcccccaccaaagcccatgtaaggagctgagttcttaaagtccatttcagacctgcggaacaaaaaaaaaaaaacagaaacacaagagacgtcagacaacacgcagacaacgacaaaagaggtcgaccgagaggaacaccacgcgcacacgcaggaggagatcgccaaagcgggcagggagaagtgtagacgggagtggcacagcacactaggaacaaagaagg

SEQ ID NO: 545354 - DNA, 952 bp, Homo sapiens
  misc_feature (54)..(54): n is a, c, g, or t
accaaagaacaacccatggcagtgatgaggccgtgcggctaagcgggcacgagngccaagatgacaaagaaaagaaggaacaatggtcgtgccaaaaagggccgcggccacgtgcagcctattcgctgcactaactgtgcccgatgcgtgcccaaggacaaggccattaagaaattcgtcattcgaaacatagtggaggccgcagcagtcagggacatttctgaagcgagcgtcttcgatgcctatgtgcttcccaagctgtatgtgaagctacattactgtgtgagttgtgcaattcacagcaaagtagtcaggaatcgatctcgtgaagcccgcaaggaccgaacacccccaccccgatttagacctgcgggtgctgccccacgtcccccaccaaagcccatgtaaggagctgagttcttaaagactgaagacaggctattctctggagaaaaataaaatggaaattgtacttaaaaaaaaaaaaaaaaaaaaaaaaaaaaaaaacaaaaaaaaaccggggggactaatttgggggggggggaaaaagggggtatagaaagggcgcacagtgtggacaaaagcagtatttacatgagacccagattttttgtgtgtacccacggggggaaaaatcgaggcgggtcccctaatataggaggacgccgcctatataatttcacataaacccgggtgtaacccgggcggtatataatacgtgtgcggtagacaaacctcagcaatgcaagccgccgctaatgacagagccggacagagcgtagcgatagcgcgtatgagagagacagggggatgagccgacaaccagtagtatctgctacgcagagcaacaaagccgcgtggcacgtaaagtacgagcacgcaaggatctcatacactggtactatgtagaccagccatataatccaagcgagcttctttcttataggcagag

SEQ ID NO: 545355 - DNA, 383 bp, Homo sapiens
  misc_feature (304)..(304): n is a, c, g, or t
ggtcggacggcacgttgctggaccaggaagtcggtaggcggggtgtggatggcgcgcaccccttcggtgttctgggccaccaaggaggtgacgacaaccatcgcatatccacctgccgcgacgattgatttggtgtcggctgcggtgccagctccaccggacggatcggtacccgcaattgacaggacgcggggaattgttccccgctcggcaagcgcatcactagtggtcatctcggacatcccttcgccagtacgaactagatcaggttccacgggtgtgatctcagcgccaccgaggcganccccggtgtccaaagaccagtatgtcaccccaccacaacttgcgctccgccgctgaaaaccgaccgaacacctgcaaaa

SEQ ID NO: 545356 - DNA, 945 bp, Homo sapiens
gaccacgcgtcgggacgcgtgggtcgacccacgcgtcgccacgcgtcgccacgcgtcgaaagaaaagaaggaacaatggtcgtgccaaaaagggccgcggccacgtgcagcctattcgctgcactaactgtgcccgatgcgtgcccaaggacaaggccattaagaaattcgtcattcgaaacatagtggaggccgcagcagtcagggacatttctgaagcgagcgtcttcgatgcctatgtgcttcccaagctgtatgtgaagctacattactgtgtgagttgtgcaattcacagcaaagtagtcaggaatcgatctcgtgaagcccgcaaggaccgaacacccccaccccgatttagacctgcgggtgctgccccacgtcccccaccaaagcccatgtaaggagctgagttcttaaagactgaagacaggctattctctggagaaaaataaaatggaaattgtacttaaaaaaaaaaaaaaaaaaaaaaaaaaaaaaaacaaaaaaaaaccggggggactaatttgggggggggggaaaaagggggtatagaaagggcgcacagtgtggacaaaagcagtatttacatgagacccagattttttgtgtgtacccacggggggaaaaatcgaggcgggtcccctaatataggaggacgccgcctatataatttcacataaacccgggtgtaacccgggcggtatataatacgtgtgcggtagacaaacctcagcaatgcaagccgccgctaatgacagagccggacagagcgtagcgatagcgcgtatgagagagacagggggatgagccgacaaccagtagtatctgctacgcagagcaacaaagccgcgtggcacgtaaagtacgagcacgcaaggatctcatacactggtactatgtagaccagccatataatccaagcgagcttctttcttataggcagag

SEQ ID NO: 545357 - DNA, 138 bp, Homo sapiens
  misc_feature (17)..(17): n is a, c, g, or t
ctcacctcgacgctcgntcccggttggacgtcattacaacgctgttttggcctcagcagaacttgttgccttaaaaatgttctgccgggccgagttgtattggctccacgctgtatcaccacttgggggctccagtgt

SEQ ID NO: 545358 - DNA, 481 bp, Homo sapiens
tgggacggcaccacctcagtgcagctgctccgtccccttgcatgtccccttgtctcccaaaggctccatgtccccttgggccaggaaagaggaggcactgccatgtcccattgtctacaaagtcctgtgcaggctgcacgccaggcagggcacagtccctcctcaactcaccagcagaggctgtggctcctctggcaactctacagtcacacctgttagctctgccagctcctgaccttggatttcctgctcagagaccggggtgggctgcaagtatctgtaactcagggtctcgtggcgggcattgtcctccgccccaggaactcgtgaaggacatgaccgccgccggaaaaggaccttggaaagacaaagagcccattcaagtccacaccctgggctcagcttcggggtccccagtacacagctgggacctgccatccccaaccccccttgaatgggagccaggggttgttgttctttt

SEQ ID NO: 545359 - DNA, 966 bp, Homo sapiens
  misc_feature (217)..(218): n is a, c, g, or t
  misc_feature (222)..(222): n is a, c, g, or t
  misc_feature (237)..(237): n is a, c, g, or t
  misc_feature (242)..(242): n is a, c, g, or t
  misc_feature (246)..(246): n is a, c, g, or t
  misc_feature (249)..(249): n is a, c, g, or t
attcgcggccgcgtcgaccttcagcatgagcatcaaccagtatccttgtcaggtggcccccattcctctacattcctggatggtttgggatcccacagaactctaatgattacataagaagagtggcccgtcctctctccggtccgtgcctccaagatgacaaagaaaagaaggaacaatggtcgtgccaaaaagggccgcggccacgtcagggggnngccncccttaaaatttttnccccngggnccntgccacgcagcctattcgctgcactaactgtgcccgatgcgtgcccaaggacaaggccattaagaaattcgtcattcgaaacatagtggaggccgcagcagtcagggacatttctgaagcgagcgtcttcgatgcctatgtgcttcccaagctgtatgtgaagctacattactgtgtgagttgtgcaattcacagcaaagtagtcaggaatcgatctcgtgaagcccgcaaggaccgaacacccccaccccgatttagacctgcgggtgctgccccacgtcccccaccaaagcccatgtaaggagctgagttcttaaagactgaagacaggctattctctggagaaaaataaaatggaaattgtacaaaaaaaaaaaaaaaaaaaaaaaaaaaaaaaaaaaaaaaaaaaaaaaagggggggggcataaaaaaacgccaggagggcgcaacaacgcacagacaacccgcctaggagaaaaaggggaccacaagagagggacaatacaagcaacgaaagccagaccagaaaacccccccacgaggaaaacaacgcgcccgaaacacacgagagaaaaccaaaccccagagagggagcaaacaaaggagcacacacacaacgacagacacaacacaacagaagcacaacaccaccaggagagcacaggaaaaacaagcgaacgccgccacacaaaaagaccagaaaaaaaaacaaatcgg

SEQ ID NO: 545360 - DNA, 228 bp, Homo sapiens
tcagatggacagaaatagtttctttaggattgatctcttaaatttgactttgggaagatactggcagtccaggttttgtgacagagatccatcctggagatctttggtaaaatggacaaaagccttgaaatgccagcggtttctttattggctaaggagagtttgatgggatttcaggacaaaatggggaataatagtagattgttgcaattgaattttgtttgactt

SEQ ID NO: 545361 - DNA, 522 bp, Homo sapiens
attcgcggccgcgtcgaccttcagcatgagcatcaaccagtatccttgtcaggtggcccccattcctctacattcctggatggtttgggatcccacagaactctaatgattacataagaagagtggcccgtcctctctccggtccgtgcctccaagatgacaaagaaaagaaggaacaatggtcgtgccaaaaagggccgcggccacgtgcagcctattcgctgcactaactgtgcccgatgcgtgcccaaggacaaggccattaagaaattcgtcattcgaaacatagtggaggccgcagcagtcagggacatttctgaagcgagcgtcttcgatgcctatgtgcttcccaagctgtatgtgaagctacattactgtgtgagttgtgcaattcacagcaaagtagtcaggaatcgatctcgtgaagcccgcaaggaccgaacacccccacctgccacaaccaggttgtggcaggtgtgattgctgctgtgccatcgtcctagtccacctccacgccggtcc

SEQ ID NO: 545362 - DNA, 1292 bp, Homo sapiens
cggacgcgtgggtcgacccacgcgatcgcaggcctcagcagggaatggggcgtatatgttagtgttgctgcaacaattaaagcctgttgcatctctcatgccaaaaaaaaaaaaaaaaggggcggccgcccatttttttgtattattgtattttgtccccagaagaagggcattttttttttattccaagttacgtggcaaattgggaacccaaagtagaggggccccccagaggcgggccgagcaagatctcgagggtaacccgctctcgccaaaagagaaacagagggggaagggaggggtggcccgtataaacgccgttagaggggtcgaatatgcgggccgccgtggcgcacaacatcgggggacacaggaatccaagaggggcgaaaggagcggcccagaactactatcaccggaggagaccacgtgggcgagatgaacgcggacccccccacagaccttagcaagatgcgcccaaaaccacctgttatccccccaaaaaagagaagtaatctcagggggaggaaggcgaaccagggggcgcaaaaacaaagagggacggcgacaaaagaggagatcagaacctctatcgaggccgacggggaacaaacccgcccgccctatggcggaactttgccagacaaccagcgggaacacatggggaccacaaaaatcacagaccaaccactggcgcgccaaagaagagaataggggaagaacaagagagcgaaaaggtgggcgaagcccaaagaaacactagaaggggccaacaggagagagaccaaagcaggaggcgatactagaacccgagaacacccgatagaacacccgcgatgaaaaaacgggggagccccaagtagacacaacaagacgagaaactgggataacaaggggagcgaaacacagacaaaggagagggaggaagacacccccacgaccaccctcagaggaggcggcacaaggggcagcatgtagggcccaacagggaagcaaggagacgaggaaatacacacacaacgaaaaagggatacaaacgcccggggagataaaggggacggcgcaacagggaagaaggaaagggccacccccacggccatggacagaggggcgcaacacagagggacgagcaagagcaccgtacaaacgccccgggtaacaaatgcgcgaaacggggaccccaacggaacctcgtgcaaaaggggcacaaaagacaaagcagaacgacgaagaacagaaaggcaaaagaaaacacaaagagacaagaaaggagacgatggggccgcggtgag

SEQ ID NO: 545363 - DNA, 105 bp, Homo sapiens
tctttctttctttctctctctttctttccgtctttttcttttcttttcttttctcttctcttttttctttctcttttcttttctttccagggtctatgctatgct

SEQ ID NO: 545364 - DNA, 617 bp, Homo sapiens
attcgcggccgcgtcgaccttcagcatgagcatcaaccagtatccttgtcaggtggcccccattcctctacattcctggatggtttgggatcccacagaactctaatgattacataagaagagtggcccgtcctctctccggtccgtgcctccaagatgacaaagaaaagaaggaacaatggtcgtgccaaaaagggccgcggccacgtacgagatcatgtgcatgatatgtgctggaataattgtgacctgaatggcgtgcccggggacaaggcgcagtgatacaagatacagtactactcccgattgaacaagtaagtggagggcagtaactgtctgggaacattagggatcgcagggacatttctgaagcgagcgtcttcgatgcctatgtgcttcccaagctgtatgtgaagctacattactgtgtgagttgtgcaattcacagcaaagtagtcaggaatcgatctcgtgaagcccgcaaggaccgaacacccccaccccgatttagacctgcgggtgctgccccacgtcccccaccaaagcccatgtaaggagctgagttcttaaagactgaagacaggctattctctggagaaaaataaaatggaaattgt

SEQ ID NO: 545365 - DNA, 446 bp, Homo sapiens
  misc_feature (306)..(306): n is a, c, g, or t
tttacgttccacgctagttgggcgggtgacggtgacgaggattgcttgagccctgggaggtgaacggctgatgtgagccatgattgtacccctgtgctccattctggtgtgatagacgcaagaccctgtctcaaaaaagacacggaaatgtacagaaaaatgttcaagcttttcacgaacgagcaggatcgaccacaaaaatacttcctcttggccaggtgcgatggatcatccccgtgatcccagcactttggaaggccgaggcggccggatcacctgaggtccggagttcaagactagcccggncaaacacggtgaaaccccatctctacaaaacataaaaacttacgccgggcatgattggcgggtgcctgtaatcccagatactcagggggccgaggcggagaatcgcttgaacccgcgacagccacgcctggggtaccgag

SEQ ID NO: 545366 - DNA, 165 bp, Homo sapiens
agaatgtccccagtaggatgcactgagtcagagctaatggattggtgacaagcgctgaactctgcccgcagcacccggacccttcaatggcagcctgcatgcaggtgcccttccttgcagcacaagcctcgcccgaaacagaacgcctgagagcagcctcgacgg

SEQ ID NO: 545367 - DNA, 233 bp, Homo sapiens
ggctaagtctctaatatatgtctttggcaatattagttttctttaaaaatacaaaataggccgggagtggtggctcacacttctaatcccagcactttgggaaaccgaggcaggtggatcacctgaggtcaggagttcgagaccagcttgtccaacatggcgaaaccctgtctctactaaagatacaaaaattagcctggtgtggtggtacgcgcctgtaatcccagctactc

SEQ ID NO: 545368 - DNA, 118 bp, Homo sapiens
  misc_feature (24)..(24): n is a, c, g, or t
tcgagctccgttccgcattaacgngctaaatatggtattgtgatggatggaggttccagaacgtgttaaatatggtattgtgaccccccatctatcacaataccatatttaacacgtt

SEQ ID NO: 545369 - DNA, 223 bp, Homo sapiens
tttgggcccggggtgaaaaagggttaaaaaagatttttttttttaattttgggaaaaattccgggtttttttgtttaatttaaaggcagggggaaaaatttgttttcaaacccagggaaaaattttggttcatatattttaaggcaaattcccttgtagggggttaggcaaatttttttaaagggccccccggtttaaaaattaaacttttttggacttttca

SEQ ID NO: 545370 - DNA, 245 bp, Homo sapiens
ctcgactctcgagtatcccctacggccggtgctctagctactggtgatgctagaggtgatgtttaggtaacaggcagggtaagattgccgagttccttttacttttcttaacctttgccttatgagcatgcctgtgtttgggttgacagctcgagggttatcaattgacttgttggttgattgtcgatgttgggctgtttattgtcagttcagggtcttaatctgaccgcaggcttatgcggcgg

SEQ ID NO: 545371 - DNA, 326 bp, Homo sapiens
  misc_feature (48)..(48): n is a, c, g, or t
  misc_feature (244)..(244): n is a, c, g, or t
  misc_feature (259)..(259): n is a, c, g, or t
  misc_feature (268)..(268): n is a, c, g, or t
  misc_feature (271)..(271): n is a, c, g, or t
  misc_feature (292)..(293): n is a, c, g, or t
ctatgtgtattgattttttcctaagttgggtgtgcctgccttccaggnaaacaaacaaaaaaaaaaaaaacccaaaattttactttaacctgtatgtgtatacatacctgtgtatatataaaaggtcaatttatatatttttctatagaaatggagttaaaaacaaaaaaaggtttttttcccccccctttaattctcccatatttatttgtccatagtaaaatggccacattgatgataattnttccttttaaagggnaaaaaaaanccntttaaggggtttcttttcccnnttgggagattgtcagccctttgtctaaaataat

SEQ ID NO: 545372 - DNA, 310 bp, Homo sapiens
  misc_feature (252)..(252): n is a, c, g, or t
cagacctgggcggggctcccactccatgaggtatttcttcacatccgtgttccggcccggccgcggggaggccccgctttcattggccgtgggctaacgttggaccgacacggagttcgtgccgtttcgacagcgacgccgcgagcgagaggatggagcgcgggcgcggtgtgatagagcaggaggtgccgagtgattgggaccagagacaagaatgtgaagtcccaagtgacagcttacccagttgacctngggaccttcgcgctactacaaccagagcgaggcgagtctaaacatcagataattatgc

SEQ ID NO: 545373 - DNA, 461 bp, Homo sapiens
  misc_feature (29)..(29): n is a, c, g, or t
ccactcctgttgacagtgcgcctgaaggncgggcgtgctctcttggtgttgcatgctcgtgacactcaagaaattttgaactgatgagggaggaagactggggaaagaaagaaagcacacacaggtactggacagagggattctggtatgacctgtggctgtgaggtctcatatagcatatttataaatgttactcaggtttaaagtatttaaaatatagttacctaattgtaaataggctgttaaccaaaagagcttcccctcccccaagttttcttttatgaccactgatgactgcggctgtctcgacagtcatcttcacatctgctcccctccacagtcactagagggctctctaatgctttctaaaggagccaccacctgctccgtggccactcctgtcaccctgtctaattgcaccattcaagaagagcacaggcgctgttggacaaggcgcccac

SEQ ID NO: 545374 - DNA, 175 bp, Homo sapiens
atggctctggtattaaatctgggaggtggaaacctgcttacaggaccccctttctttgctgagatctttcttttcgctgaatacattccagccctcctcacccttcaatgcgtctacatgcctaattctttctggttgtgagacaagaacccagcctagctaaaaaacaacacca

SEQ ID NO: 545375 - DNA, 845 bp, Homo sapiens
  misc_feature (845)..(845): n is a, c, g, or t
aatcaagaagtggtggactttgaaaagttggatgactacgctctctgcctttcaaggtcatgatgtgggacttctgatgcctgggtaccaccagagggaaagctggggcggagggatttagatctgtgttgactcgagattatgtgctgaactctgcagagctggcgaaagctgaaaggtgcaaacatttcaacttgctatcctctggaggagctgataaatcaagcaattctttatatctacaagttatgggagatgtagaagccaaggatgaagaattaaaatttgatcgttactctgtatttatgcctgcagttctgatatgtgataggcaagaatctctcccaggtgaatggctggttagaaagttctttggctccttaccagactctagggccagtgggcattctgtgcctgtggagaccgtggctagagcaatgctgaacaatgtggtgagaccaatagacaagctgatggaactgctggagaacatggccatccatgacctgtggaaagcgcatggatctctcaagccatgaccacattgaagaaatgagtcttattgtcgaccttaacacccatcaccaaatttaggatttcacggtctaaaaaattcaacatgtttaacttatgtgtatacatcctacgctccattcaataaaactgatggtgtctgataagtggctagagcctgttatcatataaaccctcatgagcttggaaaataatatttgcaccctactaaacttattaaattttaggtggggaccaaatctgatttcttggtaactccctgtgcccggtccatgcctggtgggggctgttttatgcttgttcaagccacn

SEQ ID NO: 545376 - DNA, 1016 bp, Homo sapiens
ggaaaatgctcgtgttgaagggtggctcctcattgaatcaacgttctgaagtgcactcttgattgtggccaccctgtagaaaatggattcataggatgctgtcacgtctagtgcagtttttgcgagacaggatcgaggatgctcggaacagctgagaacctcgtgtggagggttgctgaccatcgaactcgagcacccagcaacgatcaacgtgacactaccgaggtgcctcttctccaatcggtattcgaaattagtctcatcctagaaaaattattagaacgaagatactagatctacgtgactgattgcggctgtagttgcgtaactacggcaaagatagttagcccaagttatcggtcaacttctcgagagttaacgcatcgactaagaagaggaggaagacgcacgattaaaatttccatcttatctgcgacaataattccgtagtgaggatcttgcagtcaaaattgcaaaccaaacatggtgagttatgtcctatggtattcattcgtagccatttgatgctagtttgtggccagatagaacttgtgaagagtcagaaggtacaaaggggggtgcgccttggtgcggcaagtcagtgtacttttgtcacttgacgtgacctatgaatgtgcttggcattaccctggttttttgatggctcgtgttctatactcactcactaggttggaatggagaagggttgactatgccgagcacggccgtgctccgagctggcggactgtgtgtcgtctctagtgctgggtgtgaccggtctgtgactgggtggcttccacgctgtgtggccggtcgtagcgtctccggcatgtcacagacttctgcgtgttcggatggcgctcccgttcgtgcctttaatggatagcggacgtttacaagatttcggggggacgatgtcaaccgcgtttcggccctcgcctctgctgttcgtccccttcttctgcccccattttggacctccttccaaaaacggccccggtggcaagggtggccct

SEQ ID NO: 545377 - DNA, 151 bp, Homo sapiens
gtgatagtcaattgggtgtgagcagtcagttatatgttgggattcgaagagtatgtgggtgtggagcttgaacgctttcttaattggtggctgctgtttagagcctactatgggtgtcaaatttattagctcttactctacgaggattttt

SEQ ID NO: 545378 - DNA, 299 bp, Homo sapiens
atctgcaagaggacatttagagcgctttgcagcctatggtagaaaaggaaatatcttcacataacatctagacagaagcaatctgagaaacttctttgtgatgtgtgcattcttcccatagagttaaaccttcattttgattgaggaggtttgaaactctctttttgtagaatctgcaagtagacatttggagcgctttgacgcctaccgtggaaaggaaatatcttcacataaaaactagacagaagaattctgaccaacttctttgtgatgtgtgctggcatctcacagatttgaaa

SEQ ID NO: 545379 - DNA, 1769 bp, Homo sapiens
  misc_feature (1)..(1): n is a, c, g, or t
  misc_feature (1223)..(1223): n is a, c, g, or t
ntgttgcgcgtctcatgattgatgatggtcgggctggtctgtcgacgagttgttgttccggcgtagcatccggttgcttcgtttggatcgacctgaatcgtctgtctggtgtctagtctcttgctccagtggatctccctcctctgtggtggtgattatgccgcgatatcgtcttccttttgggggggacgacacacacaatggcggggagctccagaacagagtggccacggatagctttccgccgactgttctccctctcttcgggtggaaagcgttcttgttcttttctatggggcgacacagtaacccgccctgagtggggtccattagggctcattactcacgaggccaccccttgtgggttgatctcacagctccccggtgcttttttgggaggataactcctctctctgcgctccgttaattattccccgggggggaaaatatttgggccgctctttgtggtggttctaccacgtccgactgggaggagcctctcttcctcccttggtaggatattcataagggggacaatcgttggttggtcttgcggccacactaatttaaagaggagtggttcacgccatgcctgtatgcgtttcccccacatggtgttctctgtgggtggcgccaccacatgtgggccgctcccctaaggtgtgtggaggagtgttccacccatcgggtgggccacacaagcctccccccaggtaaccacacctgtggggttttctgtctcggggggccccctcgtctaggatgaatgagtcctctccctcctgcttgttgttgccaccagagtcttttttttaggagggtaatttcacaccccgcagcgttgtggtagagattgttctctccacacagaaggggggggccacccacgccatcgtggtggaaaattctcctcttgtgaggagttggaaatatgtggccaacaccgttgggtcttctgctcagaaactttgtgggagagcaccccacaaagagttgggggggagactctcctactcggtgataatgactcccaacacgctcttgtcgtttgtgaaaacaaaagtagcggctcttcacacacattctttcctctccgcctcttttctctctcctatgtgggggcgctgtggtctcacacccccagcacagaggtgtgtgtctgcgacccaatagggcgcgagcgacatattttcgcacgacccccctgtgagagatgtctcttngtgatatatctccacacagagagaggaacacatctctgctgcatatctctctcgctctgtctctctgtgggagagggtgttgctccgcccaaatagtgttgcccaccagaggtgtctcgtgtctttgcacaggagatttgtgcggtacacccacacagtgtgtgtgcgcacactcaggtacaccccatattttaatccattctccacaggggtacacaaacaggagatctccggacccttgttcttgtgggagacaccgggatttaccacccttctcccacacttgctgaaaaaggtccaaggccctttttggctaatccaatctgccctttgtggctgctgccccctgtggctgctgccacaccacacacagctgctcctgcgtgctgctgcacagccccacagctaaaggttaaagcccaaggaagaatcggaggaatcggacgaggatatgggatttggtctctttgactaatcaccccaaagccacccacttagcccgttttatttgccaaacaccagggaataaaggcttactttccttta

SEQ ID NO: 545380 - DNA, 746 bp, Homo sapiens
cgttacttttgcaactgccacctatggaaagggatatgtcatagcgataatccatggggtgagacttagctacatgatgctaaccacgatgtacgatggagcacaacggaaggatttgggaatgaagttttgaaaatgtgtcgctctttgtatgaccccagccagatgctgcctccagagggtgtgaaggaactgtgtctgctgctgcttaacccagtccctcctgcgttccatctctgagaacttctcctcgagagcccagatgagcatctgcacgagatggccactggagccaaatcacggccagtcactacggtgaatgattcccattgtgacccagaacttccttttccctgctcctggatgcccagctgctggtgaagtgtgtctcccactcccttctatccacgtattgttgaccccacctcttggctagcctcccagcaagggcgctgggatgccagaggagctgggccagacacctgcgggaggccggcccatgaagccgaagccgggtctctccttctggccctgagggggactcacccaggccttccagaacccttccagtaccagccctccgcgcagcacagcactgggtgtgagggccccctgtggccctgctccttagccagaaaaagcatctggagttgaatgctgttccccagaagccacatgtgtatctgtccgattgttttccctggttccccaccaattgccaaattaaacctgtatggaaacgatga

SEQ ID NO: 545381 - DNA, 462 bp, Homo sapiens
gacggcttcaacggaacttttaattgtgatgtagggtgtaaattttggatctttcctgctttctcttggtgggcatttagtgctataaatttccctctacacacgctttgaatgcgtcccagagattctggtatgttgtgtctttgttctcgttggtttcaaagaacatctttatttctgccttcatttcgttatgtgcccagtagtcattcaggagcaggttgttcagtttccatgtagttgagcggttttgagtgagattcttaatcctgagttctagtttgattgcactgtggtctgagagatagtttgttataatttctgttcttttccatttgctgaggagtgctttacttccaagtatgtggtcaattttggaataggtgtggtgtggtgctgaaaaaaatgtatattctgttgatttggggtggaaagttccgttgaagccgcgggtaccgagct

SEQ ID NO: 545382 - DNA, 168 bp, Homo sapiens
gtaggagtgaggcaaggacgacaaggtagagcccaacaggacaaatcagttgggcctctcccccaggcggaccctggaggtgggcacggtgccattcaaacaacagacaggaaaaaagccccaggaccctggggacccctgtcaagtacaaccaggaccacatgaatg

SEQ ID NO: 545383 - DNA, 799 bp, Homo sapiens
aattgagtggggcctgcctgagtgccgccaaagcgggctggtgctgggagtgtgccattgccagctggtgtgcctggagctctgtgtgacatcacctggtgctggccctgcctctagtcttggtgtgcttgatgtgttgttgagtgccctggagccatttcttggtgtgcctggtgaggatccatcttgcactaggtgtgtgttgagatgatgaagctgcctgcatgccaaccatgggtcatgtgctgtgctcacagtttcctcttgctggcatgtaaatgtgctccacaaatgtgatgtttggtgacgttcacaacttgatgtgcttgctgcgtgacgtgcctgatgtgatggaccccaatgccctggacctgcctgagctgtggcacttgagtgcatgctggcttgactgctactgtgagtggaaagaagtgttgtgagcatgcccctgcagtgacccctggccagccctgtgccccagcctctgccggagccctctgtggaggcagagccatgttggatgcccagtgagtgcagtggctgcttgagcaagccacctgagaccttgcaactcagtgaacccctccagagtgccatggacaagtgctgcccctgactgacgtgccagggtgaaagcattgtgagtgagccgccccggagcccaagcaggagggaagaggctttcatagattctattcacaaagaataaccacattttgcaatgaacatgatgccactgtgcgtgacaatgcttggtggtcggactgctggctgcattggagctttagcaagccagatg

SEQ ID NO: 545384 - DNA, 518 bp, Homo sapiens
  misc_feature (124)..(124): n is a, c, g, or t
  misc_feature (172)..(172): n is a, c, g, or t
  misc_feature (175)..(176): n is a, c, g, or t
  misc_feature (257)..(257): n is a, c, g, or t
  misc_feature (281)..(281): n is a, c, g, or t
  misc_feature (307)..(307): n is a, c, g, or t
  misc_feature (334)..(334): n is a, c, g, or t
  misc_feature (365)..(365): n is a, c, g, or t
  misc_feature (434)..(434): n is a, c, g, or t
  misc_feature (452)..(452): n is a, c, g, or t
gcgtccataagaacgtagcccggagccttctgatggagcgtgatgccttgaagccccaactcgcccctgaccgagcggctcatccgaagcagctaccgtccacctcatgcagtgagcagcctgncgcctccaccctgcagaacctcagtggtggcgtactgcgtcagtcagntgnncaccgggttagggtcaggagacggccagagcatgtttgttagggctgttagagggtgatcttcagttttcaggaagtgggncacgggttaattttaaatgtgatncgaatctctttcagtctcgagaaggncaatgagcatttttcagcagtcacagncagtgtgagtgctgctctttccacctgcttnaaattctgtttcccaggggaatgtgctactgctggtggttcaaagttggaaggcaggcagaggtggggntgattctgctgggacagncttccagaagcagctcccccactgctgtcccgtcccacaggctgccttggatgactttatctttct

SEQ ID NO: 545385 - DNA, 375 bp, Homo sapiens
  misc_feature (310)..(310): n is a, c, g, or t
tttcggcacagaactggaagaaccaaagtaaaatggaaggggggattttttgaaattaaaactagttagtaaccaaacagacagatatatgccagattttttagtgccattcccaccccctcaaatccctccatctcccttcaacaccccctcctatccccgcaatgcagtgcaaagactggtatagctaagggcctatctatcaaacagattcaagatttgcaagcgtaagacatgtagggttagagttacctgcagcttgtgataggtacgtaataacatatgaacaaacgatattaacacctgtggntaggtgagtggtccaatagctatttttattgccatgttgttaaactattaatggacaaaaattgt

SEQ ID NO: 545386 - DNA, 367 bp, Homo sapiens
gactctgaggctccccgtttgactgtggaagccgtactctaaggtggatagtgatgccccctgggactccaggcctgagcaatgatccctcctcccaggcgttgtggacctggtgagctgcttacccgcttcattccccactggggaccccaatagtttatctcgatccagtacgggatcccattgtcttctccatacccaacaggccagtactgcatggtttactttatctggagttttatggcaggaagtactggaaaacaaatattcaaacagtaggtgatcatatgggacggataaacgcaatgacagtcctcatccatcaacgcctctttgaccgctttatagcaatgtcccacatgtcata

SEQ ID NO: 545387 - DNA, 619 bp, Homo sapiens
acttggaaaaatgtatcttaggttgggataatgcaggcaaaaccactcttcttcacatgctcaaagatgacagatggggccaacatgttccaacactacatccgacatcagagaaatgcaaatcaaaaccacaatgagataccatctcacaccagttagaatggcgaacattaaaaagtcaggaaacaacaggagctggagaggatgtagagaaataggaatacttttacactgtgggtgggactgtaaactagttcaaccatggtggaagacagtgtggcgattcctcaaggatctagaacaagaaataccatttgacccagcaatcccattactgggtatatacccagaggattataaatcatgctgctgtaaagacacatgcatacatatgtttattgcagcactattcacaatagcaaagacttggaaccaacccaaatgtccatcaataatagactggattaagaaaatgtggcacatatacaccgtggaatactatgcagccatacaaaaggatgagttcatgtcttccgtagggacatggatgaagctggaaacatcatctcagcaaactgtcgcgggacaaaaaccaaacactcatgtctcactcataggg

SEQ ID NO: 545388 - DNA, 417 bp, Homo sapiens
  misc_feature (54)..(54): n is a, c, g, or t
aattcctctgtgaagacccagctctttctttggctccttttttgaagccatctntgctctgctctcctctgctgcccagaaagttccagagtgaagctcagctctagatgaacaaaaactggttgagtccagagatgcctgagttggagatgaaccttgcaaactttcctcattaccatactaaaaaccccacccaggaaggagcttatctgccatttcctacacatgtgacatatggagaagcatgatcagctacttcacagtctctgcctttactctgcctccgcatacaatggctcagccaactagcctaacgaaagctgttttcaccattgtttgggaggtactgctttgggaaactgccccagctgtcctccttacttgttgtaggtaataaaatccctttgttaaatctta

SEQ ID NO: 545389 - DNA, 134 bp, Homo sapiens
ctctcgcaggctcccctggctctcaccccatccctcccacatctgcagcacaggtcagggctgcccagcttctggctggccgcagccacttccaagtcactggcaggccagtgtgggggctgtgggcagcctgc

SEQ ID NO: 545390 - DNA, 1521 bp, Homo sapiens
tattattattatttatatattattatattatatatatttttatatgagaggcaaaggggcacagaacgcagacggggaggaggtaagaatcgagggcgccacacacaacacaacaacagaagagcaaggagaagaggagaggggagagtggagagcaaggagagaagggggtggccccagcaggacaacaaacacccgccagagggggcgcaaggagcgacgaggggatgtgcaacacacacaggaggaggcgagcacacagagagaacacaccaagtggagacaccgcgagaacaaaaagagagcgacaatactaatcacgaaggacacaggaggagagacagaaacacagagaagggagcagagaggaggagaggaggaggagcggcggccaaaaaggatagaacaacagagagggcgggcagcgaacaaaaacacagaagcgagaacaagaaaacaccacacgacgaggactgaccaaaaaaaaggagggggacagcaaaaagaaaaacatactcacaaagaaaacaacacgcgagaggcacggaggaaagacaaaaggagagggggaggggaaggaacgtgaaaagattgagagaaggagagagagacggaaaacaacaaaaaaaagaggatgagcgacacccacgaggagcacaacaagagagagaagagggatggaggaaaaagacaggaggagaccgccaccgccaaagagagagacgaaaaaaaagcaaaagaacacacaaacggagagaagaaaaaaggcggagggatggaggagaaaaagaaagaataagaaaaaagtaaaaagacaatgagagaaaagaggagcaataagaaaaaacagaagaaaaaagaagaacagagggggaagaaaaaaacggtcaggcccaaaaccgaacgcggaagaaaaacaaagaagaaaaaagaagaaaaaaaaaaaagacaaaacaaaaagaaacaaagaagaaaacaaaagaaaaaaaaaacaaccaacaagaaaaaaagaaaaataggtaagaaaaaaacgaaaagagaaagaagagcggagagacaagaaaggaaaacaaaagagaaaggagaacagaaaacaagaagggagagggacggaaacacaacaacaagatagagcgacgggcaaaaaacagaagataggaaggagagcgagggagagaagaacaccagagacaagaggtgaggagcgcaaaggaacagtacaacacacaaagaagaaggcattcagaagaaggaaaacaacagaggacaagagagacggggaggcagcccagcaggggaagggaaaacccacacccccagagcaaaaacaacaaaaagcgaagcggaccactacaaaaacgaaacacgaccggcaggagagaagaaacacggaaggctaggaaaaagatgacaggagagaacgagccaaacacagcgcagaagacaaacagaaaggaatgcaagataagatagagagacagccgaaacaggaggatgagcaaaacgacacaccgagcggaa

SEQ ID NO: 545391 - DNA, 578 bp, Homo sapiens
gcttgtaagatgccttgaatatgacaaaagctttaactgtagctcagatcttattgtacatcagagaattcacatggaagagaaaccacatcagtggtctgcgtgtgagagtggcttcctcctaggaatggagccttcgttgcccaacgagaaaatgagaactcaagacagaggagctacagcgtataatatacactgtatgtgataaagagcttcgcacctagagttcagcgcgcttcttctagactagtcagacagtactagcgattgtgtgaaaaaccggtttgtctgtgaatgtgagtgaaaaaggtcttgagcttagcccgtccccagtgcgtcagaagcctcagagatgtcttgaccaggcgagaagctgtaataccaagtattaaaacagttcatttatgtatcagagaactcattaagatgaggacgaaatctcagacttgctcagagctcagaattcagtggggaccagagagcctgcactgggaaatatgagaaattctttgcccagagagctgcctaaagaacagttcagacctcatccaacgagaaatctacagatgcccagaggt

SEQ ID NO: 545392 - DNA, 588 bp, Homo sapiens
atgggtttgttggttgggaatttgagaccagctgaccaacatggagaaaccccgtctctactaaaaatacaaaattagccgggggtggtggcacattcctgtagtcctatctactcagtaggctgaggcaggagagtggcttggactcgggaggtggaggttgcggtgagccaagacgtgccatcgcactccagtctgggcaacaagagtgaaactctgtctcaaaaaaaaaaaaaaaaaaaaaaaaaaaccaagcaaccccttaggggtttgctgtggtggggaattgggtttaatggagaaaagatttttttcaaagttggtgtcggagggggagggtgaggttggcccatggttctctgcgggagggcccgggcataatctaggaagtaaatccagttgcacgatgaggaacactttagcttgggggatcaaaccaggaatatgattctgtaattataaagctcattgccaacccaaaagatatgtttctgaaaacctgtagtttcttaatttaggtccatcccctttattaactctacagttgggactcacactgatcccaaatttttaagtggtaattattaa

SEQ ID NO: 545393 - DNA, 551 bp, Homo sapiens
agcgtggtgctgagggggcgcgggcggaagggcgcggagcggcgcggagccgggcggtcgggccagagagagccgcggccgggagctcgcgggctctgacaacctcctcccctcgggcggacgacgaccacgggactaggcgccggtcatggcggagcacaaacccggcgcggaccctagcaccaccgatggagcgggacgaaccgccgcctagcggagggggaggcgggggggtcggggggatgcggggcgtcccggggcggtgccgccggggcgcagcggtgtctgttcgcgatgaattgggagagcttggcccaggcgacgtaatgatcggacggtgagcaacgaacctgtctcagtgtggggaccgcgcgacgaggcttgcactatgggatcatctcctgtgagggctgccaggggttgcaagcggagcattgcaacagacgggtatatcgatgcatcgtgaccagaactgtgtcatgtctcggaagccgaggaacaggtgccagtactgcgtctgctcaaatgcctccaatggggatgaaccgaag

SEQ ID NO: 545394 - DNA, 348 bp, Homo sapiens
gacatcagaatcctcagtgaagcactgtacttacagaattcaagaccagttcttcaatttgacatttaagattctaatgccaggcacagtggctcatgcttgtaatcccaacacttaggtgggaggatcacttgagtctaagagtttgagaccagcctggacaacatagtgagacctcatctctacaaaaagaatcaaaaaacttatccaggtgtgttgattcatgcctgtgatcctagctactcagaaggctgaggtgggaggattattcgcaggagattgagtatgcggtgagccatgatcatgccactgcactccagcctagatgaaaaagcaagaccctgtaga

SEQ ID NO: 545395 - DNA, 167 bp, Homo sapiens
ggccggcggggacggggaagacggagaccaccaaggacttggctaaagctcttgctgtacagtgtgtggtgttcaactgttctgatgggctagattatctagcaatgggaaagttttttaaaggattggcttcttctggcgcctggggctgcttcgatgaattcaac

SEQ ID NO: 545396 - DNA, 335 bp, Homo sapiens
tcacagcgtcttcaccagctagagaacagcacatctcctcacagctctgaaaactggaagactgggcaggctgcggtggcctcacgcctgtgaatcccagcactttgggaggccgaggtgggtggatcacgaggtcaggagatcgagaccatcctggctacacacggtgaaagccccgattctactaaaacaatacaaaaaacttagccggatcgtggtgcgtgggcacctggtaatcccagactatttgagacacatgaggcaggggaaatcgcgttgagccataggcagtgccaagacccagtctggggccattcacagtcgcagacgcctgt

SEQ ID NO: 545397 - DNA, 231 bp, Homo sapiens
gtgagggagtgagatatgcctctgagaggacccagtacactggggagtgatccgctcagagagacatcacgattgtgcacgcgccgatacaggaagtgctccgtgaaagagcgtccttgagtcagcaacacacggagcagagcaagtgggaagatggtgagtggatggaagacggaaccctgcaagtgaggcggcatgggacaggatcttggtgccagcctgtatgagtgt

SEQ ID NO: 545398 - DNA, 597 bp, Homo sapiens
cccaagcgtactggctcgcgcagtctccgcctgcagtctcaggcatgcagctgcaggactgagcgcgtgcacccggaggagacccccggaggacggcgacaaacttcgcagtgcgcgcgaccaccccagccctggctgcagcatggcccagctgttcctgcccctgcgtggcagcaccatggtcctggcccatgagctcctgcagctttagcagatgttctggcaagcgagacacgctcacaggtgaccgcgcttttcgcgtgcgcatcgcgggcagacgcgccacctgcaagggcgtgctcggctggcgcccatcaccatcccttgccacgtccactacactgcggccaccgacgagccgcccggcctgtgctgggctctccgacgggtcaagtggactattcctgtcccgtgggccgggaggcagaggtgctggtggcgccggggagtgcgcgtcaaaggtgaactgaggcctaccggttaccgacgtggcaactgacttgcgtacccagcgtacgcatcaaccgaacgatctccctgtgctgctgagcggacgctgcagccacaagcgaactcaggtatactaatccgctgtga

SEQ ID NO: 545399 - DNA, 365 bp, Homo sapiens
actacatacttccgactgaaccatcattcttgccatggggttttccaagctctataccataccaatatcctggggcgaagttggtggccccaaagaacctaagggggcccagcctctgtcctaccactaacactctctttccgaggcggagttccccctcgcaacggctattatttgcgtgagatgttgctgaggaattcaaaccagcactggctctggatgaaagggaagggctttggctcattgccttctggttactgctgatggcattctgtttctgggggtagctctgtctgttccaaagaagatgtagaggagcagctgctgacagatccaagagtgccaccccggaggtatgtagtcgg

SEQ ID NO: 545400 - DNA, 257 bp, Homo sapiens
  misc_feature (55)..(55): n is a, c, g, or t
  misc_feature (74)..(74): n is a, c, g, or t
  misc_feature (158)..(158): n is a, c, g, or t
cccaggctgggttccccttccaagcttggaataaggcaaagggggaccttggggncgctctcaggcttttcccntgcaacatcccaagctgtggtccccatgaaaatactgaggaatgtgggctgtctctcccctttccaagaatgtggggcccccangcctggccagacaagaaagactgtcaagaagggtcggagtctgtaaaaccaggcaacagtttgcttttttcacattgatcatttttatatgaaataaaa

SEQ ID NO: 545401 - DNA, 941 bp, Homo sapiens
attaaaaaaacaggatgtaaggtccttctcatacagaagtctattcttaagagatgctcttagtgatcttgcattacactttctgaactaaagatgaacgatcatggtgattaacggatattgaaagagaagacattgaattcatcttgtagagacaattggaaccaaggcgcagtggctcatattgaccaattttactgctgacatgctgggttctgctgagttagctgaggaggtcgactttaaatggttctggcgaaactgctcaagattacaggcatgtgccagacccaaggagaaaacagttacaatagttgttcgtggattctaacaaatcgtggtgattgaagaagctgagcgctccattcatgatgccctatgtgtgattcgtgtgtagtgaagaagagggctcttattgcacggaggtggtgctccagaaatagagttgggcctacgattaactgaattattcagcgaacactgagtggtatggaatcctacggcgtcgtgcttttgcagatgctatggaggtcattccatctacactagctgaagaattgccggcctgaactcccatttctacagtaacagaaactgaagaaaccggaatgcgcaggggaaaaaactggaggcatcactgtccgaaagggtggtatgtccaacatcaggagggacctggtgaccagcccagtggtatcaggcaggcctgaacccagcaaggaaagtacggagaatacgacaaatcactaggtggtaacctcaaaaactgtatacggaaacacatttatgatcccagctgtgctggcaggcatagaacccgggtcctgatgaaaataaccacagaataaggagggccaaagaatggaccaagggtgaaactgcgagcaaaatggacacagaataaacaaaggagagaggaaacaaaacagaacaacaaaaac

SEQ ID NO: 545402 - DNA, 241 bp, Homo sapiens
ttaggccatgttgagccagttgaaacttggactcgtccggtggtgatacttgtggttcgtagagtaaagtggggtcggtgagatggagacaaaggcgcagagacggcttatgtatccatggacaggagcggactctctcatccccgggtaacggagagttgtagtgggttacatattgattaggcattgcaagatgaagaggagattgtgtcggtgatttgcagtgatgggtcatgcagca

SEQ ID NO: 545403 - DNA, 237 bp, Homo sapiens
cagatgtttcaaataacttcattcacaataggtaattaatgcactacgagttcaaattaatctttgtaaagtaagtgttccctttatttttttcaagcagccagatattcaaagtctcctgtattgcttagtaagtgcactaccaaataggcaaatggtgaatgactttaaagttttctgggcctgttagcacccatgggcatcttggctaagcatgggttattacctgtgttccct

SEQ ID NO: 545404 - DNA, 213 bp, Homo sapiens
  misc_feature (113)..(113): n is a, c, g, or t
  misc_feature (130)..(130): n is a, c, g, or t
aaaagatctcttacttggagattacctggtccttccttctatgctcttacgtttcaggtaggaaattccaaaaatgaaagaccctgtggcgttaggaggggaggagagcaagngctggcacagccagctnggtgtttcctttcccggccctccctcctcttccgttcctccctagctttccaattctctccccttccttctttctctttcttt

SEQ ID NO: 545405 - DNA, 699 bp, Homo sapiens
  misc_feature (643)..(643): n is a, c, g, or t
tagtttttatttcataatcataaaccttaactctgcaatccagctaggctggggagggaccaaggaaaactgggaccccaaggggaactggcagccgagaagcacaaagaattctaggattacgtggcgaagccaaatgtgggggtgggagggggtgctccctccgtggagcctacagaagaggaagtgactcgtgggtggtttaagattaaacacacaagttcaacatttatctcgagttgtgctccacgagctcagcaagtgggtgactcttctctgtgggagggctcttgtgccattctccggtgagaccccaaaaggcggctctcacatgtggcctctccaacaatatattctcatgtgccttctctatatctcacttgtggcgcaaaaaacacacaacatgtgctgtgtgccatctcacaaaccacacctctcaggctccgtggggcagtgtgacaagatgtgaaaaaagcgtgtggaaacccattgtgtggtggtgtggtgctccacgacattgtgtgccctatgggagcaaagatgcgccagggacccccggtgtatgcgctcttaacgagatggaaatgtcctcctattcttccaatattgtctcccccctataatatggggatctttggccacncatgtgggcccttttggggcgttgtggaatgtccccaaccctggacatttaaaacc

SEQ ID NO: 545406 - DNA, 231 bp, Homo sapiens
gaatcttaatgttccttttctgaatttacttatgctatgtaatgtcatgtacaagctatataaaaaacagcttttgtggacagaataagacatcaatgttatgttttccaagcatgtgtcaacgatgtgtagctgtccagcataaccctctttaaacaactgtaactattttgacttgtatatgagtagcgtgctcaaaacgaataaactgacataaagatgcttaacatc

SEQ ID NO: 545407 - DNA, 363 bp, Homo sapiens
gccccaggtcaaccgcacgcgcctttggcacaatgaagtgcgtaaccgatatgtcccttctttgtctctttagctcggcttatttcaggggtgtgtttcgtcgagatgcacactgcagtgaggttgctcatcggttgatagctttgccagaagaatctttcaaggccttggcgatgattgcctgtgctcagtatcttcagcagcgttcatttgaagatcatgatccatcagagactgaagtaactgaattggccctttatggagacaaattatgcacagttgcaactcttcgtgaaacctatgctgatatggctgactgctgcgcgtatcaagaacctgagagtgtgcttcttgcatcacagg

SEQ ID NO: 545408 - DNA, 296 bp, Homo sapiens
  misc_feature (89)..(89): n is a, c, g, or t
gcactcggttatggcttggacagcgctctctgcagctcggcttggattcctgctcctcctcatactgtcccgcagcaggtcacagtcgntgcgggaagactgcaggcatgcgccaggccgttctttggttttatctcctcctcaagttgcctctttaattcttcaatctgtatgagtaaacggcttgtattgcctccttggataactttgagaacaccaaggaggcttttccctttttttttttttccaaaaaattttcccccaaaaaatttccaaaccccttggaatggttcacg

SEQ ID NO: 545409 - DNA, 862 bp, Homo sapiens
  misc_feature (116)..(116): n is a, c, g, or t
  misc_feature (309)..(309): n is a, c, g, or t
  misc_feature (329)..(329): n is a, c, g, or t
  misc_feature (353)..(353): n is a, c, g, or t
  misc_feature (363)..(363): n is a, c, g, or t
  misc_feature (374)..(374): n is a, c, g, or t
  misc_feature (425)..(425): n is a, c, g, or t
  misc_feature (496)..(496): n is a, c, g, or t
  misc_feature (499)..(499): n is a, c, g, or t
  misc_feature (522)..(523): n is a, c, g, or t
  misc_feature (544)..(544): n is a, c, g, or t
  misc_feature (566)..(566): n is a, c, g, or t
  misc_feature (612)..(612): n is a, c, g, or t
  misc_feature (616)..(616): n is a, c, g, or t
  misc_feature (628)..(628): n is a, c, g, or t
  misc_feature (670)..(670): n is a, c, g, or t
  misc_feature (695)..(695): n is a, c, g, or t
  misc_feature (713)..(713): n is a, c, g, or t
  misc_feature (745)..(745): n is a, c, g, or t
  misc_feature (753)..(753): n is a, c, g, or t
  misc_feature (769)..(769): n is a, c, g, or t
  misc_feature (785)..(785): n is a, c, g, or t
aatcttttatttttttcctttcattttctttttcttaaaaaaacaaaatgaaaccaaaaaaaagcctgaatcaaaacctttttaggagtggttacagaaataatagggatgggggnggggggcactaaaacaaaagagaaaagcaccagtgagaagtctttcccattttcttctctccgccacggaacacgcacaccaacagagcccaggccactttttgccccctccccttggaaaaaggaggaacagaagaattaagaattttgaaaggatttttttcttgtgtgaatgtgtgttaaagtcaatgcnataaatctaaaacgagggcngtgtttttaaaaaagtactaaaanaacaggaggnaaacacaaggnaagaaaccccccgcggagacccgcctccctacagagggaggccctcttggnggagagtgtgaagggcagagggccccccgcgccggcagggcccgcccggccaccccccacccccctgccancanccctcccctctccttttaaaaannaaaaacccactcttgggactngggtcgtcctccgatccctgcnggaaagtgcggcggctacttggcgtcgagcttggccatctcctgcncgtngatgccgaagcnctcgctgtcgaagagcagggagtacacgttcttcagcgaggncgcgctcgagttaacaaagtgggcngagaaggctttgagggtnaccgggccgcagtttgtttgggaaagcagttnctgccgcnggggaaaggcgggacncgacggacttaagctnctcgtcctccgccgctgacaggcagtttttgatggtctcttcaagctgtgcttcacatttgtcggagcccactgagg

SEQ ID NO: 545410 - DNA, 302 bp, Homo sapiens
  misc_feature (117)..(118): n is a, c, g, or t
  misc_feature (162)..(162): n is a, c, g, or t
  misc_feature (282)..(282): n is a, c, g, or t
gctctgaggacagcctgtgatttctgccttgattgccttccgtaaatatgctacgtgcttcagtctcctggcagatgatagtcaaacatcaacctctatctttgccagtcccacctnnctccacctgtcctaggggagctctgtcctgcaaggataacagcntttgaccctgaataactggtacgtgcacgctgaacacggaagacaatggaaacgtcaactcttcagcacttcccacgcatcctctgacccacgccagctccgtgatcagctcatccactnattcagactacatccacgca

SEQ ID NO: 545411 - DNA, 916 bp, Homo sapiens
tttctcggcgtttggtggcccctactctgtgaggcggctccgtgtcgcctccgcctgtgtccaccgtatcgtcgtggagtgcacattcgccgttgggcctggcgagttttctcttggagctcgtgtcccacattggtctgcccctcccggctgttagcctgccctgttctctccgtgttcccctgtggtctcgcttttttccccgcttctacggcccgtgtggtaacgggcggtcccactgggcctgagcttgtgtaataggactccccgtaatgaggggaccaacctttgtgaacaagaaaggcttgggtaatcgccgtaagggttggggcccctgtgggggcaaactttgtggaggtcgtgccgccctttttttttttttttacatcgacaagcatcgtttatttatgtgcaattttttacaaatacaaacactcacatataacagcataatgtcaatatatgagatgacagctaaatgcagcatcggtgacttttttctcttcaagaggccatgattcccatttctagtaaaataaagagactgcatataggtagacacaggtttggtcattagcttcacaattttgcctagaaatgatctataaatgcatgttccccccctgctacttaccataatagtgtaaaaagggagttaaaggaaagtttccttgttggttcctaccatatgaaagatgcctatattctattttagcagtgcacaatatatggaaaatatttaaattaaatgttattacaaaaatgaagcagtaatgagattctggcaaatgagggcactaaatgagaataatatatattgaaagaatccagaacaaacaatacaaaaagacgttgttataaaaagcttaggtgcacagtaagatataggtacttttccaatgttactttacatact

SEQ ID NO: 545412 - DNA, 82 bp, Homo sapiens
aggcccccatgccctttccccaaaaaccaaatggttgttacctgccccctttttaacctttggccgattttttctgtgttta

SEQ ID NO: 545413 - DNA, 104 bp, Homo sapiens
agtgaactgctccggtgctgtctgcaggacaagagcagactctgttctcgtcagctctaaaaggctctcctcgccctggtgcagcgtccgaggtgatgtccacg

SEQ ID NO: 545414 - DNA, 99 bp, Homo sapiens
  misc_feature (53)..(53): n is a, c, g, or t
  misc_feature (97)..(97): n is a, c, g, or t
cctaatcctcctgtctccttcgggggaggctggatgagggattcaatagacangttgacctgtccaagtcatcagctaataaatgttaaatcctggnct

SEQ ID NO: 545415 - DNA, 179 bp, Homo sapiens
ggaaccagcgttaccctgcgcacatggtgaccccgatgtatacaaaaacacacaaaaattagcagggtatggtggtgcacaccttgtagtcccagctacttgggtggctagaggtgggaggatccttgaacctggaaaggtggaggctgcagtaagccatgattgcactactacattcc

SEQ ID NO: 545416 - DNA, 541 bp, Homo sapiens
cggacctatctgtgttcgggttgactcacaatgcccaggctctctcagctggggccaggggaaggcgctatgtgcaggcaggcgagcccccaaatggggcttagtctgggagggttctggcttcttcacccaggaaggaattccagggcaagccagtggttttagacagcaacttttattgacacagcagtgcacagcagcagcagaggttctgcttcttgtggagtggggctaccccataggcagtgtgcccagagtagtagctcagaggcagtgctgcagtcatatttatatgcacttttaattatatgcaaattaaggggtagtttatgcagaaatttctaggataagggtgttaacttttaggttgttgaatcattgccatgaaaagggatggtaacttctgggtgttgccatggcaatggtagattgacatggtatactggtgggtgtgtcttatggaaagctgcttccgcccaggacctgttttagctggtcctcaatttggtctgtttcccaaccccgaacacggatcggggat

SEQ ID NO: 545417 - DNA, 322 bp, Homo sapiens
ttgattttccccttccaacagtcacatccccgccccgcggcttttttgttttgttatgttttttttgagacagactctcactcactctgttgcccagattagagagcagtggtgctatctcggctcactgcaacatctacctcctgggttcaagcaactctcttgccccagcctcttaagtagctgaggtggcaggagcccaccaccataccccgctaatttttgcattttgtttttctttgagacagagtcttgctctgttgccaggctggaagtgcagtggtgtgatcttggctcactgcaacctctgcctcctgtgttc

SEQ ID NO: 545418 - DNA, 283 bp, Homo sapiens
agatatttgtgtaaaaaacgaatggggcagggtgcagtggctcatgcctttgaataatcccacactttgggaggccaaggcaggtggatcgcttgagccgaggagttcaagaccagcctgggcaacatagtgaaaccttgtctctacaaaaaaacacaaaaaaattagccgggcatggtggcttgcacctctggtcccagatactcaggaggctgaggtgggcaaatcatttgagcccagggaggtcaaggctgcagaggggaaaaaaaaaaaagaattgaaa

SEQ ID NO: 545419 - DNA, 156 bp, Homo sapiens
tagaggacccctttgcgggccctttccttttgcggccctttccttctgtaggtttacgatgcattgttatcattaaccaggcttttactactaaacttaaatggccaattgaaacaatgcatcgtaaaaccttcagagggaaagggcaccgcaaaa

SEQ ID NO: 545420 - DNA, 160 bp, Homo sapiens
tgtaatttacatattttacatgatgagatatgaaggtgcaacactaagagccgcattctgctgcgtaacaaacgatataaaacactagtttcacatatttctgtgctttagcaaatttactgacctattaattgtatgttctcaataatgccaagataca

SEQ ID NO: 545421 - DNA, 360 bp, Homo sapiens
  misc_feature (1)..(1): n is a, c, g, or t
  misc_feature (311)..(311): n is a, c, g, or t
  misc_feature (331)..(331): n is a, c, g, or t
ngtatattttttccaggagatgcttggagtgtaaagatcccatggtcacataaatccggaaagcactgaatactttgtttcccataagagaatcccattatatgttgatgtattaaaagacctgagaacctggtgtaagtaacttagttcaattcagtatttcccaaatttactagactatagcatcctttttttttttaagaaaaaaaaaatcttaatttttttcctttaacatgtggcacaaactgacttctttccacatttatttatcttactcaaaataaggagatatgggacaacttctggaaatnggggatgttatacccccatnaaaacctactttcccatattggctacggc

SEQ ID NO: 545422 - DNA, 648 bp, Homo sapiens
  misc_feature (568)..(568): n is a, c, g, or t
gcctgcccggaggactggctgctctacggaaggaagtgctacttcttttccgaggaacccagagactggaacacaggcaggcagtactgccacacccacgaggcggtgctggctgtgattcagagccagaaggagctggaatttatgttcaagttcacgcggagggagccctggattggactacgcagagttggggacgaattccactgcgtcaacggtgacccgcttgatccggacacgttcaccatcgcacgtccaggggagtgtgtcttcgtggagcccaccaggctggtgtcgacggagtgtctgatgacccagccctgcgtgtgcatcaagatggcctatacttgacgtgcgtggtgccagaggtgacctcatccctatgcctataggaggtatctagtatctgctcaagacctgcttccaacacaaccatctaccctctacaaggccatacattggctacattaccttcaccccatacccctctcccaaaccctaacactcttaatccgtatttctaacctactctatcttcatacacatcatagtacctcaacatgtacantctcatatactacatactttaaccatctagctactacacacacacacattcatacttacactcactcacatactctatct

SEQ ID NO: 545423 - DNA, 98 bp, Homo sapiens
  misc_feature (69)..(69): n is a, c, g, or t
tgtcctaatcaaagttagttttttgttttctggtttgttttttttttttttgtatattgatgaatgagntcttacctattaaatatattattggataa

SEQ ID NO: 545424 - DNA, 358 bp, Homo sapiens
cttttggggtctttgctgcacttaagcattaagacttctaaaaaaaaaaaaaaaaaaccccccttccccgcttttcatattgggggaaaaacggcttcacttacaggtttcaagacaacccactgggtcatcgaggggtccattttttttttcaacagggggttgaggagatttgcctctgaaagacaaaattgtctcctgatacagctttccgatcaacgaacgaataggggttgagtaaaactaggggagcttcctatcccggctatactggtgctcttaaagggcctcaaaatatccacggccatgatcttttcggggtctttaaacacccctttttttatctccgcctttctgt

SEQ ID NO: 545425 - DNA, 133 bp, Homo sapiens
gtagctgggagtacagctgcccaccacgacagatgggtgagttttgcagctgagtagaggtgggattccacgatgtagcgcagcctgctctagaactgctgacctgaggtactccacccgccttggcctgcca

SEQ ID NO: 545426 - DNA, 143 bp, Homo sapiens
gaggatacccccgagtaacagtagatggtattattccttctaggcatgatacaggaggatatgaggtgtgagcagatatattagtattcctagaagtgagatggtcaatgctagtataatatttatgctgccggtgaaactct

SEQ ID NO: 545427 - DNA, 295 bp, Homo sapiens
catgatgcataaataaatcacattgcttccctcagactcttcagcctcatccactgaattcattcagaatgtggaatggatattgagacaaggggcagggagaaagcaatggccaagtaatgcctggcacagcgtaggtattaaaaagcgtttgccacagacatgtattgaatgaatgcgtacactaatagctcaaactggagttgaacacctagctgatgcgaacgtataattgtccctccggctccagtgagagttatgaaggattttaagatccaaaggcgtctttcttttg

SEQ ID NO: 545428 - DNA, 1121 bp, Homo sapiens
tgtgggaaaggctttggccagagctcacaccttatggagcatcagagaatatcacactggagagagactctacgtctgtaatgtgtgtgggaacgacttcattcactattcaggtctcattcgagcatcagcgcgttcattcaggcagcacacaagcccttcaaatgtgcgcagtgtgggcaaggcgttttgtccacagtatcagcacctgcattaggcacccagagagtacacgaccagagcagcaagaccttttcgcaatgccacaagcagtgtgggcaaaggctattcagatcagagctccttcacttcatctcgccgatccagcaggcattcgaccaaggagagaaaaaggcgcctatgccagtgccaatgaaatgtgggcacatccttccatcaaggcagctcgagccgtccattcgcccattatccagcatccgacacagcaagtgcaaacagtatgcaaatgccaaagaaatgtagggacaggccattccgataaattcgccatcagaaccctatactttgaaaccaaccaggagaagtatcagcaccggtaggagaagaccccttatgaatgccagatgacgtagtgggacaacgaccgttcaatatcgagaaagattcaaacgcatccagttaccaaggactacaggacagagaatcccagtaccttggcagcggaagcagggaccttataccggtatcgacacactcggaccgtagttaggagacaaagccgggtatacacaagaccaaagaacagtaggagaaaacaatgttcgacccccacgacaagtcaactgcacgaccagtgtccacactactagcgacagacgacaaccattcctcaactgaaaacatggatcaaacagcataggaggattgcaaggcaaccaagccaatatccgcatattaccaacgcagaggtatagcacctcaaccgcttcaaaataactcggaacctacacaccagggcaaaaccacacgcacccaggaacctgagcggaccgacgacggaccgacgggtcaatggacaaggggtcacaggacactgggtcggggggaacacggagggacgaaacgccaccgagaaagagacccaaaacaatccaccttca

SEQ ID NO: 545429 - DNA, 392 bp, Homo sapiens
  misc_feature (110)..(110): n is a, c, g, or t
  misc_feature (142)..(142): n is a, c, g, or t
gctcgacctgggcgcattcgctgggctggtgaagatgatggtcatgcagatggagcgccgcctggatcaacgctttgccctcacagacaaggacagcgagcgcttgcgancgtaggaaatttccgttgagcggctaccggangacatgccagtgcactacgtacgccgggaggactacgtgcgcggccaaaccgtgatcgaggccaagcttgatgccttggcactcaagctagaaaccgtccaacttaaaggattgaagtaatgaacatcgatgccgccaagacgcgccgggagtccctgcgctggtacatcatcaagaccctggacgcctcgcggccggtagatccgcatgaagctgttgtgctgtccactatccagggcatctaccgtcg

SEQ ID NO: 545430 - DNA, 168 bp, Homo sapiens
ttaacttggtcgataggaccttgcacctcaagtagtgagacaggccatgcctaaacaagtgcatgcagcatcgactgatatcatcctacaagtttcctgcacagtgcccaccaaaagtaatgtcacagacaagcctgagcagaaagtgcagacatacaatactacatg

SEQ ID NO: 545431 - DNA, 225 bp, Homo sapiens
  misc_feature (5)..(5): n is a, c, g, or t
  misc_feature (67)..(67): n is a, c, g, or t
  misc_feature (81)..(83): n is a, c, g, or t
  misc_feature (109)..(109): n is a, c, g, or t
  misc_feature (120)..(120): n is a, c, g, or t
  misc_feature (158)..(158): n is a, c, g, or t
gtatnagaccaggctgagggcacgccgctactacagcgtcactgtcgatggctgcacgagtcacacnggagcctggggcannnagtgattgaatacaaaacaccaaganctcccggctgnccatcatcgatgtggcccccttggacgttggtgccccnagaccaggaattcggcttcgacgttggccctgtctgcttcctgtaaaactccctccatctcagcctg

SEQ ID NO: 545432 - DNA, 865 bp, Homo sapiens
acatttcccattctaggataccgaaatcggtaatctgtaaataaataagcatttgaaagctggatttcatataaagttcagtgtcacattgttcaatgacaataaatggatcaaccaatacatacatgtgcgcttggtcaccgatctgtattacctagatcacgaaaaggaatgtccacagataaattacagtgatcatttcttctggagtctaaagaagaataacgataatctcccaaataactagtgtcagtttctcctagttctcaggcattatctttgatgtcctccctccaaccagtggccaattttaaagtacaatatattctcttttagtgaaatcagcctggtctgctacagaaagtatggaaatatatgcgtaaagagatatgcattctagtgctaattctggctttatgtcattgaccttacatacttttctccacttccgcctttaaaatattgttccagctccaacattctaggattctacaatatctattttcatctccctttgcccccacagataactcctaattaatcttagaaatctattcactttcctcatttaattcttattttcagaagctttcagttgctcttaatttccagaaggtaaggttagctctatagcctggcattcaatattttagttacctagtccatgagataatactagttttacgaaataaattcctttttctggtcatttgggctgggagatggtttcagccatttctactgcttaagaactactgcgactggttattccacgacaagggttgccggcgctacactgggaggggggaggatatcctgaaccggggggtgtgtggccaaaggcgttcccccgcgaggaccttct

SEQ ID NO: 545433 - DNA, 880 bp, Homo sapiens
tggaaaaagtcttggaggccagggggttggtttgaaaccagcttgggggggttcgatccctccctttttggtctaaatttatgtatacgggtcctccgaatgtgtggtagggtggggggcatccatatagtcactccaggttatggagggtcctctctactattaggactttccgcttcaagcgaaggcttctcaaatcatgaacatttattaatattccggctgttagagaaatgaatgaccctacagatgataggatgttccatgtggtgtactgcatcggggtagcccgagtaacgtcggggcatcccggataggccgagaaagtgtcgtgggaacgaaccgttcaatcacgccgatgaactctgatacgtgaccattggcttcggccgtacgacaagggccacaagcggaagctcgaccaggaacaactcgggtaacaaaccctcgaattagaaaccccctccatcaaggacccgcaaacaacagcacacaaactccgacgcgacacctaagcagcgaagggtgacgcacacacaccacaacatcaagaacacgagaataccgcaccccacacacactagcagcccggccacccacaacggcccatcgagccccacaacgggtgacaaacaaagaccacacactggagcccaacgaccgcgacacacgcccatggcaacccacatagcgggactccaaagggcccaacacccaatccacagtcgcaaccacacaagaccgcgccacgtacaaacgctatgcagacacccacatcgctgtcgagacacagccaacgaccgcatctcaacgcacctcaaacagcggccgggatacgcacagcgatcagcagccaacacacagccaaccggacaccatc

SEQ ID NO: 545434 - DNA, 382 bp, Homo sapiens
actccagcctggacaaaagggcgagactccgtcaaaaaaaaaaaaaaaaaaaaaaaaaaaaaattttggggccccccggccccgaaaagttttataacaccctttccggtgggggcgccggggcgcaccagcttgggatacgcgtaaacctgtggggcccaacagccgtgtccccaaaggaaaacccgtggcgcacaagcactacggggctgggagttccccacccaataaaaaaaaaacgcgcggggggagcaaccgaggcgggttttgtggaaccaacccccagaggggagggtcgcagaaggccccagaaaggggagacctaacacaaggggggtcccagcagagacccacaaaataaattaacgccccgccgggggga

SEQ ID NO: 545435 - DNA, 171 bp, Homo sapiens
ggaggttgtagtgagctgagatggcaccattgcactccagcctgcgtggacagagcaggactccatctcagaaaacaacaaacaacaaacaacaacaaacatgtttggtaatacattgtgtgtcaagacacagagaggttgaaattgagggatggaaatagtggctcatgc

SEQ ID NO: 545436 - DNA, 536 bp, Homo sapiens
  misc_feature (369)..(369): n is a, c, g, or t
tggcaggctctctacctataagactatttaacttacccaaaaaatcaaaagaggtggctggaccagattgatacggggacataacggtttatattatcaaaggggttggcataaccaaaagtacaataataaagatgaaaaggcctcctatttctttaagaaaataatactaaataagctggcggcatcttggatgtttcaactcactcacgggcatgacaatgaatatctgatagaaaaaagaattgtatcacttgaataatgatagctccatccatcacagtttaatctaaaaatgcactctctacagaaacaggaactatttggacaaagaaaaaaaaatccctcatccaaatttctgggtcgggntaagggcggcaaatggcggggtaaagaaacctacactaatcaacaagctgggcttaagggccggagaggtacaaaatctagaaggcagatgaaagtgcattattccaaagtttaagtaacagttcggataatcagagttcaaagcaattatggcacataacaagtca

SEQ ID NO: 545437 - DNA, 455 bp, Homo sapiens
  misc_feature (33)..(33): n is a, c, g, or t
  misc_feature (101)..(101): n is a, c, g, or t
  misc_feature (113)..(113): n is a, c, g, or t
  misc_feature (115)..(116): n is a, c, g, or t
  misc_feature (135)..(135): n is a, c, g, or t
  misc_feature (139)..(139): n is a, c, g, or t
  misc_feature (173)..(173): n is a, c, g, or t
  misc_feature (178)..(178): n is a, c, g, or t
  misc_feature (180)..(180): n is a, c, g, or t
  misc_feature (216)..(216): n is a, c, g, or t
  misc_feature (225)..(225): n is a, c, g, or t
  misc_feature (235)..(235): n is a, c, g, or t
  misc_feature (238)..(238): n is a, c, g, or t
  misc_feature (248)..(248): n is a, c, g, or t
  misc_feature (283)..(283): n is a, c, g, or t
  misc_feature (304)..(305): n is a, c, g, or t
  misc_feature (309)..(309): n is a, c, g, or t
  misc_feature (354)..(354): n is a, c, g, or t
  misc_feature (365)..(365): n is a, c, g, or t
  misc_feature (368)..(368): n is a, c, g, or t
  misc_feature (373)..(373): n is a, c, g, or t
  misc_feature (386)..(386): n is a, c, g, or t
  misc_feature (447)..(447): n is a, c, g, or t
ttttcattattaaaaaaagcaaattataaaaanaaaaaaacatgcaaggtagcttgcccaaaccactcgtacatcatataaaataaatttaataaacaaantttttataaatnanntgaataaattgtatgtaanaaanaaagcagcaactattttaataaaacaaaaaatanaaaancnttctgcaaaaataattgtaattgcttctcatattcnaaaacaaanagttgtaaanggnacaaactttnttctggtatttgctgtaattctcctggaattaacnaaataacttcttaagattatnntgtnaatttaataggttatagaattttattaaataacctgcagaaaaantcataaaattnttncaaantttaaaagttgtntcttcaaaaatctcttcgaaatatttattaattctcatctttattttttatttttcataangagtaaat

SEQ ID NO: 545438 - DNA, 717 bp, Homo sapiens
  misc_feature (119)..(119): n is a, c, g, or t
  misc_feature (428)..(428): n is a, c, g, or t
ctcttcggttaaatcctcaagtgagggaggaagggatacccccgcgaaggaagtgctggatcgtgtttttgctgcgcgtgatcctgcgtgggtcgggaggtgtttctgtgaaaagcctnaagattagactgtaagaaaagaaaatagaagcccatgtttcgaagacctgtattacaggtacttcgtccagtttgtaagacatgagtccgaaaccaactacccagtttggttcttgaaagatccctgaatcgtgtgcacttacttgggcgagtgggtcacggaccctgtcttgagaccaggtggaaggaaaaaatcccagtccccaatattttctctagccaactaatgagatgtggcgatcacggggatagtgaagtttacccactgggtgatgtccagtccaaagaccacactggcaccgaatatcncgtattccggcccggcctcagagacgtggcatatccatatgtgaaaaaggggtctcgaatttatttggaagggaaaatagactatggtgaatacactggataaaaataatgtgaggcgaccagcacaccaccatcatagctgataatattatatttctgagtgacccgacgaaagagaaggagtagaaaggatgattcttctttggccatcatttggtacagtctcatttcccagtcatgtataatctttatggcttcccaggaccagaattaaaatactcttttacgt

SEQ ID NO: 545439 - DNA, 576 bp, Homo sapiens
  misc_feature (576)..(576): n is a, c, g, or t
agagacgtgtagaagtttaaagatagttgtaaatatcttctaatgcttgtataagtccttttatgatggagaagttcatggtatgtagtttaatgcaaaatgaaaccattttatttgcaatgttattaaaagaggtttgttattcattcagagcaatgttcaatagtattgttgcagatgttttagtgccgtgttataacaggcatttagtttcagcagcagtgcaatgtcaacagatacagtcaaaatgtatcaagcattgtcatcatactttttaaaacaaaaatatcgaacttggcacatggtttttatcaacaggctccaatccaaggcaagtgcaggtgtgccacatcacaggtcagccacagtcacacacacgccagttgccgtttcttcatagtccatagctctcagcagcaatccccatcacccacagattttatccccacataccaaccggggccaatatacatttatggtctcggcaatcggggcactcgcacaatttcatttatggtggaaatttcccatcacagcaggcatccaatgccccttcagcgcaagttactttcgtcn

SEQ ID NO: 545440 - DNA, 757 bp, Homo sapiens
  misc_feature (159)..(159): n is a, c, g, or t
  misc_feature (468)..(468): n is a, c, g, or t
tttcacattggtaaaccctttatataatatgggttagggaatctataggaccgccctccccaataaggggaatttgggtctctaagggccaaagaatttgggaacaaaggcctgggggggctggggttgctcgggttaagatcgccaggaaaaagcctnaagattagactgtaagaaaagaaaatagaagcccatgtttcgaagacctgtattacaggtacttcgtccagtttgtaagacatgagtccgaaaccaactacccagtttggttcttgaaagatccctgaatcgtgtgcacttacttgggcgagtgggtcacggaccctgtcttgagaccaggtggaaggaaaaaatcccagtccccaatattttctctagccaactaatgagatgtggcgatcacggggatagtgaagtttacccactgggtgatgtccagtccaaagaccacactggcaccgaatatcncgtattccggcccggcctcagagacgtggcatatccatatgtgaaaaaggggtctcgaatttatttggaagggaaaatagactatggtgaatacactggataaaaataatgtgaggcgaccagcacaccaccatcatagctgataatattatatttctgagtgacccgacgaaagagaaggagtagaaaggatgattcttctttggccatcatttggtacagtctcatttcccagtcatgtataatctttatggcttcccaggaccagaattaaaatactcttttacgt

SEQ ID NO: 545441 - DNA, 353 bp, Homo sapiens
ccacgcgtccgcggacgcgtgggcgacaagtcagagagttctttcaggttattgtcagggaaggcgggcacattttaccttatgaccaaccagagagatcattcgacttgaaagaaaagattcctctctacagatggatttacatctcactgatagactgagatcaaacatgaaatgtgaccagtgaatgaatccgtgttcactagcgtaatgtatatttcaatgcgatataccgtgctcttatgaaggcactgtaatggtttatattttttattaggctctgttaagtgtaagggctgttttattgtacatgatttgaagatgatttttgattaaagtatgatttgaattta

SEQ ID NO: 545442 - DNA, 789 bp, Homo sapiens
  misc_feature (159)..(159): n is a, c, g, or t
  misc_feature (468)..(468): n is a, c, g, or t
tttcacattggtaaaccctttatataatatgggttagggaatctataggaccgccctccccaataaggggaatttgggtctctaagggccaaagaatttgggaacaaaggcctgggggggctggggttgctcgggttaagatcgccaggaaaaagcctnaagattagactgtaagaaaagaaaatagaagcccatgtttcgaagacctgtattacaggtacttcgtccagtttgtaagacatgagtccgaaaccaactacccagtttggttcttgaaagatccctgaatcgtgtgcacttacttgggcgagtgggtcacggaccctgtcttgagaccaggtggaaggaaaaaatcccagtccccaatattttctctagccaactaatgagatgtggcgatcacggggatagtgaagtttacccactgggtgatgtccagtccaaagaccacactggcaccgaatatcncgtattccggcccggcctcagagacgtggcatatccatatgtgaaaaaggggtctcgaatttatttggaagggaaaatagactatggtgaatacactggataaaaataatgtgaggcgaccagcacaccaccatcatagctgataatattatatttctgagtgacccgacgaaagagaaggagtagaaaggatgattcttctttggccatcatttggtacagtctcatttcccagtcatgtataatctttatggcttcccaggaccagaattaaaatactcttttacgttaaaaaaaacaaaaggatcctctagacagcca

SEQ ID NO: 545443 - DNA, 1341 bp, Homo sapiens
gcccacgcggaaggcaactgcctgagaggcgcggcagtcgcaccgaccagaagctgaggaagcctggactgccagttctgcggtgtgctccgtggcacgaccactccagacgctatgcagctactggacctgtcccaccatccctgattgtgtgacggagtactgacacatccactacaaggatgggacaaacctgcacactatccggaaccttcgtccacgaccagctgcttgacgtgcggccaggtcattacgaggacaagttactgtgagcctagactgttcatgaggccgaaacgggtagatacaaattcaacgctaggatgagtggcatctggcgtaaccacacacgcaatgtgcaagttaccccagcatgtgcctaatccggaccttataccagttaatacccgagcagtatgatccccaaccggaaaagcaacaatggccacgacctgtgacactggcattgaaacgtagcaaccggccctaacttacgcgcacattggcccgaattgggtggtaaaccagtcgagtgagaccccacgagtaggaccattaggggacaacccgaggtggtggccacctgggcgagaaaatggtccatatgggccagggggagcggcataggcgaacaacaaactttgggaggcccggacatggcccatataaccgggggctccccggggagcgccacccaccctggtcgaaaaacgatacacaagccagacacccaccgcaaacgggaccacagtacgacgagggaggggagaccaccccgaggagaccaaaccaccccgcccggaagcaaaggagggcttaaaccgtggggagggcaggaccagtgcaggatatagggggccatgtcaccgagagcgaaaccacagcccccgtggtggaacgaggccacaggcaaatgcgcgcccgcgatataaggtaggaacgggggaaacgggatttcgggccagccgtgacgaagggaggcgacggtaaaaattgcccgccaggggacacagcacttaccggggagcagagacacccggggagtgtacccacaaacgaggggacaccgcaaacccgagcacaaagcgaccaccaggacgagttacacatcacgggctgaatacaaccaaaagggagcccaccggggacacacatccccgaccacagacgaggagccccaatcaccggaggagagcacgcacaccggggacacaacaagaatgcaggagcgatacccgctaccagggacaaaacaaccatcaaacggaggtgactacggagcaaaccccaatccccacacacagaggccttcccccccaaggacaacacttcccccaggga

SEQ ID NO: 545444 - DNA, 745 bp, Homo sapiens
accctcatcaatagagggagacatacagaaatagtcaaaccacatctacaaaaggccagtatcaggcgggggcttcgaagccaaagtgatgttgggatgtaaagtgaaatattagtgggcggatgaagcagatagtgaggaaagttgacccaataattgacgtgaagctccggtggaagccgtggtggctacaaaaaatgttgagccgtacatgccgtcggaaatggctgaagggagactcgaagtactctgaggcttgtacggagggtaaaactagagacccagttaacaactggtaaataacgcagctgctggaataattgggtattcggttgtctttctatatagcacctattggtgacgactacaggtgaatgcgatacctcctgactgcgacgtaatacggatgtgctaaagagacgtggcgacttctacggggcataaaaccggaggatgaatgcctgctagggggccatgttgcccttccctaaatgggggggtgtaaggggggactaaagcattccaaaacgatccctgtgatagacacaaacaacaccgtctcaactcagtcgaatcaatgctcgtcctaacaagcacatttaagacttgctgaaatagcctaccaagtattaccctcctatactagagaggacctcccagatacatttgaacctccccattaaaaggctcacaaagttccagaaacgccccccatgacggatgggtgtacaaaaaagataactgg

SEQ ID NO: 545445 - DNA, 134 bp, Homo sapiens
tctagaggttacctcatcaatagcgcctctggatatggtattatttcccctatgcacaaggcattctgtaagttcacacatagcagctttggtagaagcattgtgcataggggaaataaatccatatccagagg

SEQ ID NO: 545446 - DNA, 1009 bp, Homo sapiens
  misc_feature (1009)..(1009): n is a, c, g, or t
agcggaggttcgttcagtgggcccgcttctgcccagcgatcttccgctcctaacgtgggcaggccaagtgtgcggtctgaatgtaacgcccttcggctactttggcgggctcgagacgactcgaccgccgtgctagttcccgggacccacggcggtccagagcacccgtcgcacatgacctctgcgtacagcgagacggtgcgcttgcgcgtaccttgcgttgtggattgcgtgccggccgtttcgcttcgggattgcggcgagttccgcgcgtacagtacgcgttgtgtccagactgtgagtctcccacgtgaccaaggatgctacttctctctctaggaccaggtgacaactgcaaaattgattgaatttacgtcgagcgaattcgagcaaaagcttgatccaagattgtaacctgtccgttgagtagatcaactaggcgtacccagtactatataagtatgatactgactctagtaggtctcattatcgctagatgctgctggacaattacttggcgaaggaatgtgcatgagaaatgcattaaaaaacgcacgagatccaatttaccttagaagcggcatagttagtggccccctaagaaagtggctattacacatggtatgggtaactctggtatacaagaaaaagcgccgactatcctaggccaaccagcttatccgaacaactcgcagacgaggcgttacaaacgacacgtggggaggtaattatcaccttaacaccactaatgtctagaaaggtggcaagaaggggtaagtccgaagcgaatggggaacacacctggtctatatgttatccaaattggagtattttccccctacctgtaggaactaaggtaattataaccccctttaggcataggataggggaaagactgaaattggattttacggatcgtaataataacccggttccactgtaccaccaacggtaaagaaaagagcttcaatttgccctgaaattatttatattaggccatgtaaggttn

SEQ ID NO: 545447 - DNA, 480 bp, Homo sapiens
  misc_feature (459)..(459): n is a, c, g, or t
agctgtagtggggaggctgtgtgtggggaaagggacataggagaagtctgtattctctgttccgtttagctatgaacctgcacttctctaaaaaataaaattagttaaaattaaaagcaaaaaattagaaaaattaaaacattgcaatgtgtcatatagttttcaaatcacaagacagaaaaagacataatagaagaaactatagaaaacatcaaggataggaataaaacctcagtgatagaaggcagaagacagaagacaaaaacgtggagcccaacacattaatttattttaatcattagttgtactcatttatagtaatttatattgatttaacatattaattttgactaaatggcattaaaggaggtttgaaaaatttgcatgtcacattctggttgagagaactcaacaatattagctctttagtttgctgtaaatcatccaaacatatgctcnaattccgataaaggttacttg

SEQ ID NO: 545448 - DNA, 317 bp, Homo sapiens
aaaactgcttgagcccaggaattcgagaccaacctgggcaacatggggagaccccatctctacagaaaaaatgtagctgagtacagtggcacagatctgtaatcccagctattcaggaggctgaggttggaggatcgctggagcccaggaagttgaggctgcagtgagccatgatcgtgccactgtactccagcctgggtgacagagcgagaccttgtctcaaaaaagaaaaaaaaagttctgcaaatttgccagttacaagaccaacctacaaaagccaagaacatttttctacaccagcatctccgctttggaaa

SEQ ID NO: 545449 - DNA, 354 bp, Homo sapiens
acaggcagagctggagttccttctcagatgcagtttgtgctccgtctgcatttaaggcacaggcaagtgctgcaatataatctagagagattgtcgagtataaccctttaatcttatgtgacagtgctttactatttaatgatttattgtgtaatttaaaaaaaatcaaatcttggtctgacttccatgtggacaggcctagtttctttcagatcctgttgttaggaatatatgccaagtgtgtagatgatgggaaggctctacagcatcttaagtcacttcgccgtaggtgagttggccatttcatgtcatctttctgcccaaagaaaacttcaaaaatctaaacctccaagc

SEQ ID NO: 545450 - DNA, 257 bp, Homo sapiens
gcccagccgccagaagatgctggagcccacggtgggagatccacgcagtgggtgcagtttctcagtagggctggagccaattgtgtggtgggtggccacctggcacggcactgtgctcctacacatcccaggggtaggcttcgtgatttggggcttgggctccaggcactagccttctcttctctgtgtccttagcattgtgagagaagagtgccagggccttgttcatgggatcccgtggacgccaaggcgagatg

SEQ ID NO: 545451 - DNA, 995 bp, Homo sapiens
  misc_feature (11)..(11): n is a, c, g, or t
  misc_feature (44)..(44): n is a, c, g, or t
  misc_feature (722)..(722): n is a, c, g, or t
  misc_feature (749)..(749): n is a, c, g, or t
  misc_feature (752)..(752): n is a, c, g, or t
  misc_feature (757)..(757): n is a, c, g, or t
  misc_feature (763)..(763): n is a, c, g, or t
  misc_feature (765)..(765): n is a, c, g, or t
  misc_feature (767)..(767): n is a, c, g, or t
  misc_feature (785)..(785): n is a, c, g, or t
  misc_feature (790)..(791): n is a, c, g, or t
  misc_feature (797)..(797): n is a, c, g, or t
  misc_feature (803)..(803): n is a, c, g, or t
  misc_feature (813)..(814): n is a, c, g, or t
  misc_feature (817)..(818): n is a, c, g, or t
  misc_feature (826)..(826): n is a, c, g, or t
  misc_feature (845)..(846): n is a, c, g, or t
  misc_feature (849)..(849): n is a, c, g, or t
  misc_feature (852)..(852): n is a, c, g, or t
  misc_feature (855)..(855): n is a, c, g, or t
  misc_feature (857)..(857): n is a, c, g, or t
  misc_feature (859)..(859): n is a, c, g, or t
  misc_feature (864)..(865): n is a, c, g, or t
  misc_feature (868)..(868): n is a, c, g, or t
  misc_feature (892)..(892): n is a, c, g, or t
  misc_feature (894)..(895): n is a, c, g, or t
  misc_feature (903)..(903): n is a, c, g, or t
  misc_feature (912)..(913): n is a, c, g, or t
  misc_feature (917)..(917): n is a, c, g, or t
  misc_feature (921)..(921): n is a, c, g, or t
  misc_feature (928)..(928): n is a, c, g, or t
  misc_feature (941)..(941): n is a, c, g, or t
  misc_feature (948)..(948): n is a, c, g, or t
attctagttanatgtagaagagagaagaaagaggaagtgttcanttttttaatacactgatttagaaatttgatgtcttatatcagtagttctgaggtattgatagcttgctttatttctgcctttacgttgacagtgttgaagcagggtgaataactagggcatatatttttttttttttggtaagctggttccatgatgttttcttgggaattccgggataagttcaggaaaacattctggcatgtggtatctagtctggatgtacttatccatctcattacaaacaaaaacacacagactggcttttggtagctctgtaatcctggaatacggaagtaaattttcttctttcctggactttggacattggtagctatactggtttcccatttttggtttttacaaatccttggggtctaattctggtgagcctacctatagcactgggtttaacaatggtctggcatcatttcttaagttatccagttaactttaaacactggtggtcaacagtgtgtaaaccagcccatgacaggttttggtactatgtacaagaacttcagtggtccagtttccatgattatggtgtaggaagactgatgtagatgtcctgtgctgtcctggaccattgttaattacacttacgacgtatttagtccacatcacaatgatttgtccccagtgaaccctttttatccttttctaaggcacatttctgntggttttgtttgttgcagtcccccttngcntggtntggttngncnactgtattggatcagatntgaannggtccngaatanacttttttcnntcnnaaacacanacaaaaaaaaaaaaatttnnggngcncgngncngaaannttnaaaccatgtgggggggccaggtanannatgcaaangttccaganncggngcgnatggggnttcccaaaaaacnggggcgngtgcaaccagggtggtttggttacgctcgtcacgcgccgagggggct

SEQ ID NO: 545452 - DNA, 138 bp, Homo sapiens
tacaacgttctactactctagactatggatatcactttaaggttaatatagggcttatactatgccgagagaggttgcattgcactgcccattgccgcaccgccgtattgtggcaccgccggaatgctgcgccgcagg

SEQ ID NO: 545453 - DNA, 440 bp, Homo sapiens
ggctcagtaacatttaatggtaaagttattgctccagcttgtaccctggtagctgcgacgaaagattccgtggtgactttgccagatgttagtgccacgaagttgcaaaccaatggtcaggtttctggcgtgcaaattgatgtgccaattgaattaaaagattgtgatactaccgtaacaaaaaatgcaacgttcacctttaatggcactgcggatactactcagattacagcgtttgctaaccaggcctcatctgatgctgctacaaacgtggccctgcaaatgtatatgaatgatggtacaacggccatcacgccagacacagaaaccgggaacattttgttgcaggatggagatcagacgttgacttttaaagttgattatatcgctacggggaaagcgacttcaggtaatgtgaatgcggtaacaaatttccatat

SEQ ID NO: 545454 - DNA, 254 bp, Homo sapiens
ggaccttagctatcggtcatcgtggcaaccttcggacgtccgctatgatatcgagagatctgtgacacgcgaagctagcgagagggtgaacgataacgacgaaatggttggagtccactgaagaaagtagcagggattgtatgtggagcttgacagtcgaagaaaagaacctcctatctgttgcatataagaatgtgattggagctagaagacgctcctggagaataatcagcagcattgaaccggatagcttg

SEQ ID NO: 545455 - DNA, 100 bp, Homo sapiens
tgaaaccaggtgaaaaaggaagaagaggagctgaagaaagaatttattgagaaagaagctaagttgcattccgaaataaaagaaacaggaagtaggaatg

SEQ ID NO: 545456 - DNA, 366 bp, Homo sapiens
  misc_feature (361)..(361): n is a, c, g, or t
atcctttggttggttgtgggtagggtacaatgtcgttcgcgcatcgagggcatgattggacacaccgactcggtgaggctgccctggaaccataaggggtgacttcagctgtcacatcagcaggaatgtcaatccacgccagcgactctgtggagggggcccagcgggagatccagctgtggttccagagcagtgagctggtgagctgggcagacgggggccagcacagcagcatccacccagcctgaggctcaagctgcccttaccaccccatcccccacgcaggaccaactacctccgtcagcaagaacccaagcccacatccaaacctgcctgtcccaaaccacttactacccacaanccctg

SEQ ID NO: 545457 - DNA, 370 bp, Homo sapiens
cgctacagcaggataagggaatgacggcgatggcgccgcgggtgaaggcgtaatgaggtaatgcagtgggcatggaagcggctcatcgacagacagtcgacaagcatgccagcacgaacgaaatcttgtcttgaacgatcttgctcaggcgagctttaccgaaacctgctccaccgaatcccgggcttcgcgcaattcatacgcatcctggttcagccggtggatggtattgagcaggcgctggcgcagcacttcatcgccgagtttttccacggcgcgcatcaggtcgaaggccgcggtttcgttattttccgcgacggaatccagggtcttgcgcaggtttcggtaaagctcgcctgagcaagatcgt

SEQ ID NO: 545458 - DNA, 942 bp, Homo sapiens
  misc_feature (99)..(99): n is a, c, g, or t
cacctggggggagggaacgctgatgcaacaccgccgagtgccacctcgcgccgcccggaggcgtgtgctcgccccaaacgtgctaaaccaaagggacanccgaaggtgtcgcgaccagctcccacgggcaagaggcccttaggcttaccccgggaaaataacctcccgcccgaagggcgaattaaacaccctacagcacacgggcatctactcccaggggttcctcccaccctccataaaagcatgctggcgccacacaccacaaccagggtcccggccgcgcccaagacccacacgggggctttggcaacaccatattagcgcgtccctgggcacaaccagacgcccattcacggacagctgggcacactccaaccggcgcctcacccgcagaacgggttattcggatacgccgcctccccgcacactgctcgggatgtcagctgctggctccgccaagataggcgcaccgacagggggtgtcgaggacgccccacgcgcggacagattacgagaagtcgccgtggatctgcaccgccggcaccccatgagtgattgggtaatcaccacatgcgcccgcccggaggagctccccccacaaggcctcttatgaaaggatgaatgtaaaaggcggcgattgcgaacacgggcggcttcaaactagtgcgtatcttggcaccagatacgtgtttctcgaacctggggcttcccgaacatagctgccctgcaccccgtaaattaggtgcacctttttccgagataaggtggatcgactttctaccattctccggagaccatatagagagtgtattcttgagctaggaaaagccagcgccgagctgtctcacccacaagtaaagtgccacatggatcctgtgagaaaccacccatataaagaggcaaaccgggccctcccaaaaaaaaaatttgacaaccataaca

SEQ ID NO: 545459 - DNA, 386 bp, Homo sapiens
cccaattttttctccaaaaaaagggatatgtgtgtgaaagtttaacgcgtccataaagggtacccatcatcgtcacaataaagtatccatttgcacagaaatgccaaggacccattctcagtatgtaatgtcctattttcccattgcaccagttaaaaaaagtaaacccttcatagtgtggaagagtaggactgcttttacattgaaatggtgccccaaatgagtatataaaatctctgattctatttatccttctctttgtgctctttctctctcttctcacgctcagctgtggcttcctcctcctcgtgttttgtgatcatgtgctccacctctttgtgtttgagctctctgatcactgtctttcctcgtgccgtattcctaca

SEQ ID NO: 545460 - DNA, 457 bp, Homo sapiens
atcaggacactcccagggggaaaaagtattgttagaggagctctattttacaggactccaaggctgggttttgttggttatgtattgtggcattggagcaggcaatcacagggccatctgtgtgaatggggggggcggggggtgtggggagaggcatgtgaaagtgcccgccaatgcgggcgtcctcactggaagcccgttggtctttccgattcgtggggtgagatggttagaaaaaccgctcttcctttgtttagaactgaactaggtgcatggaatgaagggcaatgaccctgttaacatcttgtagaaccagataccagttgtaactgtgcaaatcagggcctgccccatctcctcagctggagcagccactggtgctattggtgccgtggtggcaagctgagctcctaaagggcactgttggggtcagggaaagcatatatatttataaagg

SEQ ID NO: 545461 - DNA, 556 bp, Homo sapiens
  misc_feature (33)..(33): n is a, c, g, or t
  misc_feature (36)..(36): n is a, c, g, or t
  misc_feature (40)..(40): n is a, c, g, or t
  misc_feature (46)..(47): n is a, c, g, or t
  misc_feature (50)..(50): n is a, c, g, or t
  misc_feature (61)..(61): n is a, c, g, or t
  misc_feature (66)..(66): n is a, c, g, or t
  misc_feature (140)..(140): n is a, c, g, or t
  misc_feature (336)..(336): n is a, c, g, or t
  misc_feature (404)..(404): n is a, c, g, or t
  misc_feature (549)..(549): n is a, c, g, or t
  misc_feature (552)..(552): n is a, c, g, or t
aaggaaaaatttgtttccgttttgtgaaaagcnggnagangggccnnaanttcttaagtcnggggnagccgcccctggtgatatgggtcctggccaggccctgtgggttgagagcttctccaaccaaccccccttggggngctttctgtgttgttatattaaacaaaccgttccggggggggtcctccaaaccgtgggccaaaagggtgctggggctggccagggcccccagtttgccccaaaaggcccaaagggttaatgaatattttccccaaaaccccccccccccctttttatccggggggggaggacgggttccaaaccgtttgtttccantggcccctttaggtttggaggaaaaagccgggttattataaccaagcctcggtaaaccctccaaaggnaaggggaaagttttgggggcccccttgggttttttttttggggggggccggttttaggtttttggtttttaaaaccgggcctttttatgggaaccccctggccccaaatttggccccgaatttttgggcccccttaaaaaggttnatnggga

SEQ ID NO: 545462 - DNA, 747 bp, Homo sapiens
tttttttttttaatatggctgtgaacaggggtgcccatggtagcatatgttggatttttttttattatttcataagaaaactagccgttaattttaccttactttcatggtaaataagcctgtcttcctatcgggatttttggggtgcatacatattctactgattaactactttgggagtttaaatccgtggtattatttcttctacttgggtttgggtgtaaagaggggaaaaaataaaaaaagcggtggaatcttaaaaaaaaaaaaaaaaaaaaaaaaaaaaaaaaaaaaaaaaaaaaaaaaaaaaaaaaaaaaaaaaaaaaaaaaaaaaaaaaaaaaaaaaaaaagaaagaaaaaaaaagaaaaaaaaaaaaaaaaaaaaaaaaaaaaaaaaataaaaaagcacacaaaacaggcgagggcagccgagaacccagcaacaatctcgagagagggcgcggacaggaaatgatcgacgcccgctgcagatggtacagaacgcttagaagcaaagcgaggaaagcaagagtcctgatacgatagaaacaggcgggtgcagcgcggtcaccaacaaatactgagacgaacggaagcagagacagagcgagcattaggagtaagaggagagagccaaccccacgcccgggggcaggcacagaggagcacagaaaaaacaaagacacatgaacagggggacgcagaacaagaaaacgacgcacgaggccacacaaccaacaaacagag

SEQ ID NO: 545463 - DNA, 996 bp, Homo sapiens
agcggtgttggcggtcgggctagagaagagaggcgcctgctgcttgcgagcctgggcttgtgaggtggggctgccgagagggcagtgcgtggggcgaggtccaaaggactgaaccacgtcaggagcgtcacgggtcgccgtgggcggctgtcgctgacaggcgtggacgtggggtattactatcacgatgttccaccgtaataatggctggagttaagaacgtttccattatgtttgctccataaccagaagactctgttcccatgtatatacgaaataggatgtacatatttgaataactacatcgtggctgattgtttgaaagcctgatggatttgagtatgagtttgtctgatccatatatctccaattgctgaagtagaggatttgtcttggaaagtactaaggttgggggaaccaagatcagaagcatcttggattacggcatttagtgatgactgaggtatgccagaataacattaaatagtgtagcatgacactattcacaccaagagggtaatccaaatcgtatttgctaggaaccatgaaaattttgctagttgttgactttgacaatacaatcatagatgacaatgggtgacacgttggattgtacaatgtggtcccaatgaaataaagttgcgtattgaagctacgtgattcttatcgaagaggattttggagcgaatttatgggcagagtcttgaacgtatttgggagataaggtgttagagaacctgactgtgatgagccagtgacatcaatgtgcctttcacttccagggatgggggggagctccttcgacgttacttgggaaaagaataaggtgaaatttgacgtggttaatattttcaggaattcagattcggccttcatagaatgggggtgttaaaagctggcgggtttatgagatatttggacaaagtgtttcagatcccgggggtttatagcgaggggattccgggtgaaaattatttcatttgggaaatgcccaga

SEQ ID NO: 545464 - DNA, 971 bp, Homo sapiens
  misc_feature (46)..(46): n is a, c, g, or t
acagctgtggcttggctagatgtcaagtggaaggggacgtgagaangcacctgcactgttggggcaaacgcgagtggtggcgccccccggcggggtgccgcacgcgcgagtttgtgcgaatgcaccgctggttgccagcccggtgctcctgtgtcttcagagggtcacacccctgtggtgaaacgctcgtggggaggcctttgttctcccgaaaggtgtgttgtgttggccaaggcatagaacgtttgaaggtctcccgacagaatgttccgtgcggggagccgcgagcagttagtctgcttgggtcagcagagaccccgaaaagcggtgacaactcacgatacgttgtgttttaaacggggcgcaccataaatggaccacgcccatacacaagcggctacaagtctggcccccataatgcctccgtcaaagcatcttctgagcccttttcccgcaccccgcgccccattcaagcaacaatgctacatacttcgacgaaacccttgtatcaaatacccacatcgggtcgctacaacaccccggtctccaaaaggtatatctatgatctctcgctctagtggagcaccaaaacttttcttataacccagacccagtctattatcctccgctttcgagacttcttaagtcatcaataacaaacaacttttttttcctggaaaaaacaactggatagcacatgtttatttcttgttgccaatttcaaccccaaacctccctttgcaataacaaagacgtcctcccatagttaattgctattactcccgaacccctccccaaagtactcatcacctccacgctgcccacatggaagagaaacaatgataatccctgaatttctctcgccctatacctcccggtgtctttatttctattctttctgcgggagcttaaacaagacccaaatccaaggggccgctcaaccaaacccactttcccttccacataacaaa

SEQ ID NO: 545465 - DNA, 152 bp, Homo sapiens
  misc_feature (117)..(117): n is a, c, g, or t
ctcctgcagctcctgcgccccgccgagctgactggagctgcgcacgggagcgtgggcacgcaggcggtggcgcggaggatggatggggacagccgagatggcgcggcggcaaggacnccgggtcggaggactacagaacctgccgactagcg

SEQ ID NO: 545466 - DNA, 496 bp, Homo sapiens
  misc_feature (36)..(36): n is a, c, g, or t
gtatatatatatatatatatatatattatctgaatntgctttgatggtacctttgcaattgtattatccattattccctagtattagtcttattctcttctcaatctgtccatcatcctggaaacatatctgaaacattttggtctcactgccagacaggttgtttcctttttctgccttttgacttaaaagaaaaaatctttttaatcttcttcatgaaatgttaatatagccaccatgtaaaacagtaatttcctttctcctgtaatgttgaaaatgtaagccttagccaaaggaccttatcctctggggtaaatcattagtttcagaaaagccctatcatgcccccagaaagtgaccaacttatctagatggaaaacatccaggacttttcaaatactgaggaagatttaactaggagatgttcaagtagaattaagttgaatttcaatagatactgagatggcaggctttctaaatctacctgagccttaaa

SEQ ID NO: 545467 - DNA, 172 bp, Homo sapiens
gctgcttgttgactctagagtgatcccccgctacaaggccccgcagaattctgtgcttcttgtgtgaagaaagagagtgagtccttgaatggcgggggagacacaaaatgggaccccccaaaatccacatgtgggtgctggtgaacccctaaacatccatgtggaatgtgca

SEQ ID NO: 545468 - DNA, 281 bp, Homo sapiens
gagggcaggcagagtatacttgtcctctcacacatatttacacaggtcttttttctagatacagttgagtttgagtatggttccttattttttacgtcaagtgtgttactcaattgtgaaaactgttagtcctagccagatcctaagaggcaagcaattagagtaatggaacaaagtaacagatggctactttggggcctccattatcagcctttaaaaagaaaaaaagatctatttcaagaaaaacaaggcagggcacagtggctcacgcctgtaatccc

SEQ ID NO: 545469 - DNA, 892 bp, Homo sapiens
gccagcttcggcgagatgagcctcaaggcgagcgagggcgagagtgggggcagcatgcagcagcggggctctccgagcctctaccggtggagcgattgctgcaggaagcgtagtcggcccagaggctgtatcgcatccatttgaatactgtgaccgatggacatgtatcaccaactgggtctccgtgccccaggtagcccgttgccagggtcacagggacaggaggtgtggaaagtgcgactcatacagttctgagaaggtcacagaagaggccatgggaatcactctgaagctgaatgaaaaatagtcctgtacggtggacatgaattcttcagtggtggcgatgatccatagacaaggctcccttcaggtgggggatgatgtatcctatggaaatcaagtggcacaacatgtgacaaatcattcgagtggagtcagctgcgagacagggatgaaagaaaccaaaggaatgatctcattagagaagtaattcccaactcagtggaagccgtcttcctgcacatacagatgttcagtgagagcgcagttgagtatgatcccgaaatggacaatctgatgcctgcaaggaggcgggactgaagttagtagtggggacattgatccacgtattagtcaacagggatgacagtaatcggtggcgggcacgggtgggagggcccctccccatgaagtcagcagtgagggatccctaagcactgagtgcccgcatgggaggggcacgttgggtcagaaggaccaaagaatcgcgaagagcacaccttggggcgacagaaaccaagagcaaatgtgcctaaaagccgctatgacaggcaactggccaaagaaacgacgggcccattcagagagacacggccggacgggggggcaccaa

SEQ ID NO: 545470 - DNA, 341 bp, Homo sapiens
cacagtcagtagcactaggacagcgtactcgtggccaactctcccctcagaatcattgtcaaagaaaacctatatgtaacagaggtttttacatttgcaaacttttggaggaaaaatggtggtatggtctggggaacactttatttagaataacggaatttttctaaaaatcaggttagttactaactgggattctttttggagcaatacctacaaaggcaggcaccagaatgtgccttaaagctgtgacatttcaacatgatggatttggcttggattggttttgagcccttttaatatgcaggttttcctgttgcaacagaagtggctttgggtttgtg

SEQ ID NO: 545471 - DNA, 287 bp, Homo sapiens
agaggtctctatctaacttcagcactatgacatagcggtcaccaggtggcagcgcggtcgtgtaagacgggaaggggtgagctattcattcacagttagccaagagcagctccgcgcctgctggatcgtggatagcagcgtaaacatactatcctatacagacgaggcattaaccccatggttaattaggacttggtcaccagtttttattatatttctatgaatctaccttgggattgattgattgaagtccaggccactttactgtcttttattaaggttactgt

SEQ ID NO: 545472 - DNA, 369 bp, Homo sapiens
  misc_feature (38)..(38): n is a, c, g, or t
  misc_feature (71)..(71): n is a, c, g, or t
  misc_feature (81)..(81): n is a, c, g, or t
  misc_feature (132)..(132): n is a, c, g, or t
  misc_feature (181)..(181): n is a, c, g, or t
  misc_feature (185)..(185): n is a, c, g, or t
  misc_feature (191)..(191): n is a, c, g, or t
  misc_feature (242)..(242): n is a, c, g, or t
  misc_feature (245)..(245): n is a, c, g, or t
  misc_feature (264)..(264): n is a, c, g, or t
  misc_feature (267)..(267): n is a, c, g, or t
  misc_feature (276)..(277): n is a, c, g, or t
  misc_feature (303)..(303): n is a, c, g, or t
  misc_feature (328)..(328): n is a, c, g, or t
agagagcagcgccgatgtgaagatgaatgaatgtaacncctggtgtgaagatgaatgtaaaccctggcganagttgagacntttttcttttagactctgctaaaacagtgctctggcttggcttacctcaanagggaagatagttgagttttatttcctgtatatcaggtgacctggtagngatntaaagnaatttaccatagtttgggctttagtattgtaaaataaacatgagaaaaaanaanaaaaaatatacttaatgtnaangtgctctanntttggatgtacagtagttttatttcnacagccacattaccatagcaataanaaaggaggcatagtacatagttggaaaagctttgtgggggg

SEQ ID NO: 545473 - DNA, 139 bp, Homo sapiens
taaacgctttattatctcaacgctttatacttctcaacgcttatacttcctcaaggctcattgggtccgatgtgctcattgcatttgccggtatgaagtataaagcggtgagagcgttgaggaagtataaagcgttgag

SEQ ID NO: 545474 - DNA, 144 bp, Homo sapiens
tctgagcatgctgggaacgagacgctcacggcgtgaccccgaatgacacatgtaccaccacccatctctgaccataggtcaccctttatggtgctgggccctggggtactaccctgcggagaatcacactgacctggcagtggg

SEQ ID NO: 545475 - DNA, 108 bp, Homo sapiens
aaaatgtgaagcatgataagcgtagagggaaggttcaatggttgatattgctagggtggtgcttccagttaggtgcatgagctaggtggcctgcaatcaagcctggaa

SEQ ID NO: 545476 - DNA, 106 bp, Homo sapiens
catcttcttgattcgcttgcctcagtcttagcgaataccagaagatttatggtctgggcgtattccgataccgacgaaccgtccgatgatccgaaaagaccagaag

SEQ ID NO: 545477 - DNA, 245 bp, Homo sapiens
catcaggttgctatataatattataaactatatcacatatgattgttctctactctacaagttatcatgacctgcattagaaatggaaagctgtttcacatgtttacagtgatcagtaggtataaatgcactaatgaaatatacctttcaccttcatagctaaactacagccatttactagtttctattatttttgataaggtcttcaagatttactcccaattgccaggcggtggttcccgatg

SEQ ID NO: 545478 - DNA, 251 bp, Homo sapiens
gcagtgtcttcaagaaggatgggtacaacaagcccgaactgcatatactacaataaattactaagctcttcaagtgcgccaggacacacactaacatccaccagaatcaagatcatccaggctgaacataaccatcaccaagacaaaactaacaggcctcacgaaatcagatgatatgtagacctcttcacagacgagaattcaaatataactacctttgagggaaacgtcaacataaattcatagatgac

SEQ ID NO: 545479 - DNA, 713 bp, Homo sapiens
  misc_feature (38)..(38): n is a, c, g, or t
  misc_feature (64)..(64): n is a, c, g, or t
  misc_feature (78)..(78): n is a, c, g, or t
  misc_feature (87)..(87): n is a, c, g, or t
  misc_feature (117)..(117): n is a, c, g, or t
  misc_feature (131)..(131): n is a, c, g, or t
  misc_feature (145)..(145): n is a, c, g, or t
  misc_feature (188)..(188): n is a, c, g, or t
  misc_feature (207)..(210): n is a, c, g, or t
  misc_feature (221)..(221): n is a, c, g, or t
  misc_feature (223)..(224): n is a, c, g, or t
  misc_feature (227)..(227): n is a, c, g, or t
  misc_feature (230)..(230): n is a, c, g, or t
  misc_feature (234)..(234): n is a, c, g, or t
  misc_feature (236)..(237): n is a, c, g, or t
  misc_feature (266)..(266): n is a, c, g, or t
  misc_feature (280)..(280): n is a, c, g, or t
  misc_feature (372)..(373): n is a, c, g, or t
  misc_feature (684)..(684): n is a, c, g, or t
ctggtgtccgcttacgtcggcaggacctgccttacacnggcggaagaacacgaccacctctgantgaccctccgcagngtctctttnattttgtttgtatgtgtgttttaatgcaancattccagctcacngtttcttatgtggngaaatattcagtagtcatcttgtacttgtactataggtaagancttaaaatgatcatcatcnnnngtggggtcttngnnggngcnaccngnnacattaattaattcattccatcagaagancttaaactagaganttaagcccactttatgaagagcgatttcacggctgcttgagccattcgaatttgggtttgtgttcagcactttaaaagggtcaactttttgnntctacccagattgggctcaggtctgtcttctcatccatccctttctaaagccaaagcgcatttgtagcacataatccaggagaagcagaagtaaatgctatgactggtggtatttcttagcctggttttgtagtttttaggcagtaagtagattatgagcgaacaaatgtgaaggttcatgtggagtcataatacctgtgatctaggtatggtcttagtcaagctcagagacaacaaagccttctaggtcattaggcaatggtgggtttctagcaccatagactgtctactgacctcatttttcttttggnatggagttagacatggggagcttcaaaaa

SEQ ID NO: 545480 - DNA, 203 bp, Homo sapiens
  misc_feature (31)..(31): n is a, c, g, or t
  misc_feature (61)..(61): n is a, c, g, or t
  misc_feature (64)..(64): n is a, c, g, or t
actatgagtgccatttgttctttttcgagtnccttgagaagtaatgtttgtttaaggtctntcncctttcttaatgtaggtgtttattgctataaacttccctcttagaactgcttttcctgcgtttctcaagatttggtatgttgtttccttttgcatttatttcaaaatatttttaaattaaacttttaacttcttccttg

SEQ ID NO: 545481 - DNA, 256 bp, Homo sapiens
caggtagaatgcagtgagttaaattgtgtccctaaaaaatatatgtccgtggccaggtacagtggctcatgcctgtaatcccagcactttgggaggctgaggtgaaatgatgacttgagcccaggagttcgagaccagtctgggcaacacagggagacctcatcgctataaacaaattcgaaaagttagcagacatggtggtccagctactcggaggcgaggtgggagaactgcttgaacccaggaggcggaggtc

SEQ ID NO: 545482 - DNA, 1439 bp, Homo sapiens
gttggtcgcttccctgcgccaaagtgagcaggtagccaacagtgtcacgggctgggagctcattattacaaaaccgagggcgatgaagaagcagatggaagaacaagaagagaaccttgcaacgcaacgtggagactactaaactattcacggaagacgactagtttgagtttctttctggttgactgcctccaaggctactgtcttgaactctcagagctgaacgatgagcttgacaccctttctgaccatgacgcatccagctgtatcccaaacgtgttgtcacactccacgtacagcactccataatgcaagttgatcgcagactctccttgtgctgctgcgtgttcctactggtaacccgacgaaagcacaaaacaacttccagctgacattcttaaaacatactttacggctccttaccacgcgacgctggcactaactccaagtgtgcaaaaaaaccgcaagttcctaagaacgcttctgacccacgctctctaaacggcggccacgccaccgggcaaccaaccacacacagctctctcccacacgaaccacttgcacttgtgggccccacggggactccttgagcataacctccacctccacgcctgaaaccgctcgccttgctgcgcgctcctgctgcccaaaacccttcctctctaagcctgaattggtcccacactttcaaacgactgcacgtccactacacgaacgcgactccacttgcccttgctctcaacccacaatcgaacggcacaaaagccccgccaactgtgccaacttgcaccacggctggcccacaaaggccaagccctggcgccccaagcggaagcccaacacacggccgcgggctgaacttctccccggacgcaataccacgcggcaatcatttccctctgcacctctgcgatcgccacccctgtgaacagcaaaaccctgggcggcggccctctcggaccccactaactccctcttggcttccctacccagcacgcacctctctccctccacggccctcttcgcgccgcaagcggctcttctgctgcggagccctctcgcgcggcgcctccacccctctgcgccggaacatcccccggcccacgcctatcaaacacacctggtttccccgcacgcctccgccgccgccgcggcgcaccccgcgtacccgcgcgcctccagcgcggtccacagcggacgcgcccccaccagcgcaactccgacccgcggcaggccccacaaacccggcccccaacgagggcgctccaagccctccccccaacagccctactccgcaaaacccccccgcgcacaccaccccccgccccccacacaacacaccgcccagccacccagcaaccccaccccaccaccgcccccgcgccctccccccaccaccacaacacgcccacccacccaccccacacccactgaccaca

SEQ ID NO: 545483 - DNA, 229 bp, Homo sapiens
tctcataaggagcgaggttacgagcagttcactgatgcagttgtgtcctggctacatcagcaactcgatatggccttgatttcttgctctgcgggctcttcatgctcagaacggacggcagtgccattcgagtaggacgcggcaccatgtactcacagacggcacatccctacccctttgtcagatgtatagacgggttcttagagatgatagacacattatacaaaga

SEQ ID NO: 545484 - DNA, 241 bp, Homo sapiens
gtgaatggttgcttacagaatctgaactgaaattaacacctagacatctgaagtatcccaggcttctcccccagtagagtagggatgtgtggaagccatgtaagaaatagattcctggccacatttggcattcagtcaaactgggtctactggacccacttcatgtcatttctccagcctcaaaataaataattgagatcaatatatttggcagttgacatcttattctgtgtgctgggag

SEQ ID NO: 545485 - DNA, 109 bp, Homo sapiens
cttctctccacatccctctctgtacttacagcccccaattggcccccaaaaagccagatgccaagaaggatgatgcaaggcaagccccaaagcagcttcagctcccgca

SEQ ID NO: 545486 - DNA, 215 bp, Homo sapiens
tagatatagcggatgaaatcctaaatgctggtgtgcggcaggtctaaaacatggggagagtctctgggatctggagttgagagccatgggtttggacatgtctgtgcacaaacagctgtcatatgttcatggacagatgtcatacatactcagatgtcttgatccacccagtatataccaggaaaacaacgcaatgtgttaaggtgatgctcccc

SEQ ID NO: 545487 - DNA, 1632 bp, Homo sapiens
gcgccatgaaccaggccaaagcggagcggagcgggggtgaggagagtcgagggaggtgacgcgcgctgccggggcgaggttgcgaggggcggtgttgaagaatgtgtgggcgaacatcctgtcacttacctagagatgttctcacgagagcttgcgcctaccaggatcggcggggccagcagcggctcccggagtggagggaccctgataagtactgcccctcttacaacaagagtcctcaatccaacagcccagtgcttctgtctcgactgcactttgagaaggatgcagactcatctgagcgtatcattgctcccatgcgctggggcttggtcccttcttggttcaaagaaagtgatccttccaagctgcagttcaatactaccaactgtcgtagtgataccgtaatggagaaacggtcatttaaggtgcctctgggaaagggaagacgctgtgtcgttttagcagatggattctatgagtggcagcgatgtcagggaacaaaccagaggcagccatacttcatctattttcctcaaatcaagacagagaagtcaggtagcattggtgctgcagatagtcctgagaactgggagaaagtctgggacaactggaggctgctgacaatggccgggatctttgactgctgggagcccccagagggaggagatgtcctgtattcctataccatcatcacagtggattcctgcaaaggcttgagtgacatccaccacaggatgcctgccatattagatggagaggaggcagtttctaaatggcttgactttggtgaagtctcaactcaggaagctctgaaattaatccacccaacagagaacatcaccttccatgcagtctcttctgtggtgaacaactcgcgaaacaacactcctgagtgtctggctcctgtcgacttggtggtcaaaaaggagctcagggcaagtggcagtagccagaggatgttgcagtggttggccacaaagtcacccaaaaaggaagactcaaaaacacctcaaaaggaagagtcagatgttccccagtggtccagtcagttcctgcagaagagtccactccccaccaagagaggcactgcaggactcctagagcaatggctgaagcgggagaaggaggaggaacctgtggccaagcgtccttacagccagtgacacaggactttcagagaccaaggccagggtctgctgcactgctgttctgataataggttcttaacattgtatgtatatgtgtttgctttgggaggaggtggcactgtgttagttgacagttgtgggctcatgtagtcttttttgccatgagtaggagcccctagtggggctggtggacagctttggaagaggtgtcctgctgctgttaccagccatgtgggccccataggggcactgcgcctgctgccctttcctggcagggctggtggagtcttccctcaaagcatgccttacccagctgggaagtctctgccctgatctggtactccttgtagtaagctgttttctgctcagccactgggctctttcacttttttagttcttaaaaatttatttttaagttctaaaataaaataaaaataagttcttaaaatttatttttttcctgaataaattgtatttggta

SEQ ID NO: 545488 - DNA, 206 bp, Homo sapiens
tgacagtgactccagctataactgatattatggaggtcagcacggtgctcactgtgtcgacggaacttgtacagggaggcatgcaccgaatgggtgaatacacgtctgaccaggctccagtgatcacgatactttggaggtcagcatggtgctcacgtgtcgacggaacttgtccagggaggcatgcaccgcagttgtgaatacac

SEQ ID NO: 545489 - DNA, 1784 bp, Homo sapiens
  misc_feature (7)..(7): n is a, c, g, or t
acttctngctaggtacgaggctgggtgttagcggacgcgaggcgacgcggagagggcggcctgggccgaagtgaggcgacgcggggcggcggagtctgagggccggagcggagcggaggcgacgcggggaggggcgagggatcgcggccggtggctgggggccacctgctccccgagcaccggcccccgctccggggagcagagtccggagcgggatccgcggcccacaggttgcgaggggcggtgttgaagaatgtgtgggcgaacatcctgtcacttacctagagatgttctcacgagagcttgcgcctaccaggatcggcggggccagcagcggctcccggagtggagggaccctgataagtactgcccctcttacaacaagagtcctcaatccaacagcccagtgcttctgtctcgactgcactttgagaaggatgcagactcatctgagcgtatcattgctcccatgcgctggggcttggtcccttcttggttcaaagaaagtgatccttccaagctgcagttcaatactaccaactgtcgtagtgataccgtaatggagaaacggtcatttaaggtgcctctgggaaagggaagacgctgtgtcgttttagcagatggattctatgagtggcagcgatgtcagggaacaaaccagaggcagccatacttcatctattttcctcaaatcaagacagagaagtcaggtagcattggtgctgcagatagtcctgagaactgggagaaagtctgggacaactggaggctgctgacaatggccgggatctttgactgctgggagcccccagagggaggagatgtcctgtattcctataccatcatcacagtggattcctgcaaaggcttgagtgacatccaccacaggatgcctgccatattagatggagaggaggcagtttctaaatggcttgactttggtgaagtctcaactcaggaagctctgaaattaatccacccaacagagaacatcaccttccatgcagtctcttctgtggtgaacaactcgcgaaacaacactcctgagtgtctggctcctgtcgacttggtggtcaaaaaggagctcagggcaagtggcagtagccagaggatgttgcagtggttggccacaaagtcacccaaaaaggaagactcaaaaacacctcaaaaggaagagtcagatgttccccagtggtccagtcagttcctgcagaagagtccactccccaccaagagaggcactgcaggactcctagagcaatggctgaagcgggagaaggaggaggaacctgtggccaagcgtccttacagccagtgacacaggactttcagagaccaaggccagggtctgctgcactgctgttctgataataggttcttaacattgtatgtatatgtgtttgctttgggaggaggtggcactgtgttagttgacagttgtgggctcatgtagtcttttttgccatgagtaggagcccctagtggggctggtggacagctttggaagaggtgtcctgctgctgttaccagccatgtgggccccataggggcactgcgcctgctgccctttcctggcagggctggtggagtcttccctcaaagcatgccttacccagctgggaagtctctgccctgatctggtactccttgtagtaagctgttttctgctcagccactgggctctttcacttttttagttcttaaaaatttatttttaagttctaaaataaaataaaaataagttcttaaaatttatttttttcctgaataaattgtatttggta

SEQ ID NO: 545490 - DNA, 348 bp, Homo sapiens
agcacgcggttccgagatggtatagtaagaatctatgaggcaccagagtgttatgaatctcagcgagtggtctttgcagcatgagatctcatgtaagctaagcggtagttgtatttctgggaacccttacaagctctcggtgcagccgagtgaatgtggacgtgtgatatcttgagatgtgtacagacaggaatccacggccctctggctggtggtggccaacgacgcgaacgtcgacttgtctcgtctcgctttctgcatgcactttgcgctaggccaagaacccaaacacctttcatatttacgcccaataccagactcatagattacggtatacacaggataaca

SEQ ID NO: 545491 - DNA, 1344 bp, Homo sapiens
ttgctgttgctgctctttgttctcgtgtgttctatctctctttcgttgtgtgtgttgttcgttcttgtttctttctgttttcattttgtgtctttttgctcctgtatatttcctttttttgttgtatttgattttctgtgttattacttgtgtgctttttgtcgttgcgcttcttttttctctgtgctgtgtccttgtgtgcgtttcacagtcctgctgtgcctgctccccctattttgtggttgtgtccgcggtgttctcatattttcccactctttcttcttgttgggggctgttatgtaatttggctgtttttttttttctagtgtgggtgtcctatggtggtacttggtgtacggtatctctgtgttctagtatctgtggtaatggttttactactttttggcactcccgtatgttggatgtcaacattgtgtggctttatagtcgaaagtccctattatctgtaaaaaggatcacggttagtgaacttcctagcttgtctatgtccctgtaaggtccctatcccttctctgtttcagtgtgagtcagttatttgtttgtgaatacgtctgataacgatttgttatcgctattttagggatgtctgcctgcctttgtatatcgctgtgtgtttgcggtcgttccctgcgaagtgaggactatcgatctttgccgagatgtacccgtatctgccttttgatattctgtgtaggtaaatatggcagaaaacttgaattgatgctcgtagaatcttatgtgctcctggttacgcgccgacagttttcatgtttgcacgccacttctgtgccatggatacctctatcgtgtccaacctggaactggagacgttgtgtagtctacttctctcgtctcgcgtgaagatgtccatagtcgtgcctcttagaatcaaattatatcgtcatgcttactctatatgtcaggaggttattctgtgcacgtgtggcgctggcactcatgttattctaggggcaagtaataatggaatgctcactaagatactccatattttttcctccgtatcaccacagacagtcttctgacaggcgcaactcctccattttccatcaccgcaggtgagaaccctgtggagatgagtcagtgccatgactgagatggaaccgacccctaggttgtagagctaccttgcagttaccgcgagaactttctgacttcacagtctcattttgacagcatgaaatgtcctcatgaagcagtagcattttaaatatcatgttccattgctactcctccctcatgactctaagaagttctctcttctggaatcgcgtgaacccaggaaacggacggtggcagtaagca

SEQ ID NO: 545492 - DNA, 2688 bp, Homo sapiens
  misc_feature (2536)..(2536): n is a, c, g, or t
  misc_feature (2688)..(2688): n is a, c, g, or t
gcgccatgaaccaggccaaagcggagcggagcgggggtgaggagagtcgagggaggtgacgcgcgctgccggggcgaggttgcgaggggcggtgttgaagaatgtgtgggcgaacatcctgtcacttacctagagatgttctcacgagagcttgcgcctaccaggatcggcggggccagcagcggctcccggagtggagggaccctgataagtactgcccctcttacaacaagagtcctcaatccaacagcccagtgcttctgtctcgactgcactttgagaaggatgcagactcatctgagcgtatcattgctcccatgcgctggggcttggtcccttcttggttcaaagaaagtgatccttccaagctgcagttcaatactaccaactgtcgtagtgataccgtaatggagaaacggtcatttaaggtgcctctgggaaagggaagacgctgtgtcgttttagcagatggattctatgagtggcagcgatgtcagggaacaaaccagaggcagccatacttcatctattttcctcaaatcaagacagagaagtcaggtagcattggtgctgcagatagtcctgagaactgggagaaagtctgggacaactggaggctgctgacaatggccgggatctttgactgctgggagcccccagagggaggagatgtcctgtattcctataccatcatcacagtggattcctgcaaaggcttgagtgacatccaccacaggatgcctgccatattagatggagaggaggcagtttctaaatggcttgactttggtgaagtctcaactcaggaagctctgaaattaatccacccaacagagaacatcaccttccatgcagtctcttctgtggtgaacaactcgcgaaacaacactcctgagtgtctggctcctgtcgacttggtggtcaaaaaggagctcagggcaagtggcagtagccagaggatgttgcagtggttggccacaaagtcacccaaaaaggaagactcaaaaacacctcaaaaggaagagtcagatgttccccagtggtccagtcagttcctgcagaagagtccactccccaccaagagaggcactgcaggactcctagagcaatggctgaagcgggagaaggaggaggaacctgtggccaagcgtccttacagccagtgacacaggactttcagagaccaaggccagggtctgctgcactgctgttctgataataggttcttaacattgtatgtatatgtgtttgctttgggaggaggtggcactgtgttagttgacagttgtgggctcatgtagtcttttttgccatgagtaggagcccctagtggggctggtggacagctttggaagaggtgtcctgctgctgttaccagccatgtgggccccataggggcactgcgcctgctgccctttcctggcagggctggtggagtcttccctcaaagcatgccttacccagctgggaagtctctgccctgatctggtactccttgtagtaagctgttttctgctcagccactgggctctttcacttttttagttcttaaaaatttatttttaagttctaaaataaaataaaaataagttcttaaaatttatttttttcctgaataaattgtatttggtaaacttctgcctacattttggaaagtgatgctggtggggaaagttctagatcttacttggtttcttctagaatcagtcttcaggaatggattttgtcacaaatggggcatgggggctttctgaggaaataactacaagtcttggtggtgggctccttattatgtttctttttctttcattcttgatacttggaagtcgtctgaatcctttagcttcaaaccagcctgagtttgagtgcttgccgtagcagaaactatccttaccacaggtgggaaggaaaggaccagtttctagcagtgtcgggccactcctctttcgaacatccctaagggaggcattcacaaaagctgtcccaagcagctggaagaaaacagcttccgagatgaccaggaggactgggcggcgccgagcccagaacgctcctggcgcagcaccgttggcgttggccgattgctgctggtggggggcgggggtgcaggccccagtctctatgcaaatcagggatcagaagatcggaatttccaccaatcagcgggaagcctcggccctgtaactgctaatgggagacagcagcgccacgccacaggcttttcccctggtttcgggaggggtggggagccaggtggggctcccgcccagaccctttcccgaggtccgccctctccgccttttctctaaattcctcttttgagtgccctcccttccggttgagaggcgggggttggcccgtagttgtacactcagtcaccctgcactgtggaggcgggggcctcccttgtggactgatttgcgtgggatttggttgttttattaagagatttaaaaaattcagatgacttactagtatgactgttttgtcatatttgcttccaggttaataaatgacaaaaatgaaaaaaaaaaanggggcgtctaatatcccgagggccatttagctcccgtttgtcaagggccatgggcgataaaaagacggcggtaacgcggtggaaagtccggtttggacccctggggtggaccacgagcggaaatgttgtacatgtgtgtatttaaaaaagtn

SEQ ID NO: 545493 - DNA, 108 bp, Homo sapiens
tcaggaaacgactgaattccatttcaaacttcagttgaaaagccactgaggactctgaagccaaggaggtagacatggacctcactttatcatgttgaagacacacgt

SEQ ID NO: 545494 - DNA, 1626 bp, Homo sapiens
  misc_feature (7)..(7): n is a, c, g, or t
acttctngctaggtacgaggctgggtgttagcggacgcgaggcgacgcggagagggcggcctgggccgaaaggttgcgaggggcggtgttgaagaatgtgtgggcgaacatcctgtcacttacctagagatgttctcacgagagcttgcgcctaccaggatcggcggggccagcagcggctcccggagtggagggaccctgataagtactgcccctcttacaacaagagtcctcaatccaacagcccagtgcttctgtctcgactgcactttgagaaggatgcagactcatctgagcgtatcattgctcccatgcgctggggcttggtcccttcttggttcaaagaaagtgatccttccaagctgcagttcaatactaccaactgtcgtagtgataccgtaatggagaaacggtcatttaaggtgcctctgggaaagggaagacgctgtgtcgttttagcagatggattctatgagtggcagcgatgtcagggaacaaaccagaggcagccatacttcatctattttcctcaaatcaagacagagaagtcaggtagcattggtgctgcagatagtcctgagaactgggagaaagtctgggacaactggaggctgctgacaatggccgggatctttgactgctgggagcccccagagggaggagatgtcctgtattcctataccatcatcacagtggattcctgcaaaggcttgagtgacatccaccacaggatgcctgccatattagatggagaggaggcagtttctaaatggcttgactttggtgaagtctcaactcaggaagctctgaaattaatccacccaacagagaacatcaccttccatgcagtctcttctgtggtgaacaactcgcgaaacaacactcctgagtgtctggctcctgtcgacttggtggtcaaaaaggagctcagggcaagtggcagtagccagaggatgttgcagtggttggccacaaagtcacccaaaaaggaagactcaaaaacacctcaaaaggaagagtcagatgttccccagtggtccagtcagttcctgcagaagagtccactccccaccaagagaggcactgcaggactcctagagcaatggctgaagcgggagaaggaggaggaacctgtggccaagcgtccttacagccagtgacacaggactttcagagaccaaggccagggtctgctgcactgctgttctgataataggttcttaacattgtatgtatatgtgtttgctttgggaggaggtggcactgtgttagttgacagttgtgggctcatgtagtcttttttgccatgagtaggagcccctagtggggctggtggacagctttggaagaggtgtcctgctgctgttaccagccatgtgggccccataggggcactgcgcctgctgccctttcctggcagggctggtggagtcttccctcaaagcatgccttacccagctgggaagtctctgccctgatctggtactccttgtagtaagctgttttctgctcagccactgggctctttcacttttttagttcttaaaaatttatttttaagttctaaaataaaataaaaataagttcttaaaatttatttttttcctgaataaattgtatttggta

SEQ ID NO: 545495 - DNA, 701 bp, Homo sapiens
  misc_feature (126)..(126): n is a, c, g, or t
ctacgacaaacaacattctgttcctcccccaaaatgaacccccgttggaattggaaaggttttaagaaccctgttggttaaatttctttgggaaaactcccacttggaacccccccacgaggcccncttgtgcccccaggacccactttcttggctaacccctctgtctaaataggacaatgtgcctctctcgtgagactttctctacaacttttatacaaatttatgtaaagcttatggagaggaaggattaataagcgccattcgtgccccccctttgcgcctcttgaggaaattgggcctgcctggtttctctaaataatcaattacttttcctaaagatatgccccaggactatgttaatggaaaaaagagttttctcccttgatgaccatatctttaaacatttcttgcatccagtatttcgtaaattgagccaactgacaagattttcatccaggaaaggagcccctgtgggaagagccccagtattcaccattttttcccccattttgtccagaagcgacccatttcaataataataggtgcccaaaaatgaatccggggtcccggagaatgggaaccttttgaattatgattgtcacagagatggtagaattatgatctgactggaaacaatcctgtatcccctccccaagaatcatgggctttttttttgaattaaaaagcagaccaataga

SEQ ID NO: 545496 - DNA, 1775 bp, Homo sapiens
cacgagggggattctgcaccccggccccgggccgtccagtggccgccctcgaggtgaccggttgctggccggcgtgggtcgctgaccccagcggggactggggggaaggacggggagttgggggcaccaagtcacccggaggaggcgaccccagctagctgcgcttgccctgcttcgctggactgtgaagccccctccgctgcggctcttcctgcgctcaggttgcgaggggcggtgttgaagaatgtgtgggcgaacatcctgtcacttacctagagatgttctcacgagagcttgcgcctaccaggatcggcggggccagcagcggctcccggagtggagggaccctgataagtactgcccctcttacaacaagagtcctcaatccaacagcccagtgcttctgtctcgactgcactttgagaaggatgcagactcatctgagcgtatcattgctcccatgcgctggggcttggtcccttcttggttcaaagaaagtgatccttccaagctgcagttcaatactaccaactgtcgtagtgataccgtaatggagaaacggtcatttaaggtgcctctgggaaagggaagacgctgtgtcgttttagcagatggattctatgagtggcagcgatgtcagggaacaaaccagaggcagccatacttcatctattttcctcaaatcaagacagagaagtcaggtagcattggtgctgcagatagtcctgagaactgggagaaagtctgggacaactggaggctgctgacaatggccgggatctttgactgctgggagcccccagagggaggagatgtcctgtattcctataccatcatcacagtggattcctgcaaaggcttgagtgacatccaccacaggatgcctgccatattagatggagaggaggcagtttctaaatggcttgactttggtgaagtctcaactcaggaagctctgaaattaatccacccaacagagaacatcaccttccatgcagtctcttctgtggtgaacaactcgcgaaacaacactcctgagtgtctggctcctgtcgacttggtggtcaaaaaggagctcagggcaagtggcagtagccagaggatgttgcagtggttggccacaaagtcacccaaaaaggaagactcaaaaacacctcaaaaggaagagtcagatgttccccagtggtccagtcagttcctgcagaagagtccactccccaccaagagaggcactgcaggactcctagagcaatggctgaagcgggagaaggaggaggaacctgtggccaagcgtccttacagccagtgacacaggactttcagagaccaaggccagggtctgctgcactgctgttctgataataggttcttaacattgtatgtatatgtgtttgctttgggaggaggtggcactgtgttagttgacagttgtgggctcatgtagtcttttttgccatgagtaggagcccctagtggggctggtggacagctttggaagaggtgtcctgctgctgttaccagccatgtgggccccataggggcactgcgcctgctgccctttcctggcagggctggtggagtcttccctcaaagcatgccttacccagctgggaagtctctgccctgatctggtactccttgtagtaagctgttttctgctcagccactgggctctttcacttttttagttcttaaaaatttatttttaagttctaaaataaaataaaaataagttcttaaaatttatttttttcctgaataaattgtatttggta

SEQ ID NO: 545497 - DNA, 1746 bp, Homo sapiens
ccgcgggcgagcgcgcccgacattagcttgaatacagaccgtgcgtttaaatggccgcgagcagccggcacggtacggaggcgacgcggggaggggcgagggatcgcggccggtggctgggggccacctgctccccgagcaccggcccccgctccggggagcagagtccggagcgggatccgcggcccacaggttgcgaggggcggtgttgaagaatgtgtgggcgaacatcctgtcacttacctagagatgttctcacgagagcttgcgcctaccaggatcggcggggccagcagcggctcccggagtggagggaccctgataagtactgcccctcttacaacaagagtcctcaatccaacagcccagtgcttctgtctcgactgcactttgagaaggatgcagactcatctgagcgtatcattgctcccatgcgctggggcttggtcccttcttggttcaaagaaagtgatccttccaagctgcagttcaatactaccaactgtcgtagtgataccgtaatggagaaacggtcatttaaggtgcctctgggaaagggaagacgctgtgtcgttttagcagatggattctatgagtggcagcgatgtcagggaacaaaccagaggcagccatacttcatctattttcctcaaatcaagacagagaagtcaggtagcattggtgctgcagatagtcctgagaactgggagaaagtctgggacaactggaggctgctgacaatggccgggatctttgactgctgggagcccccagagggaggagatgtcctgtattcctataccatcatcacagtggattcctgcaaaggcttgagtgacatccaccacaggatgcctgccatattagatggagaggaggcagtttctaaatggcttgactttggtgaagtctcaactcaggaagctctgaaattaatccacccaacagagaacatcaccttccatgcagtctcttctgtggtgaacaactcgcgaaacaacactcctgagtgtctggctcctgtcgacttggtggtcaaaaaggagctcagggcaagtggcagtagccagaggatgttgcagtggttggccacaaagtcacccaaaaaggaagactcaaaaacacctcaaaaggaagagtcagatgttccccagtggtccagtcagttcctgcagaagagtccactccccaccaagagaggcactgcaggactcctagagcaatggctgaagcgggagaaggaggaggaacctgtggccaagcgtccttacagccagtgacacaggactttcagagaccaaggccagggtctgctgcactgctgttctgataataggttcttaacattgtatgtatatgtgtttgctttgggaggaggtggcactgtgttagttgacagttgtgggctcatgtagtcttttttgccatgagtaggagcccctagtggggctggtggacagctttggaagaggtgtcctgctgctgttaccagccatgtgggccccataggggcactgcgcctgctgccctttcctggcagggctggtggagtcttccctcaaagcatgccttacccagctgggaagtctctgccctgatctggtactccttgtagtaagctgttttctgctcagccactgggctctttcacttttttagttcttaaaaatttatttttaagttctaaaataaaataaaaataagttcttaaaatttatttttttcctgaataaattgtatttggta

SEQ ID NO: 545498 - DNA, 2849 bp, Homo sapiens
gcgccatgaaccaggccaaagcggagcggagcgggggtgaggagagtcgagggaggtgacgcgcgctgccggggcgaggttgcgaggggcggtgttgaagaatgtgtgggcgaacatcctgtcacttacctagagatgttctcacgagagcttgcgcctaccaggatcggcggggccagcagcggctcccggagtggagggaccctgataagtactgcccctcttacaacaagagtcctcaatccaacagcccagtgcttctgtctcgactgcactttgagaaggatgcagactcatctgagcgtatcattgctcccatgcgctggggcttggtcccttcttggttcaaagaaagtgatccttccaagctgcagttcaatactaccaactgtcgtagtgataccgtaatggagaaacggtcatttaaggtgcctctgggaaagggaagacgctgtgtcgttttagcagatggattctatgagtggcagcgatgtcagggaacaaaccagaggcagccatacttcatctattttcctcaaatcaagacagagaagtcaggtagcattggtgctgcagatagtcctgagaactgggagaaagtctgggacaactggaggctgctgacaatggccgggatctttgactgctgggagcccccagagggaggagatgtcctgtattcctataccatcatcacagtggattcctgcaaaggcttgagtgacatccaccacaggatgcctgccatattagatggagaggaggcagtttctaaatggcttgactttggtgaagtctcaactcaggaagctctgaaattaatccacccaacagagaacatcaccttccatgcagtctcttctgtggtgaacaactcgcgaaacaacactcctgagtgtctggctcctgtcgacttggtggtcaaaaaggagctcagggcaagtggcagtagccagaggatgttgcagtggttggccacaaagtcacccaaaaaggaagactcaaaaacacctcaaaaggaagagtcagatgttccccagtggtccagtcagttcctgcagaagagtccactccccaccaagagaggcactgcaggactcctagagcaatggctgaagcgggagaaggaggaggaacctgtggccaagcgtccttacagccagtgacacaggactttcagagaccaaggccagggtctgctgcactgctgttctgataataggttcttaacattgtatgtatatgtgtttgctttgggaggaggtggcactgtgttagttgacagttgtgggctcatgtagtcttttttgccatgagtaggagcccctagtggggctggtggacagctttggaagaggtgtcctgctgctgttaccagccatgtgggccccataggggcactgcgcctgctgccctttcctggcagggctggtggagtcttccctcaaagcatgccttacccagctgggaagtctctgccctgatctggtactccttgtagtaagctgttttctgctcagccactgggctctttcacttttttagttcttaaaaatttatttttaagttctaaaataaaataaaaataagttcttaaaatttatttttttcctgaataaattgtatttggtaaacttctgcctacattttggaaagtgatgctggtggggaaagttctagatcttacttggtttcttctagaatcagtcttcaggaatggattttgtcacaaatggggcatgggggctttctgaggaaataactacaagtcttggtggtgggctccttattatgtttctttttctttcattcttgatacttggaagtcgtctgaatcctttagcttcaaaccagcctgagtttgagtgcttgccgtagcagaaactatccttaccacaggtgggaaggaaaggaccagtttctagcagtgtcgggccactcctctttcgaacatccctaagggaggcattcacaaaagctgtcccaagcagctggaagaaaacagcttccgagatgaccaggaggactgggcggcgccgagcccagaacgctcctggcgcagcaccgttggcgttggccgattgctgctggtggggggcgggggtgcaggccccagtctctatgcaaatcagggatcagaagatcggaatttccaccaatcagcgggaagcctcggccctgtaactgctaatgggagacagcagcgccacgccacaggcttttcccctggtttcgggaggggtggggagccaggtggggctcccgcccagaccctttcccgaggtccgccctctccgccttttctctaaattcctcttttgagtgccctcccttccggttgagaggcgggggttggcccgtagttgtacactcagtcaccctgcactgtggaggcgggggcctcccttgtggactgatttgcgtgggatttggttgttttattaagagatttaaaaaattcagatgacttactagtatgactgttttgtcatatttgcttccaggttaataaatgaccaaaaatgaccacaaacacaaaaacaacaaacaaaaaacaacaaacacacaagaaaagaaaagcgaaaatagaatgagaagaacaagagacgacaacaagcagcatgaccaacaaataagagcgaggaggcagaagtaagcacaggaggcagaaataagcagcaaccaccttgtgtcgaaaaggaggagccgccaggagagacgaaagtacgacacgacagccagagcgcggaacacacgagtagaggagaagagagcggagaaaacgaaccaaccaccagtgggggtgagcagagaggagacaactaggagagtaagccggcgagacaaat

SEQ ID NO: 545499 - DNA, 2250 bp, Homo sapiens
  misc_feature (2098)..(2098): n is a, c, g, or t
  misc_feature (2250)..(2250): n is a, c, g, or t
gcgccatgaaccaggccaaagcggagcggagcgggggtgaggagagtcgagggaggtgacgcgcgctgccggggcgaggttgcgaggggcggtgttgaagaatgtgtgggcgaacatcctgtcacttacctagagatgttctcacgagagcttgcgcctaccaggatcggcggggccagcagcggctcccggagtggagggaccctgataagtactgcccctcttacaacaagagtcctcaatccaacagcccagtgcttctgtctcgactgcactttgagaaggatgcagactcatctgagcgtatcattgctcccatgcgctggggcttggtcccttcttggttcaaagaaagtgatccttccaagctgcagttcaatactaccaactgtcgtagtgataccgtaatggagaaacggtcatttaaggtgcctctgggaaagggaagacgctgtgtcgttttagcagatggattctatgagtggcagcgatgtcagggaacaaaccagaggcagccatacttcatctattttcctcaaatcaagacagagaagtcaggtagcattggtgctgcagatagtcctgagaactgggagaaagtctgggacaactggaggctgctgacaatggccgggatctttgactgctgggagcccccagagggaggagatgtcctgtattcctataccatcatcacagtggattcctgcaaaggcttgagtgacatccaccacaggatgcctgccatattagatggagaggaggcagtttctaaatggcttgactttggtgaagtctcaactcaggaagctctgaaattaatccacccaacagagaacatcaccttccatgcagtctcttctgtggtgaacaactcgcgaaacaacactcctgagtgtctggctcctgtcgacttggtggtcaaaaaggagctcagggcaagtggcagtagccagaggatgttgcagtggttggccacaaagtcacccaaaaaggaagactcaaaaacacctcaaaaggaagagtcagatgttccccagtggtccagtcagttcctgcagaagagtccactccccaccaagagaggcactgcaggactcctagagcaatggctgaagcgggagaaggaggaggaacctgtggccaagcgtccttacagccagtgacacaggactttcagagaccaaggccagggtctgctgcactgctgttctgataataggttcttaacattgtatgtatatgtgtttgctttgggaggaggtggcactgtgttagttgacagttgtgggctcatgtagtcttttttgccatgagtaggagcccctagtggggctggtggacagctttggaagaggtgtcctgctgctgttaccagccatgtgggccccataggggcactgcgcctgctgccctttcctggcagggctggtggagtcttccctcaaagcatgccttacccagctgggaagtctctgccctgatctggtactccttgtagtaagctgttttctgctcagccactgggctctttcacttttttagttcttaaaaatttatttttaagttctaaaataaaataaaaataagttcttaaaatttatttttttcctgaataaattgtatttggtaaacttctgcctacattttggaaagtgatgctggtggggaaagttctagatcttacttggtttcttctagaatcagtcttcaggaatggattttgtcacaaatggggcatgggggctttctgaggaaataactacaagtcttggtggtgggctccttattatgtttctttttctttcattcttgatacttggaagtcgtctgaatcctttagcttcaaaccagcctgagtttgagtgcttgccgtagcagaaactatccttaccacaggtgggaaggaaaggaccagtttctagcagtgtcgggccactcctctttcgaacatccctaagggatcccttgtggactgatttgcgtgggatttggttgttttattaagagatttaaaaaattcagatgacttactagtatgactgttttgtcatatttgcttccaggttaataaatgacaaaaatgaaaaaaaaaaanggggcgtctaatatcccgagggccatttagctcccgtttgtcaagggccatgggcgataaaaagacggcggtaacgcggtggaaagtccggtttggacccctggggtggaccacgagcggaaatgttgtacatgtgtgtatttaaaaaagtn

SEQ ID NO: 545500 - DNA, 2203 bp, Homo sapiens
  misc_feature (2051)..(2051): n is a, c, g, or t
  misc_feature (2203)..(2203): n is a, c, g, or t
gcgccatgaaccaggccaaagcggagcggagcgggggtgaggagagtcgagggaggtgacgcgcgctgccggggcgaggttgcgaggggcggtgttgaagaatgtgtgggcgaacatcctgtcacttacctagagatgttctcacgagagcttgcgcctaccaggatcggcggggccagcagcggctcccggagtggagggaccctgataagtactgcccctcttacaacaagagtcctcaatccaacagcccagtgcttctgtctcgactgcactttgagaaggatgcagactcatctgagcgtatcattgctcccatgcgctggggcttggtcccttcttggttcaaagaaagtgatccttccaagctgcagttcaatactaccaactgtcgtagtgataccgtaatggagaaacggtcatttaaggtgcctctgggaaagggaagacgctgtgtcgttttagcagatggattctatgagtggcagcgatgtcagggaacaaaccagaggcagccatacttcatctattttcctcaaatcaagacagagaagtcaggtagcattggtgctgcagatagtcctgagaactgggagaaagtctgggacaactggaggctgctgacaatggccgggatctttgactgctgggagcccccagagggaggagatgtcctgtattcctataccatcatcacagtggattcctgcaaaggcttgagtgacatccaccacaggatgcctgccatattagatggagaggaggcagtttctaaatggcttgactttggtgaagtctcaactcaggaagctctgaaattaatccacccaacagagaacatcaccttccatgcagtctcttctgtggtgaacaactcgcgaaacaacactcctgagtgtctggctcctgtcgacttggtggtcaaaaaggagctcagggcaagtggcagtagccagaggatgttgcagtggttggccacaaagtcacccaaaaaggaagactcaaaaacacctcaaaaggaagagtcagatgttccccagtggtccagtcagttcctgcagaagagtccactccccaccaagagaggcactgcaggactcctagagcaatggctgaagcgggagaaggaggaggaacctgtggccaagcgtccttacagccagtgacacaggactttcagagaccaaggccagggtctgctgcactgctgttctgataataggttcttaacattgtatgtatatgtgtttgctttgggaggaggtggcactgtgttagttgacagttgtgggctcatgtagtcttttttgccatgagtaggagcccctagtggggctggtggacagctttggaagaggtgtcctgctgctgttaccagccatgtgggccccataggggcactgcgcctgctgccctttcctggcagggctggtggagtcttccctcaaagcatgccttacccagctgggaagtctctgccctgatctggtactccttgtagtaagctgttttctgctcagccactgggctctttcacttttttagttcttaaaaatttatttttaagttctaaaataaaataaaaataagttcttaaaatttatttttttcctgaataaattgtatttggtaaacttctgcctacattttggaaagtgatgctggtggggaaagttctagatcttacttggtttcttctagaatcagtcttcaggaatggattttgtcacaaatggggcatgggggctttctgaggaaataactacaagtcttggtggtgggctccttattatgtttctttttctttcattcttgatacttggaagtcgtctgaatcctttagcttcaaaccagcctgagtttgagtgcttgccgtagttgtacactcagtcaccctgcactgtggaggcgggggcctcccttgtggactgatttgcgtgggatttggttgttttattaagagatttaaaaaattcagatgacttactagtatgactgttttgtcatatttgcttccaggttaataaatgacaaaaatgaaaaaaaaaaanggggcgtctaatatcccgagggccatttagctcccgtttgtcaagggccatgggcgataaaaagacggcggtaacgcggtggaaagtccggtttggacccctggggtggaccacgagcggaaatgttgtacatgtgtgtatttaaaaaagtn

SEQ ID NO: 545501 - DNA, 709 bp, Homo sapiens
tctctctctctctctctctctctcgctctctctctatccggctcttactctgtatgagggtcgctcctgcctactgatacacagttcgccagcatgtgcttgcaggggaccaaaccgatgggactgttcagtgctatccgggagcctgaacttcatgactggggcacacacatacacctaccctctggcacagctgagggcgctagtcacagtcgttgtttgccactttctataaattcatcctcctatccactaaccatcataaactctttctcacgtcctgatatatcctcgcggattcatttcacttgcattgaaaatacactgagatctatgccttaatcacttcacgccagaaatctgcgccttcctacaaaactataggggggcgcctggcaccaatatcccttatgacgtgccttactacaagtcactgtacctctaacgacaccgccttgactgcgtaaacgccggcagcatacctacggcatgagacctgacaaacatgcccccttttcccagctggagccctgctaactagccctacaccgatcgaccttccgaacagtttacccacactgaatgaccacaggctctatcgcaaactgccacattcgcttaacacgctcgtctaactgtagtcgaacaacctatatctttgacattcgttccactactgtcccaacttcgagcaacattcaatcttccc

SEQ ID NO: 545502 - DNA, 2545 bp, Homo sapiens
  misc_feature (2393)..(2393): n is a, c, g, or t
  misc_feature (2545)..(2545): n is a, c, g, or t
gcgccatgaaccaggccaaagcggagcggagcgggggtgaggagagtcgagggaggtgacgcgcgctgccggggcgaggttgcgaggggcggtgttgaagaatgtgtgggcgaacatcctgtcacttacctagagatgttctcacgagagcttgcgcctaccaggatcggcggggccagcagcggctcccggagtggagggaccctgataagtactgcccctcttacaacaagagtcctcaatccaacagcccagtgcttctgtctcgactgcactttgagaaaggtgcctctgggaaagggaagacgctgtgtcgttttagcagatggattctatgagtggcagcgatgtcagggaacaaaccagaggcagccatacttcatctattttcctcaaatcaagacagagaagtcaggtagcattggtgctgcagatagtcctgagaactgggagaaagtctgggacaactggaggctgctgacaatggccgggatctttgactgctgggagcccccagagggaggagatgtcctgtattcctataccatcatcacagtggattcctgcaaaggcttgagtgacatccaccacaggatgcctgccatattagatggagaggaggcagtttctaaatggcttgactttggtgaagtctcaactcaggaagctctgaaattaatccacccaacagagaacatcaccttccatgcagtctcttctgtggtgaacaactcgcgaaacaacactcctgagtgtctggctcctgtcgacttggtggtcaaaaaggagctcagggcaagtggcagtagccagaggatgttgcagtggttggccacaaagtcacccaaaaaggaagactcaaaaacacctcaaaaggaagagtcagatgttccccagtggtccagtcagttcctgcagaagagtccactccccaccaagagaggcactgcaggactcctagagcaatggctgaagcgggagaaggaggaggaacctgtggccaagcgtccttacagccagtgacacaggactttcagagaccaaggccagggtctgctgcactgctgttctgataataggttcttaacattgtatgtatatgtgtttgctttgggaggaggtggcactgtgttagttgacagttgtgggctcatgtagtcttttttgccatgagtaggagcccctagtggggctggtggacagctttggaagaggtgtcctgctgctgttaccagccatgtgggccccataggggcactgcgcctgctgccctttcctggcagggctggtggagtcttccctcaaagcatgccttacccagctgggaagtctctgccctgatctggtactccttgtagtaagctgttttctgctcagccactgggctctttcacttttttagttcttaaaaatttatttttaagttctaaaataaaataaaaataagttcttaaaatttatttttttcctgaataaattgtatttggtaaacttctgcctacattttggaaagtgatgctggtggggaaagttctagatcttacttggtttcttctagaatcagtcttcaggaatggattttgtcacaaatggggcatgggggctttctgaggaaataactacaagtcttggtggtgggctccttattatgtttctttttctttcattcttgatacttggaagtcgtctgaatcctttagcttcaaaccagcctgagtttgagtgcttgccgtagcagaaactatccttaccacaggtgggaaggaaaggaccagtttctagcagtgtcgggccactcctctttcgaacatccctaagggaggcattcacaaaagctgtcccaagcagctggaagaaaacagcttccgagatgaccaggaggactgggcggcgccgagcccagaacgctcctggcgcagcaccgttggcgttggccgattgctgctggtggggggcgggggtgcaggccccagtctctatgcaaatcagggatcagaagatcggaatttccaccaatcagcgggaagcctcggccctgtaactgctaatgggagacagcagcgccacgccacaggcttttcccctggtttcgggaggggtggggagccaggtggggctcccgcccagaccctttcccgaggtccgccctctccgccttttctctaaattcctcttttgagtgccctcccttccggttgagaggcgggggttggcccgtagttgtacactcagtcaccctgcactgtggaggcgggggcctcccttgtggactgatttgcgtgggatttggttgttttattaagagatttaaaaaattcagatgacttactagtatgactgttttgtcatatttgcttccaggttaataaatgacaaaaatgaaaaaaaaaaanggggcgtctaatatcccgagggccatttagctcccgtttgtcaagggccatgggcgataaaaagacggcggtaacgcggtggaaagtccggtttggacccctggggtggaccacgagcggaaatgttgtacatgtgtgtatttaaaaaagtn

SEQ ID NO: 545503 - DNA, 948 bp, Homo sapiens
cgcctttgcccggggaggaagagaaatctctggccttatctcctcctgttccccggggccgccgaggcgtcgtcctgggggagccatctcctcaaatcaggacactcaaggcctccctccctcgcaagcggggccgtccccccaagtcagggccaggagcccccactggtgcaggtgcatgggggtgacctagctcccagctaggtcatggcagtgggcgggagcgacctcctcctgcatcgatgatcacgggtggtgccctatacggtctctgcaaggttcagcggctgtggcgcctgagggctctggccccagtgaatggccccacacttctgcccggtgtgcctgcgggccttcccctaccgtctccgacctggagcgccaacagtcatctctgcaactcagagctgaagccgaaccagtgcaaggttagcggcaagaccttgcaaggcgctccagccacctgcggcggcgctgcagcatcctatgccggcctgcgggccttcgcgtgcgccgctgtgcccccgggcgtcttgcctgcgaggtgggcgagctggtgcacgcatgcacgcgtgcgctcgggggagcgcccgtaccagtgccccatctgccggctgcgcttcacagaggccactgcgctccggcgccatgcgaagcgcaagcatccggaggccatgggggtacccctgtgtgcaccagatcccagcgttccgcatcgtcgtgggacgaggagggcatcccggccaaacagggggcgaaggagagacgagacacagaggggaaaggggagccggctgaaccgagaccccggacaaagctcccgggcaggttaaagccaggagtttggtgtgttgggctgatccaggggcgggacaccttgtttccggggctccgcgtgggacagtgcgggggcgactcacactggggtctcctggtcaccccctccaa

SEQ ID NO: 545504 - DNA, 1369 bp, Homo sapiens
acacaaagaaaagataagcgaggtgaaggaaatcccagttaccctcattcagtccattacacattcgatacaggtatcaaaatatccatcaggcacctcaaagcacatgtacaactcttaatttcaaccattattgcacacagcaacaaacaaaaccggccagcagcattaaaaccaaatcacacacataagcaacacacagcaggcccactgttcaggtgacagaactccgcatgcttccagcaacagcagcaatcagcagcgctcgcttcaccgtgggcaacacggccagtataacaaaatgggtttagggtttttctgttattgtttatagtatttcacccattggtcacatccagcatagttcacaccatcaagtaggtcagaactatcgctagcacatttgtcaatcaaagccattatgtctcaagcagtgtcacaacagtcccaacattcacaaacagtcatctgcacagcaacacaaccagcagtcatggccacaatgaagcgcgtaaagcaccattgtattccacacacaacagaagacaggctaaagcgcgtaccatcacccaagccacatctcatcctataactccctaaaagcaatgggtccattagcccatatccatcaacaagagacgcagtgccattgcacacagggcaaaattacaggcatacattaagggatgccatatatatatattaaaaacaggcaattcttaataacaccggaaagaggatccagacaatatcaaggttaggcatatcacaagaaagtaaggagacccgaaattagtggataagacaaacataaatatcattaaagaacaagaggcgccaagaaatatttcatggcgccccttgcggaactattcacactgggctaattgtcacaacaattggtgaccctagggtgtaaaccaaggatcaatgggaaacattcgatcggccaatgatgtgacagcggataaatgcaccacaggaaatatcactgatgcagagaaatagatttatcgagagagacaccattatcacattgaccaaaggcacacgaccacatgaacacacaccgcgatgacgcgcactgtggtacaccccacaaacaccagacgaaagacgggctacacacacagaataagtgacatcggcgccacgagcacaacaagaacaagaactacgcaaatgaaagaacacaaacaagccaacaacaatacacccacatagcaggacaccaaccgaaccgaacgcacaaaaacacgaactcaccagcgccacgagcacaccaaaacaccaacaaacacgcaccacgcacaaactgaacacacacacacaaccaacaacacaacacggcaaaacaacaagaacacaa

SEQ ID NO: 545505 - DNA, 322 bp, Homo sapiens
  misc_feature (123)..(123): n is a, c, g, or t
aatgaggacacattttccaggaggggtaggaagactgggattcctgaggaaagacaggaaagggagggacaaagagtaaaaaaggccctcagaggaaaggggccaggggacaagctgcttctntgcaattttacaggcccaagtccaaaaggcggacagccacccaggggactgatattgctctttgatacccacatatctgctttattgtttcagaaatctgtccattatgaggatgaaaattctcttttaaaacttctctttcatagaaaaatacctctattttcttaggctgtagcaggtctgacagggttctgtatgc

SEQ ID NO: 545506 - DNA, 404 bp, Homo sapiens
gacttacactttgaaagacgtgatggatttatataagcagagagaaactggaaggacagggttattagaggagagtggggatgagtatttggagaatcactggaagatagctctaattgagctggatgaagtatgttgaatagtgagtgacaagtagatgatcagggtggatctggattagtggatcttaactaaaggttcacctcaataacctaagactcttccaagtacaagaggggcccatttccaaatctgctgactcaatagtgagaatgggagtggaatggggcccaggtacaagtatttgaaagaggtccccaggtgattgtgatgtgcattctttgccgagaggcatcggcctggatgacagagggcaaagacataaacagtatattagggagact

SEQ ID NO: 545507 - DNA, 112 bp, Homo sapiens
gagaggcagtgcagagggcacggagcacagatgtgaggaagcggcgccaatgtcaccacgtgagaagcgggatgtgtgctggcggaccaggacgcagaggctgcgtgtagcg

SEQ ID NO: 545508 - DNA, 850 bp, Homo sapiens
  misc_feature (217)..(217): n is a, c, g, or t
ggtgtggtccaggctctgggcacagcggcctgtcccttgcgagccataacgtgcccccagagtgtaggggggcttgcggaagccatagggggctgctcgggatgcgtggaaggcgagaaacctagttctcagggagggaaggggatggaggccagagtctcgcagtgggtgatgcttttgttgcatgcattcaatcgctaccccgcgtctctccagnagtcacgcagggtggaccatggggtagaggcgaaacgggcgccgatgcccacgcattcgcatcctcctcgtcatcatttgcatatgtggcattgagttgtcaccccctcttgaagcaataacgtccaaggagactcccaggccccatggtacccctgtgggtgggctagggatgccccaatgagctcgcaagcgagcctcctccagggggtaggaagaagtcatcgtgcactctagtgccacgtgcaagagcaaagtacatcagtataattatatcttgggggagttttgggccagggaagggcgcagggaaattgggggcaaagttcagggtggccaggagacctctatggattgtaacagaagaactctcatttataatgtaattattcgcgtgggaaaggaagatacccgttctaggtggtgattgaaacgtttgtgagatgagaggaaagggatgatataatagccgagctcaaggattaacaaggcgaataaaggatgcgggggtgtatcccagggtgggggcagaagggttcttcgaagagggccatgggggcttgcagggttttggtggaccaccgttttggggggggcatggggttggtctggcggggcggccataagggggggg

SEQ ID NO: 545509 - DNA, 671 bp, Homo sapiens
gagagaactcgtctcgagttttttgagggttttggtttggagggggaatgctggaaattgtacatgggtatggaaacttttcatataagtaatgctagggtgagtggtaggaagtttttccataggaggtgtatgagtgggccgtaccggaatcgggggtatgctgtccgaattcataaaaacagggaggttaaaagtagggtctgggtgacaacaatatgttgtgtaaagtttcaggggagcagtgcgtcatatgttgtccctaggaaaatggtcgcgggtgagggtgttaataataataactgtcggtgtatccggctatgaacaatagggcgaaggggcctgcggggtatccgatgttagaacgcctgagcactagtccggagtcccacttcggcaaggctcgaaaggggagcttccggatgggctctctggccaaatgtggataataacatcatatatatggggcccaaagggggcccactagcagtggacaagagcaccgtacctccaagacgccgtgtaccatagcgagagctaaggtagacatcacggcgcgagtgcaaacagcggtgtaaaacagcgacgcccgccttcatacctagaggaaagtgctggaacagcacacgcaaacggatcgcgcacaggagagactccaccccaatgcaaac

SEQ ID NO: 545510 - DNA, 100 bp, Homo sapiens
tgtagaggacccggtatattggatagcttgaggatttcgtgggaacgggaaaaccttcatataaatctagacagaagcattctcagaaacttcttggtaa

SEQ ID NO: 545511 - DNA, 260 bp, Homo sapiens
tgacatggtcaacatcatcttctttattagtcttgctagcggtctgtgttgttgatcttttcaaaaaaccagctcctggattcattgatttttttgaagtgtatatagtgtctcttatctcctttagttctgctctgaacttattttttgacttctgctagcttttgagtttctttgctctggcttctctagtccttgttcttttttttttcttcttctttttttttttttggaaatgttttggaaatttttaaaattgg

SEQ ID NO: 545512 - DNA, 1013 bp, Homo sapiens
gtctattctactgatcatgacccacgatggtctagcaactcactgcacctcaatgattataggccacttgagcttgcacctgggtgccagagatatagtctcgcaagggaaggacttaatcaatattaccatcttttaaatagccccgtgaattaactctcactttttacacgtgctgtcgtaatgtatatttaaacctagataaattataacttgggtgataggagaagaccaaatcataacgagcactccagatagctcccacgtgatctaccataaagcaacaagtgtggatatgcagctaaaccctggtgcatagtaatagcagcaattatgtaggaggataaccttattatagggtagacctgagttaggagctttactcagtaccattgtcttgagtactctcgcgtatgtcgcaaaaaaaaaaaaacactcttcacgatcccaatctacttgaagtctattgcctaataatcgcacacctctacgtatacattacacgcttagtaaaatctttaatcttcgtgaggatcactagagctatggaatcaccgatacatgacgcgattaattaaggcccatatgatcatttgacaaggatgatcatgttaagaaataaatgaatacccatcctattcacgatgatcgaccgtcactggcggaaaactagttaacttgatagacacaggacggtttacggcggtgcaagcatgcgcgaactgacccgtgactcgggcttcgacgactatacccttaatttctacattgacaacgtctacatcaacactcgcaaagttttgtgacgcggaattcttattctactcgcttattatgacaggagagcgtgaatagctggaaagtataaaggttacgcccatggaaagatcatttacctcacctcccggcaatataatgcacgtggtccatgcggaccttggcgaaccggactggaatcctgatccttttaatagccccgccaacatgggaggaaggccacaacacagtggagt

SEQ ID NO: 545513 - DNA, 414 bp, Homo sapiens
gctgacttagaggatcccaagctccaacaagaacagaaccacaaataggagcaatgaatcagtttctagcatctctgctatacacagggcactatatcttatagaaacatagctagtacaagaacaactgtactaattacattaccccttgcttcccagtcaaaaaaggctatagagaaaaacactttaaattgtactctaatacaaatttgttcgccaacttaagcttcaacttactcaaagagttatcgtattgtaaactgcagaaaatagaataggcattcaataaatctgctcacaattaacaattaagcaatagacacttgaataaatatagcatgtattacttatttgttaagccttacacttacgatgagcagatggtttatcactatatagtcttgttgggagctt

SEQ ID NO: 545514 - DNA, 411 bp, Homo sapiens
gcgctccctagctctcgctggctttgtcacccggaccgctccacgggtggctgccatatcccacagttaaaaggaggctgcagggacggaggagctgcctctgctgcatgttgggcctcagggggaggcggtctggtggacggggtcttctgaagtgggaggaggaaaggcagaggaacagggtccagggtccacagaggaagagcaggaggcccacggggaacctcgaccaaagttctctgccaaggcagggcagggccacctgccaggacgtccaggccaaactcttgcctcttcaggagctgcactcaaacccggaagccaagagtcaagctgagtctgggggaaataaagtttataataatagacttgaatgtggaaaaataaagcaaatttaataagtttaaaaaa

SEQ ID NO: 545515 - DNA, 757 bp, Homo sapiens
  misc_feature (298)..(298): n is a, c, g, or t
ctttggagccggcagcccagggtccctgctggatcagagaaatagaagcacccgaagacggttagtggcaattccttgacccggttagcttccaaatgaaggccatttgtccaccaggcattgaaaagacatgacttacccagtccggcatcggacttgaaaaatcgaaattgacatcactcagctgttacatttcacatccgattcagcccccttttatttccatgtgcttttcgcagccttcctgtgttggatgaaagagaataagaattcagctagacaggaggcactctatccntgtcccgtccgaactccaccactccactctcaatccacctcccgatctgtgccgcagacctacctcgactactaggacctgaggcagctccttagcagagacccctggggtttagctgactctgggggtcaggggttccatgtcccacaaacttcgcaagacagccctgaagtcacaagtgctttcttttaagtggcattggcaataggacgtgtaatgatggcagtagaatctgaatctcggatcccaggcagggttcacatttccaaacctttttgatttcccctgaactcataatggctggatcctattagatctacaaacttatacagtgacatcgtacaggtaacttgactaggccatttacaaaaacaaataagatttactcacttgtaagtcacccgcagttacctaagttaggctaacggagacttggacaggactggatatttctggcca

SEQ ID NO: 545516 - DNA, 141 bp, Homo sapiens
tttttttttccctgtggcgatccactcaattgagataaatatagtgcttacattttcagtcagtacgtggtccttatcattcctttaataatacacccagaggctgggcacagtggctcatgcctgtaatcccagcacttt

SEQ ID NO: 545517 - DNA, 645 bp, Homo sapiens
  misc_feature (30)..(30): n is a, c, g, or t
  misc_feature (64)..(64): n is a, c, g, or t
  misc_feature (78)..(78): n is a, c, g, or t
  misc_feature (189)..(189): n is a, c, g, or t
  misc_feature (375)..(375): n is a, c, g, or t
  misc_feature (378)..(378): n is a, c, g, or t
  misc_feature (479)..(479): n is a, c, g, or t
  misc_feature (581)..(581): n is a, c, g, or t
  misc_feature (583)..(583): n is a, c, g, or t
  misc_feature (595)..(595): n is a, c, g, or t
aggttacagggctcacccgtagattcagtntggtctctccccatcatgcctcttacttccagtntgggcttctttttngtgggccccgacttcttccctcccagttattctctcgaatggtgattctttcctcattccagggccaccaaggctcaggtgggggcctgtccatcaccagttgagccaganaagccctcccatcggacgtcctgtggctgggcccagacatgggtgccgccgcctgtggggctgccctgccgggggggccagggtgtcttcagtgccctgggcctgcgcgtgggggggggtgggcggaggtctggggctctttgagcccaaaggcatcacggccctctcggaagccgcgggccccgnagnggtccccctcgcagccagcgcgggaggggtggcatcctccttgccgacgccgcccccggggagcccctctccctcagcctccggcctggggtccacacccngggcctcaggctctgcccgcggggttgcgtcccgggtcgcgaagcctgcgctgcagggctgtcaaagccacttgccttaaccagggcagcttcttcagttancngctgcaggactntttggatggctgtttcctcaacctcgtcgtcatcactgtttgggaggcga

SEQ ID NO: 545518 - DNA, 1180 bp, Homo sapiens
gacgggagttcctccttgctctcgcccctactctttctggtgttagatcgagctaccctctaaaagcagtttagagtggtaaaaaaaaaaaaaaaaccacaccaaacggctcggagccacaaaggggatgaaatttcttcgggacatcctcctggttctcccgttactggatcgtctggctcccctaaagtccttcgtggaacgcttttatatccctaagagggaggaaaatcagtcacccggcgaaatcgtgctgattacagggagctggcgcttggaacttggggagactgactgcctattgaatttgtgctaaacttaaaagcaagcgtggtcctcgggcggatataaataagcatgtggacctggaggaacaccgtctgccaaagtgcacagggacctggcgtgccccaagggcttccaatacccctttgttggtccacaccttgggacgaaaaccgcgacgacacgcatttttcaacaagcttcttgccacaaacacaccggtcgaacggcgccggcacaatcttggggcaacactcggtgcacgacacttctccacggtgacaactaaatcgcctgggttggtaagtcttattaccccttccagcaaatttcgggcttggggcctaacgccgaaagagaaatgccccttccggggatttttgcacacaacaagagcgacttttttggagaaaagcgtttaaacaggtggtcacacctttgtaggcccccacatttttgccctggcgaaagtctcaatcccaaagccggggccattatcaccatagtcgccgtggtcacacagtgcacgcgcagcagcacaatttgatgccccctgtgtggtgcccataatgtgggttcacccccttggtggagggaaccttacccggacgagaagtgcatgtgagcacaaccacatgtctgttgtccacgaggcatcccccccattgtactataaaaagcggtgggacattacacaccgtggtgtcccaccagacgaccaacagagatttgtgcgccactgaacgacgatgatcggagaaattctcgccgtgaaagaacactttctgtgcgaaaacgcagatgttgaacacacgtgggatcttgtcgccttttacgaaccaacataacagcgcggcgacggtctcgtaacaagctcccaaccattgtgtgtccc

SEQ ID NO: 545519 - DNA, 295 bp, Homo sapiens
tgcagcacacttggttgtccccagtttgcggccattatgggtcaagctgacatccaacacctgggtgcaggtttatgtgtacacctcaagttaacaatcatggtgtgtccatactaagtggtatatattgtaccagtcatgttcagaaatgcaacaatgacccactgccttctccaagtggctgtagtcatttacatctcacacagccatcaatcacaagttcctgttcacattgatacacatcttccacaccattgggtgttgtccagtgttcctgcattctggccatgacaac

SEQ ID NO: 545520 - DNA, 119 bp, Homo sapiens
aaaaaaagccttttttgttttcccccccggcccccaagggggggtgaaatgaaaaaaagcattttttgttttccccccaggcccccaaggggggtttttttttttcctcctaatgttga

SEQ ID NO: 545521 - DNA, 412 bp, Homo sapiens
tgcactgattctgcaggtgatctagaggacccctgccagctgaggttgtcaggtacaatgaaaccaaacatggcggtatggaagcagattattctgccatttatccaggatctatatgacgttgcacgtcaaatctggggctgatcacactccacacttgctgtagcctgcctgtgaggttcacaacaattttcccagctctgtggtcatctatgatatcaaattcgccatatgtaaccatgtctttctcatcacatgtgagaaagcggacgatgacttcggagcacggtctaatatgcaccttgcgtttgcctctctttgcggcattgttgatactcttgagagcatctgccaagacatgcatgcgcaccattgtggcggcgcggaaagatggcggaaagaggagagtggg

SEQ ID NO: 545522 - DNA, 130 bp, Homo sapiens
cctttttccccggggggccccccccttttgggggcccccgggttttttttcccccccccccccccccccccctggggttttttttggggttgggggggggggggggaataaaaaagggggttttttgcca

SEQ ID NO: 545523 - DNA, 997 bp, Homo sapiens
tagtctcgcgcagtctcagctgtagctgcaggactgagccgtgcacacggaggagaccccggaggaggcgacaaacttcgcagtgccgcgacccaaccccagcccgtgggtagcctgcagcatggtccatttgttccatgcacaactgtggcggcacctggtcctggccaggctcctgcagtttagcagatgttcttggaaggagacagtcagaggaccgcgcttttcgcgtgcgcatcgcgggcgacgcgccactgcatgggcgtgctcgggctggcgccctcaccatcccttgccacgtccactacctgcggccaccggcgagccgcgggctgtgcttgggctctccgcgggtcaagtggactttccgtgtcccggggcctgggaggcagaggtgctggtggcgcggggagtgccgcgtcacggtgaaccgagggcctaccggttccgccgtggcactgcctgcgtacccaggcgttcgctcaccgacgtctccctgggccgcctgagccgagctgcgcccaacgactcaggtatctattcgctgtgaggtccagcacggcatcgattgacagcagtcgacgctgtggatggtcaggtccaaggggtcgtctttctctaccgagaggctcttgcccgtatgctttctcctcttctggggcccaggaggcctgttgcccgattggagcccctcaatcgctaccccggagcaactctattgcggctaccttggggggctatagcatgtgattgctgtggcatgacggctccagacgggacgggttccattccaacgcaagaaaaggctgtcacggcgcatgatgttcccgggtccgacatatgggtgggcaccggatgacctatgatgtgtcgcatgcggacccataggaaacggccgctacaccacagaggactggagacagcacgcgaacgaagagacgcacgccctcaatacgcgacgcaaccagctataagtgtacccacagtggcgggaata

SEQ ID NO: 545524 - DNA, 178 bp, Homo sapiens
tcccatcacgtaggcttgaggttgagtgagtggcatgatctcagcttactgcagcctcaacctcctggactcaggtgagaggaactacatggtacatgccaccatgcctggctagttttcatattttctgtagagacagggtttcactatgttgcccagcctgatcttcaactccgtg

SEQ ID NO: 545525 - DNA, 300 bp, Homo sapiens
tgtctacaggatccgttcgattggcgggcacttatgcacgcttacgtcttaacaagctttgagtgtaagagattgaagagtacaaatctgaccaagatgttgatgttggataagagaattctctgctccccagcgtctaagttgcccgccaatcgaatggattggcgggcaacttatgcgtgctgatctatgctgtctactgtccattgtcagacattgaagagctcaaatctgaccaggatgttgatgttggataagagaattctctgctccccacctctaagttgcccgccaatcgaa

SEQ ID NO: 545526 - DNA, 935 bp, Homo sapiens
cagggaacaaccacgtgtgtgttgatagcgcagaagctgttcgcagagaatatatttttgcgaaaagtgtgtctggggaatataatatctaaaaggttagaccgcgcgaggtcaacaacactctggtgagtataatacgggcctgccccccccccgctttgtatgtaacatccgccccgtgtctctgtgatggcatgtaatactactctggcgtgctggccgtattccacggtgttcacaatgtgcttgtagaagacaagccccccactggcctatcagcgctgttcatgaatgtggtcccactccctgcactaaggttgcgccccttggcgagaatataccagtgccacacagggggaaatatcttctcctatgatgtccgcggaggctatatacccttgcgccacaaatcttggccgcacggggagtcgcgacatttggtaccagaaattcctccttctcctggcttcacgccacgataagatgccgccccgctctctcgcaatggtgtgaagcaaaaataagttgcgaggcacaatgtgttaataagtatacggacagacaagcttgtcaagagggcataaacaaaaaattaaaacaatgttctggtaatccactgaggagcagagggacacccctctcgagagtggacgttctgcgagaacaaccacgaaactccctcataaaggcaccacctttgccccccagaaatggttgcaccaaaattccccccctatgtaactggcagttgtcacatccccccataggtgataccgatacgtctctgataaaaaaacagctgagaccaccacaaacatgttacccaatacagtgaagtatacgtagacaacataccccccacgttgatatttcaactcgaaaaacattctgtctgaaaaaaaatttttcttaaaaaaaagaaaaccaacaaaaca

SEQ ID NO: 545527 - DNA, 193 bp, Homo sapiens
tggaacggttttttctttttccccccaggggggggggcaatgccttttttttagtttaaaaaaaccttcgccttccgggttaaagggtttttttggcctaaacctcccaagggggtggaacttaaggggtcccccggttttccccccctaattttagtttttttgggagggccggggtttccccattttggcc

SEQ ID NO: 545528 - DNA, 672 bp, Homo sapiens
atcggactgagaaagctctcaggcgcgcgacgccgagaactttggttatcgaagttacttgtgtgtcatctgcttattgttattcattaatctttatatatttcttatataatcaattacattaaaataatatataatctttttatatttcttataccttatcatatttacttcttctttttttttcactatctatattttttttattatcttattacataatctatttatatacttttactcttaccttactaatatatttttctcttttatatatataaaatattataccttcatttattatatttcttcaaatatactactcatcttcttttttatctaactcttatctttcattatactttatatatacattcttcttttattatattatatctttaatatcttttttatcctattactacttttctcttctacaatatacttcctatttttatcactcttacttacatctaacataatcattcttataaactttcttttatcttcattttctttacttactctcctttatattctcattcataactttttaatatcaatattctatcatttcatcttcatctaattcattccttaccactttctatcttatttacattctactctatctttctatattatcttcacttattctcaattatctctcca

SEQ ID NO: 545529 - DNA, 156 bp, Homo sapiens
agaagaaagaaaggcccgtccacaggcccggctctgggcaacggtggcccgcgcagcaggtgtgtccagagtcagctgagggctcttcccacaacacccagcaggcgctggtgccttcttctgcctcatgggagcagttcagctttcagccgctct

SEQ ID NO: 545530 - DNA, 362 bp, Homo sapiens
cgtacaaggccccgcacgggaaaagctgcgtcgacacccctcctgcctggaagacgaagctgctggtcacgtgacccaatgctcgcatggtcagtaaaagcaaagacgggactggaagcgatgacaaaaaagccaagggggctgatggtaaaacgaagatcaccacaccgcgggcggggccttgtacgcgtacaaggccccgcgcgggggtgctgcgagttggctgaagatgctgcggtggcaggggaggccaggccccgcacttggtctggcttggggccaccccggagatagagaggacccgagagggtatcccttcggggaatggtcattcaagcaattcaggaagttacccaattttc

SEQ ID NO: 545531 - DNA, 519 bp, Homo sapiens
ggggggagggtggaagagaaagagtgaagaaaagttgcgaggcgtctcctctcttcctaaggcctcctgacccagacccacccctcagagaaggagaacgatacatatacggagaagaagaggaggaggagagcgagtgcacgggacacgagcgggagcgcacacgaccgtctcaagaaccgcagggggacgcctcagcaagtgccgcggcaggacgaagggaagagccccagaagaggggagacgcccgtggacaacctacaggacatccctactagcaccgcgacactagcgccagcgtccgagaggccccaaacagctaaccacgcaccacgtgtaaaagcacagactggagccgcagcgcacccaaaagcgcacacgaactgcaacggacccgcgcccggctgcgtccacaacccatctgcagcaacgcccgagccagcgtcactaccaagcccaccacaccccatcaacccacaacgctgcgcgcgccgacacgacggccgccacccgcgccac

SEQ ID NO: 545532 - DNA, 364 bp, Homo sapiens
gggcgaacttctggtgctattgtgacgggaatacttggataggactggagggcggacatggtttgccagccatggggcctgagacagcttctttctggagctgaggtcctttgtttctgtcattagaagtgacccccagattccaggcaggatcccctgggagagatgctgtccagatggtctgctgcttgtacagaatgggacaggaggttagactgttgcacaaaaccagctgtggaatactgagcttggacagaggtgtacacagctctctcacggcccgcgggcagggggacatcacctgtctgactgaggagaccggtctgtgcaggcagctcctgggaggtgcattggataactgtta

SEQ ID NO: 545533 - DNA, 739 bp, Homo sapiens
  misc_feature (739)..(739): n is a, c, g, or t
aggttgcagtgagccaagatcgtgccactgcactccagcctgggtgacaagagcaagactctgtctctaagaaaaaaaaaaagtctccgaaccctgcccaaagcatggaaacccctttgtggccatgcccccaaatatggtccaacatgtggttgggcagcccgttgtagcaaagccccttgcgccctgaaccggggcacagaatccgcgagcccctctcctttccgtcgtggtcagtgcccagcgcacccgtgatcgacctgtgtgagtccctggtggcgagataactgtgtgaccctggtgtggcgcatgcgcggatgaggacaagaagatgtgaccgctacgtgctggagtaccggcgggaccaagcttcgagggcccgccccgccgtcatgggggaccagcctgggatggtcactcgagggcatccggcagaccagaggtacaccctggacaggtctcaaggtttgacattgaaatacattgaacttccgtgtgaaggcgcctgtagtacaagcgggcacgttttgtggcaaccgcgaaagaaacggtttcccttccttgggaacgccccgcgcgttgtactctccgtggcgagggcacccagcccaacagacgcgctttccgatgggttttctccggccctgttgagaatttggcggggtcccacaattttcgcgcaacccgaggaaaacccttggcgggggggttggggcatggcatcttcttcccgggtgan

SEQ ID NO: 545534 - DNA, 805 bp, Homo sapiens
  misc_feature (81)..(81): n is a, c, g, or t
  misc_feature (138)..(138): n is a, c, g, or t
  misc_feature (173)..(173): n is a, c, g, or t
  misc_feature (196)..(196): n is a, c, g, or t
  misc_feature (202)..(202): n is a, c, g, or t
  misc_feature (206)..(206): n is a, c, g, or t
  misc_feature (210)..(210): n is a, c, g, or t
  misc_feature (213)..(213): n is a, c, g, or t
  misc_feature (217)..(217): n is a, c, g, or t
  misc_feature (226)..(226): n is a, c, g, or t
  misc_feature (231)..(231): n is a, c, g, or t
tcaggtacttgtttatatatatttaatcttattcaaatggaaaccatgctttgtcgtttatacttgctaggtagactttantacccccccactatgccctcatttttttaaaaaaggaaaaaaaaaagaaactgggtnccagtcttaattcattttccgtgccaggtttattncgtgtgtgtgtgagtgtgtctgnttggtnttgntttngtngtgntttcagtgnttggntttcttttctttccccctccggtcccatacttcacagcactctggtgcgggaagaagcagaagcaaaaaaaataaacttaccaataatctaccattacaaacacacataaccaaaggaacacgaaacaacaggaaggaaccaggactggccaccttttcccctcgaagggtggctttcccggagggtaatactacgggtcacgtagctgtgtccaacggaagaggtgaacttaccttccgggcaaaaatatcgtgaggtgactccccacaaaacgaaaaacaaacaaaaaaaaaacggtttcgggggccgccgggccgaaaaattttcaaccacacggtgggcgggggcccacgggtatctagaacggtccaaggggtttcccaaggcaactgcgcagcaaggggtgggtcccccaaaaaaacgcggggcccgcgttgaacacccggggctctggcctcggctacagacccaggcaaccgccgccgccgaggaccctcacacgcgactacaagcaccaagggcaccacaatactacgactgcgacagccctacacacgacgaacaaaatgacag

SEQ ID NO: 545535 - DNA, 415 bp, Homo sapiens
  misc_feature (9)..(9): n is a, c, g, or t
  misc_feature (18)..(18): n is a, c, g, or t
  misc_feature (35)..(35): n is a, c, g, or t
  misc_feature (132)..(132): n is a, c, g, or t
  misc_feature (268)..(268): n is a, c, g, or t
  misc_feature (327)..(327): n is a, c, g, or t
  misc_feature (342)..(342): n is a, c, g, or t
  misc_feature (376)..(376): n is a, c, g, or t
  misc_feature (408)..(408): n is a, c, g, or t
aaaaattcncaatttgtnggcgaaatgcaataaanctccacattggaacaacaaaaatccccctatcacccctttagaatggctacctataaattttttaaaaaatccaaaatctgttgatgatgcaataanaataaaaccatccccaggtaggtacagtggctcacatctttaaacccagtgctttgggaggctgagacaggtgaatcaccataggtcagaagttcgagatcagcccggccaacatggcaaaaccccatctctactnaaaacacaaaaattagccgggcatagtggtgggcgcctgcaatctcggctaccctgagnccgaggcaggagaantgtttgaacctgggacatgagaacaaatcactgnacttcaagtctgggtgacagagtgtgactccnctttcaa

SEQ ID NO: 545536 - DNA, 387 bp, Homo sapiens
attttcatgtgtagcttcagtctctcttctgacaataaaatgtatggatatatatctatatatctcatctgtggatatgcaaaagtagccaaagggagtccttcagagcttagcgttgcctgtgcatgaagctgaagtattttgtaactctcatagacgagacccagtgttgccacgtgatttacaagtttgtccgttgaaaagaagtgccgagctgacggattcatctttaccaggtcattaaatgccatggaaagtctgagctcagccagttgtgcattgtgcacgtcggcgcttacttatcgtgagcttgaggaagcagctgtatcctttgctcgattctatcactatcctagcctaccctaggtgcgccatctattaccgccc

SEQ ID NO: 545537 - DNA, 313 bp, Homo sapiens
  misc_feature (18)..(18): n is a, c, g, or t
  misc_feature (23)..(24): n is a, c, g, or t
  misc_feature (27)..(27): n is a, c, g, or t
  misc_feature (35)..(35): n is a, c, g, or t
  misc_feature (38)..(38): n is a, c, g, or t
  misc_feature (60)..(60): n is a, c, g, or t
  misc_feature (64)..(64): n is a, c, g, or t
  misc_feature (75)..(76): n is a, c, g, or t
  misc_feature (104)..(104): n is a, c, g, or t
  misc_feature (120)..(121): n is a, c, g, or t
  misc_feature (149)..(149): n is a, c, g, or t
  misc_feature (193)..(193): n is a, c, g, or t
cacgagggccaaactggnactgnnaanacttttanaanggaaagtgaaaggtcacctaangaanagtatacctgnnaagaggatcccttggatggtacaattcnacgataccttcatcanntttttgagaaacttactgataatggtantgaattttcagtcacagtgtctctgttggagatctataacgaanagctttttgatcttcctaacccatcatctgacgtttctgagagactacagatgtttgatgatccccgttacaatagaggagtgataattaaaggtttagaagaaattacagtacacaaca

SEQ ID NO: 545538 - DNA, 915 bp, Homo sapiens
ggttctggagactcaacgatgaagctaccggaccgagggttttcttataccctggggtcccggctgcccgtgttggcctcggctactcatcgtgacggttatcctgcagtatatgggacaaacagatattatatcagaaacactgaagtctttgcaatctaaattcttttcacctcttcaaagaagcgatgctaccaggctaatagttttcaaggaaacgtggcattcattactgggggaggtactggccttggtaaaaggaatgacaactcttctgtccagcctaggtgctcagtgcgtgatagccagccggaagatggatgttttgaaagctaccgcagaacaaatttcttctcaaactggaaataaggttcatgcaattcagtgtgatgtgagggatcctgatatgattcaaaacactgtgtcagaactgatcaaagttgcaggacatcctaatatcgtgcataaacacatgcagcagggcaattttatttctcctactgaaagactttctcctaatgcttggaaaaccataactgacatagttctaaatggcacagccttcgtgacactagaacatgggaaaacactaattcaaagcacagaaaggaagcagcatatctttctattaactactatctatgctgagacttggttcaggttcgaggaagtaccaagtgcttctgccaaaaccaaggtgtggacgccatgaagccagtctcattgcagctgacatggcggtaaatcatggcaatgcgacacacctgctgactcaaacccagggcctatacaaaaccaaggtggcattaacgaccgcccgggacccactggaacacaagacaacgaaatgatcggcaacatcccacgtgacccaggagagcagacagaagaaccgcaaacaggcgaccccaggaa

SEQ ID NO: 545539 - DNA, 173 bp, Homo sapiens
ctaattggttcttcgatgacgccgctggtgaggtcagggatggaacctgcatcctcatgtatactagttgggctccttacccctgagccacatcgggaacttccagtagtgcatttctttttagagctggaccgtccattgtctggatggaccgtcatcgaagaaccaattag

SEQ ID NO: 545540 - DNA, 281 bp, Homo sapiens
acgggagacggtggcaccgtgtctgtgcctcagcccccttgctcagcctcacgcagccacgcagttcggcgtctgcaagcaggtgcaaccacacgctggtcatccagcaggctccgaagccatggagccctatacggcccccgcaggtaacgttgacgcagacacccatagtcgccctgcgacagcctcacaagcggatcatgctcaccacgcctcagcagatccagctgaacccactgcagccagtcccctgtgttgaaacccgccgtcgcaaaggacag

SEQ ID NO: 545541 - DNA, 215 bp, Homo sapiens
gaaacccactgcctatgtgcggcccatggacggacaggagttcattgaaccaaagctttcctcttagcactacagcagccaattccatggcaacagcatgacttagcttaagcccagcagcaaagcacatcttaccaagctgaaaataccttcccaaccacttgatgtaagtcacacatttagagcttttaacattgttactacgtgaagggatt

SEQ ID NO: 545542 - DNA, 476 bp, Homo sapiens
gtccggacgcttgaataatctttgcattgacagttgcttctagccaagcattgccgtgatcttcccagccagatttgaatgcattgtttggatgtgtgagaacaagcgttctccctagcatctgcttctgttcctgaggcggtgcatgtagccagcatggaagcagtcaatgtctcctgccccttgcacatggtatcgcaagctggagttgcctgtcgagatgcttgtattgcagtgataagggctgctggacactggagtccgtatttgtagggggcaacagtccggggagcagcagcagcaacagaaggcgcgtggtgccttaatgtctgtacagcgtgtgggaacgcttccagactgggaggtgtcagtcaagccttgctggggggaatgagggcgaccaaaggtccatagccaagcggtccgggcactcagacccagttggagccagatggcgaagagttggacaaggccca

SEQ ID NO: 545543 - DNA, 217 bp, Homo sapiens
ctggaggagctgaggagggagctgaggtgaccccagtgggagcctgcaaagctggggggtgggcctgcagaatctgctgctgggctgacgagtccgaatcactctcattgtcctggggggtggggatgctcggggacgtgctgcgattgtcctggtcgatatctttggagtcactgttaccctcatcgccgaagctgtgactttcttaactctctcc

SEQ ID NO: 545544 - DNA, 482 bp, Homo sapiens
ttgtggacgatctctagcaggatcccccccctggcagagctgttaaaataatttgtatgtgacctagataaagcagattgtatcagcttggatatcaaacatcaacttgtgtcattaggaaatgtacgtccttctattgaatattagctacgctgtcattaagccataacaaacagtaaagctaatattctcttctcaagaaacagaatttgtctttgtcttttaatagcctatgtgaaagatgttataggatacacattttccccctaccagatccatgatggctacctttgaaagaggactgatataattgtatatgatacttggctttgaactatttcacaggttaaccaatggaaaactgccagttacacttaaagcaaagaaaacatgtcagaattctcccacagaaatttaccgttcctacgtcaagcagttccctaaataactactgatttatccgacaacctataacagttggg

SEQ ID NO: 545545 - DNA, 196 bp, Homo sapiens
tgatactcgtccattaggtagtatgatgtaatctggtccttaagtattctctgtctttggtatttcctttctggtctttcctccaactttggtcattgggtgtgtggggactttttttttttttttttttttttttttttttttttttttttttttttttttttggatggggtgtagtttgtttgtgtgttgtata

SEQ ID NO: 545546 - DNA, 659 bp, Homo sapiens
agcggagagctttacgaggtatcagcacttttctttcattagggggaaggcgtgaggaaagtaccaaacagcagcggagtattaaacttataaatagacaggtctgagtgcctgaacttgccttttcattttacttcatcctccaaggagttcaatcacttggcgtgacttcactactttgaagcaaacagagtggtgcccaggcaacatgggctgactggagcgccttaggcaaactccttgacaaggttcaagcctactcaaactgctggagggaaggtgtggctgtacagtacttatacatattatccgaatcctgactgctggggacacgcggttgagtcagacctggggagatgagcagatctggcctttcgttgtaacactcagcaacctggtagtgaaaatgtctgctatgacaaagtctttcccaactctctcatgtgcgctatctgggtacctgccagatcatattagtgtctgtaagccaacacatcttggtacctgggctcatgatgtactatgtgatgcgaaaggaagaagaaactgaagaagaaagaggaagaactcaaggttggccaacattgatggtgtcaatgtggaaaatgcacttgaaagcagattgagataaagaagttcaagataggatagaagagcat

SEQ ID NO: 545547 - DNA, 311 bp, Homo sapiens
  misc_feature (107)..(107): n is a, c, g, or t
ccccattatgcgtgatggtgtgtgtctggtgtacagcacgtgtctactatgtgtcttctgggaatgtgtaccatctgtgtgcctgcagctgtgtagtgctggacagntggaacaacaaccctttcgtctccagttctccactccaatgataatagttcacttacacctaaaccaaaggaaaaacagctctaggtccaattgttctgctctaactgatacctcaaccgttggggccagcatctccccactgcctccaaattattagtaactatggactggacgtccccgcgaagtttcttgggtctaccaca

SEQ ID NO: 545548 - DNA, 270 bp, Homo sapiens
  misc_feature (55)..(55): n is a, c, g, or t
  misc_feature (172)..(172): n is a, c, g, or t
  misc_feature (193)..(193): n is a, c, g, or t
  misc_feature (205)..(205): n is a, c, g, or t
  misc_feature (235)..(235): n is a, c, g, or t
  misc_feature (242)..(242): n is a, c, g, or t
attaggtaccagctcggccacagtggggaaggggtctttggaaaggggagggaanagtgggaagggctgcatctcatggcttgagtgccagctcagccacagtacactagaacaccaagtagacttctaaggtttttgactgcagtccctggctcccagacagcacctctanacctgcccacggcctgggggnacttgctacagnggttacactgagccgagatcatgccactgnactccancctgggcgatacagcgagactgcatctc

SEQ ID NO: 545549 - DNA, 103 bp, Homo sapiens
aggctgggaggaagagatagtcgctctggatcacccatggctagacgctgaaaacccacctggctccggaatcctgtcgggctagtcgggggggtacggagct

SEQ ID NO: 545550 - DNA, 974 bp, Homo sapiens
ggccggtggggccggcgggactcgccgctcgcacgccttggcccgcggcgggcgcacgtcttccttccgcttgcgctgtgactgaggcggtgtatgtgcggcaataacattgtcaaccccgtgttggccctgccatctgtggcccggtcggccgggaaggggccaccggtgggcggcgattctcccgtggcttgggatcgggcgcaggactctcgtggggcacgggcgttggcgagcagacacgcctttttgcgcggcggttcatccagacagcgtcccactttcttcccaattattttttctgggcccggcttttggcgccctggggtcaacggcgcctctggtagtaagacttttaacactcattacttcggacccgccggtgggacttaatgacgccttatcgaacggggttgcgcacgaatcattcaagtctcgcgggcgttttccacacgactaaggaaatccccaacagcgcgcgcgacgagcattggaacatcactgcgcgcgaaacttacaaaccaccaccaggggcgcatgccacaaacacgatgtcttatttaacagcacacggctctttgcgagcttctgcgcacacaaaccgacatcgtctgacaccgatatggcaattttccccttttgcgtaagccgacgacaatcttacatttctgcgcggacaagcgggaattcaccctacaacggggcacgcagaacgcctctaagctgtttacatatatttacccgggccctttataaccaactagtagggacaaggaacaccttcgacgaagggttgctacccgctgggacgacctcccaagctgagggctggggacacgtccacccacgcttagtccggcgggaccatacccatctttttgcacaacacgaggtcggctctcataaatctcggcgtggaggccgccacaactcaacgcaagcaaattaacttaccgaataattttatctcccag

SEQ ID NO: 545551 - DNA, 133 bp, Homo sapiens
ggacaaccggctggggtccttgcgcgccgggctcagggaggagcaccgacttgcgccgaaccctgagagatggttggtgccatttggaaggtgattttttcgctgggccccttaatgcctgcccccttaatgg

SEQ ID NO: 545552 - DNA, 180 bp, Homo sapiens
cgcctctcgacggactcccccacgactcacttacttttccacgacacaacacgtgacccactgacacgttggctggggcgggtgtggacgtgttactgtcactgggaccggacccttgggactgacgggcgttgactcccgcggacccccacggttacccgacgtctcgacacttcgtac

SEQ ID NO: 545553 - DNA, 967 bp, Homo sapiens
  misc_feature (902)..(902): n is a, c, g, or t
cggggagaactacgcggacacgtcagggagatgcgcagccggtgttgagcgagcccgtgctgttccgaagccgtccaacaggcctacgcgcccgaggctcgcccatcctcatgcccgcgaacactcgcaaccctgcaccaccgagctggagctgggcgtggtgatgggcaagcgctgccgcgcagtccccgaggctgcggccatggactacgtgggcggctatgccactgtgcctggatatgaccgcccgggacgtgcaggacgagtgcaagaagaaggggctgcctggactctggcgaagagcttcacggcgtcctgcccggtcagcgcgttcgtgcccaaggagaagatccctgaccctcacaagctgaagctctggctcaaggtcaacggcgaactgagacaggagggtgagacatccatccatgatgttgatcacatcccctacatcatcagctatgtttctaagactcataaccttggaagaaggagatattatcatggactgggacgcctaaagggagttggaccggttaaagaaaacgatgagatcgaggctggcaatacacgggctggtcagtatgacatgctaaagtggaaaagccagaatacttgagttactttgttaacaactttcgagacaagaacgggacgcaagacaagaagcaagctacggcataattaaagtgtcacaatcctttaagtatagaaaccatttacttggcctggacgcggtggcttcacgccgtgtaatcggcaagcaatttgggagaccgaggcgggcggctcacgacgtacaggagatccagaaccatgcttggcgaacaggatgaaaccccgtctctactaaaaatacagcacatacgccgggcgtggcgccgggcgcaggtagtcccagatancatgcatggaggactgaggacaggagaatcaatggaacaacagcgacggcggagcttaccgtgag

SEQ ID NO: 545554 - DNA, 212 bp, Homo sapiens
cccggattaaatttatctgtttaaaaaaaggacaaaagttatcccccaaacccccctttccctttttgccctgtttgttttggattgggtttgggggaaaaaaatgttttttttagttgtttactttgtttgaacccttttgttgtggttcaagtgctgttttgtgtgttgggcccaaccagttgtcaataaactttccaagcgggctttta

SEQ ID NO: 545555 - DNA, 1459 bp, Homo sapiens
  misc_feature (185)..(185): n is a, c, g, or t
  misc_feature (326)..(326): n is a, c, g, or t
gataatggcgtccatgcgcacttctatgatgcgaggcgacctgtaccatcgactggcggacgtgggtcccgagtggaattatcaacagacctcctgaggggaggctcatgttctaggtggacgcgcgtctcgtccatacataaacacacgcacatgcctgaagcgacgcacgtagatgttgagancacacactggtagttgccaagtagagagagaaagtcgtgaaggtcgcggccgcagtacgcccgaggccaatatggcatcgaaaagcctatcgattccttcatgaaaatcaccttaggtggatgctgagaatgtagtcaganagagctaacattttcttggtcctacctagccattcttacttaataggcaaccacaatgcctcattcgtgcagatctgagtaaactaaagccggttcattgtgacttgatgtcgtcacccgaaaagatggtaagaaaccaaaaggggtgcccctcgaaaggtccacccattattggaatccgcaaaaagcatctttttacgtatgcgttcgctacggctttgtaattgccggaaccgttgaacgtgagccagccaggacgatgagaattgctgtcacatctggattcaagctagatgtggatggagatgcatggccattgccgagacccatggaacggtacttgatgggtcaactctagggtaagcccaatttattcccgttgcgcaggcccacacgttgactatcaaaagaggtgttacagatggggactactgggccagcgtaacccttgggccagaaggaaccccgacaaggtttaccgccctgaaccactctattgtttgcgcccgcgctctactaacttctggagacccaggattacgcaggagggcctgcattcgactagacgcttgtgtcagacaaaaagaggacgggtcccggcgtgccacccatgaaaggaatcatgaacgttactgaaccggaacatttttcaaggcacacgtggttctggaagcacaggttccggtgttacagggcaaaagaagaagctaattttgaaggccttggggaataaatctggccctaacactatctattatattaactttcactatccatgctggggggcagattcttctagacccactcggatggatcccgaggccaaacatttccacttttcccaacttttaaccaattgaaccttggggtccagaggagccgggcattggagaacgttaaccctgtgttaatgacacggttgtgaagggcgcaatttccccaattgacacacctggggttccctggcagaaacaccagcggcaaaggggggctttcatatggcaaccaggggctccacactataaaccccgggtttccttgaaggggccggcagtacgaagattgggcttcctgggacgggattcccctttggaacctggactggaccggactacgggttcctggttcctcat

SEQ ID NO: 545556 - DNA, 323 bp, Homo sapiens
gtcaggcactgaaagtctgaatgtctgggttgtacactgaagataccattgttgttacagaaaaagcaatgaaaaccatcaggcttgaaacaaattcctgctggagaagactgtccagatgtgcatgacttcaaaggatttttattaaaaattattttattattttttaattatactttaagttctagggtacatgtgcacagcatgcaggtttgttacatatgtatacatgtgccatgttggtttgctgcacccatcaacttgtcatttacattaggtatttctcctaatgctatccctctcccagccccccaccccacgac

SEQ ID NO: 545557 - DNA, 118 bp, Homo sapiens
atcttttgcattgttcctcatccgcctccttgctcgccgcagccgcctccgccgcgcgcctcctccgccgccgcggacctccggcagctttatcgccagagtcccttgaactctcgct

SEQ ID NO: 545558 - DNA, 85 bp, Homo sapiens
tgtgccacctgggacaggccggttattataagaaactctttggcagtggaacaacacttgttgtcacagataaacaacttgatgc

SEQ ID NO: 545559 - DNA, 541 bp, Homo sapiens
agacatgcagataaccaggatgacagagaaccaaggttaatatgttatgtgtgaatttgatcctgtcattatgatgcttgctggttattttggcggtgaattgatgcgagtttcttcctagcatcgatggtctttccatctggcatgtttttggagtggcttgtactggttgttcctttccatgtttagtgcttccttcaggagctcttgttagggagggctggtggtgataaaatctctcagcatttgcttgtcagtaaaggattttatttctccttcacttatgaagcttagtttggctggatatgtaattctgggttgaagaattcttttctttacgaatggggaatatatgggccccactctcttctggcttgtatggtttctgccgtgaggtctgctgttagtctgatgggcttcccttctgtgggtaatccgacctttctctctggctgcggtgaatatattttccttcatttcaaccttggtgaatttgacaattatgtgtcttgaggttgctcttttcgaggagtatctctgt

SEQ ID NO: 545560 - DNA, 645 bp, Homo sapiens
cgatcatccctagtcctcatctcccctccccatcccttacgccatccctttaccataacaccagacgaggtccaacagatcccctcccctttacccatccaaatccaattggcgccacccacatggtgacatggaacacttacgagtcaccaccggacttacgcgcgggacattaatctttcgcaacatccgtacacataacattctcccgccagtttattctccttgagacacccgggcgcgacactgtcgcgacatcccgtgtgacgcgttgtcacacacatctggagatgtaggttacatcccccggattgtaagcccccccattctgttataaataaattcaccatctcaccagaacactctattgccacatccataggagctgtctccccaccattagagcctttaaacaccagaatagccaattctcccggacagtcttaaacccaaacccacatttcacccgcgtaccacagacccgggggtataacataccggtccaatagcgtctgaaatctgtggagaccaaacccaccagtttctatgccccatccgtcctagaaattaattctccccttaaaatcttttgaaatagggcccgtatttaccctatagcaccccctttaccccctttagagccca

SEQ ID NO: 545561 - DNA, 220 bp, Homo sapiens
gcccggtgtgtgaacgcattcctacttctccgtgtgtgtagagtaccgaattcttactcactcctgtgtgtgagtaccggcatacttccgttgtgcgtaagtactgcattctaacttcccttgtgtgtgattaccgcattcttacctctcccgtgtgtgaatagcgaatacctagttgtcccgtgtgtgagtactgcattcttacttcccttgtgtgtga

SEQ ID NO: 545562 - DNA, 667 bp, Homo sapiens
  misc_feature (43)..(43): n is a, c, g, or t
tcgggggggcgcccccccccaggcagagtgtttctagaacccnctccgcgggtgccactcaccccccagtggtggacgccccttggactctcgaacagcaacatgtgtggcgcccaattcctcccggttcacgtagtggacttctctcccctgttactcccccggcgagatattattactccgtgcgcaaccacccttcggaagaatgtccagccatctatcttgttcttggcctcaccaaagattctcacaacaagagttttgacctgtctcacttctgtagcggttgtgagaagccctttggtggtgtggcagctccaacaacaaaggataagaagaacaccgttgtactccccccctcccccgcaaggatgatccccccaaggtcaaaacaaggttacatcgcggtcttttcctgaaaaatttatcaaacggggagtcaaggacagcgcccacatttctggtggcgcccttccgtgacaaggagccctcttttgcaatgagaaatttgagcagtcgtgggagttttattgtcgacacagttccttgctgcgagacaattattgttcggccaaaagtaatgtgttagactatcgttttttttacacaccccgagaaaccacagcacccgcagagggttaataaaaaccccacagcccacaaaaca

SEQ ID NO: 545563 - DNA, 170 bp, Homo sapiens
tcataggttcgcaggaggctacactgaacaacattttttttttttgggcgggggacagagtcgggctggtaaccaggcggtagtacaggtggcgcgatctcagctcacggcaacctctgactccggggtttaaacaatgagcaaaaatattcgggccggcgaacctatga

SEQ ID NO: 545564 - DNA, 419 bp, Homo sapiens
  misc_feature (20)..(20): n is a, c, g, or t
  misc_feature (46)..(46): n is a, c, g, or t
  misc_feature (73)..(73): n is a, c, g, or t
  misc_feature (81)..(81): n is a, c, g, or t
  misc_feature (109)..(109): n is a, c, g, or t
  misc_feature (139)..(139): n is a, c, g, or t
  misc_feature (162)..(162): n is a, c, g, or t
  misc_feature (182)..(182): n is a, c, g, or t
  misc_feature (186)..(186): n is a, c, g, or t
  misc_feature (197)..(198): n is a, c, g, or t
  misc_feature (201)..(201): n is a, c, g, or t
  misc_feature (220)..(220): n is a, c, g, or t
  misc_feature (247)..(247): n is a, c, g, or t
  misc_feature (257)..(257): n is a, c, g, or t
  misc_feature (277)..(279): n is a, c, g, or t
  misc_feature (281)..(281): n is a, c, g, or t
  misc_feature (295)..(297): n is a, c, g, or t
  misc_feature (300)..(301): n is a, c, g, or t
  misc_feature (304)..(305): n is a, c, g, or t
  misc_feature (310)..(310): n is a, c, g, or t
  misc_feature (313)..(313): n is a, c, g, or t
  misc_feature (315)..(315): n is a, c, g, or t
gagactccgtctcaaaaaanaaaaaaaaaaccccacaaccatgttntaggaaaagttagtataaatgacatancataattnatatattcaaaataacttttaaaaagtngtcttgtagcttgaagggatcctaaatatnaaaagcccatcacaaacttacangccttactgctacgtaaatntccntttgaactagnntcnggttctatttaaaaagtcnaaaacagttgaaattaatttacgaatnagaacagatncacactttgtggggaggctnnngnggtaggatctcctnnnccnnagnnttttnagncnagcctgggcaattttccaaaaaaaccccttaaggaaataaaaaaagaaatggcctgtgcaaattcctttattaaacaaaggaaaacaaattacgccccgggctt

SEQ ID NO: 545565 - DNA, 381 bp, Homo sapiens
  misc_feature (20)..(20): n is a, c, g, or t
  misc_feature (46)..(46): n is a, c, g, or t
  misc_feature (73)..(73): n is a, c, g, or t
  misc_feature (81)..(81): n is a, c, g, or t
  misc_feature (109)..(109): n is a, c, g, or t
  misc_feature (139)..(139): n is a, c, g, or t
  misc_feature (162)..(162): n is a, c, g, or t
  misc_feature (182)..(182): n is a, c, g, or t
  misc_feature (186)..(186): n is a, c, g, or t
  misc_feature (197)..(198): n is a, c, g, or t
  misc_feature (201)..(201): n is a, c, g, or t
  misc_feature (220)..(220): n is a, c, g, or t
  misc_feature (247)..(247): n is a, c, g, or t
  misc_feature (257)..(257): n is a, c, g, or t
  misc_feature (277)..(279): n is a, c, g, or t
  misc_feature (281)..(281): n is a, c, g, or t
  misc_feature (295)..(297): n is a, c, g, or t
  misc_feature (300)..(301): n is a, c, g, or t
  misc_feature (304)..(305): n is a, c, g, or t
  misc_feature (310)..(310): n is a, c, g, or t
  misc_feature (313)..(313): n is a, c, g, or t
  misc_feature (315)..(315): n is a, c, g, or t
gagactccgtctcaaaaaanaaaaaaaaaaccccacaaccatgttntaggaaaagttagtataaatgacatancataattnatatattcaaaataacttttaaaaagtngtcttgtagcttgaagggatcctaaatatnaaaagcccatcacaaacttacangccttactgctacgtaaatntccntttgaactagnntcnggttctatttaaaaagtcnaaaacagttgaaattaatttacgaatnagaacagatncacactttgtggggaggctnnngnggtaggatctcctnnnccnnagnnttttnagncnagcctgggcatcttatcagtaagaccttttttcaaaaaaaaaaaagcgtatatttttgttttgtgt

SEQ ID NO: 545566 - DNA, 1058 bp, Homo sapiens
  misc_feature (365)..(365): n is a, c, g, or t
  misc_feature (526)..(526): n is a, c, g, or t
  misc_feature (531)..(531): n is a, c, g, or t
ggttcccctggcacaaaaatggcccggcgaaagccacaggaaaaccggcccctgtgtacaagaacacagaattaggccggaggcccccggcgtgaagaaccggggtctcggagacacgacatcttgagcacggtgattgacatctaggttacccaggagaccttggacagcaaccagaggatatcccaaccccagagcgcaaaccacaaccaaaccaaggccccagacgtgtggcgggcgcagccagacgtggacaatccggatgcacagcaacaccagagtccaggttaaagacgcaaaaccagcagatctggcaggtggacacacagcaagaggcaccgggacagagcgttatgctctccaanacgttgggggtccctttcgtggcaagtggttatcacgggagaggttaacctatagaaggtctacctaatctccggagaacatcctatacgacactattctcctccttttggtctacttcaccccaacaaccaagacatggtcttataccaagaaggccccntgtgntatcacggaatatccttaacactatgggttttcttgggggggagaagcgcaaagtcatctgcacagccatattaatctccccagacccaagactcccatacgttagacccgacgtgggcctggaggcaacatttcccaaagggtatccacaggggtgtgaagacctggtcgttccaaaaccaatttccaagcaaaaaaccaccaaccagtacgttcccaaacgtgggttcccaggcaagcagcagatggacagcaaggaaagaaaggtcggatgtacaacaccggtggtatgacaagttacaggtacactatgaacttgggttccatggtctaccagtccacattgtggtctcaggcgggcgttccgaagcccctttatgaaccaccagttaatgagttttggtacatgcggattatttggatttaccattgttacccttttggaagcaactttctttggtggtctcaagggattactgcagcttggttggaacttgtactggggctacctaactggtttggtcctt

SEQ ID NO: 545567 - DNA, 226 bp, Homo sapiens
actctagctctggtacccatcgatgagggcctagcgtatgggcgtactctaattaccaggaagggtcgtactctatggtgtgttcgagatatgtccgagccacgtagctggattgtcatgggtgttatgtggcgtgtgtacaattcatgtgagatattagctttattggggagggggtgatctaaaacaccctttacgccggcttctattgacttggcttatcgag

SEQ ID NO: 545568 - DNA, 379 bp, Homo sapiens
  misc_feature (11)..(11): n is a, c, g, or t
  misc_feature (54)..(54): n is a, c, g, or t
  misc_feature (69)..(69): n is a, c, g, or t
  misc_feature (139)..(139): n is a, c, g, or t
  misc_feature (235)..(235): n is a, c, g, or t
cgcgcccaggncgggcggaaagtttttcctgacggagttttggctgcggcacgnaagcaggcggccgangcgggccatggacgcgctcaagtcggcggggcgggcgctgatccggagccccagcttggccaagcagagntgggggggcggtggcggcacccaagcatgcctgagaactggacagacacgcgggagacgctgcttggaggggatgctgttcagcctcaagtacctnggcatgacgctagtggagcagcccaagggtgaaggagcttgtcggccgccgccatcaagaggatcgtggctacagcttaaggccagttgggaagaagcttgcagaaagttgactcttgaaaggttgtcgccacgggggaaattt

SEQ ID NO: 545569 - DNA, 830 bp, Homo sapiens
ccatgtatacagtccaggatcccatgacagattctgatgtcaccgtctaccttacagagtcatgagccggtgcttgaacttgtccagcaccatctgtacctggtcccagcatgccttctgagaccccccagtgcagaatgtgtgtgtgcccacatgtgctgcccccacctgctcatgtggccaacactctgtgcgaatgtgtgtgatgccatggatgaatgtggtgtccccatgatgtgataatgtgaatgccaattgatgcccctgctgtgaattcctgtgccctgaatgctcactgatgcatgtgttgcagccttggcacatgcttggtgcctgtgcacttgccttccgagatcccacagcatcacacgacactgacccctgtgccaaaactctccagaaaaatctattgcccagggactattcttgaatgacagacatctggtgtgacaccgcctatgtgtcatggaatacaacaatgatttggtgaaatgacatgttacgtgcctgaatgctgttggacgcctctttgtggctccacgtctgttgctgttcctttccactagctgtgtgctgttggattgcctgtcgatcgtgtggctcctgctactcatggccttgctggtgactgcgttttgctgctgcattgctttgacgccgcgactgggtgaccgccttgacatcctccttgggggccccatctgattttctccgcttgcctcgcccttcccggtgacgtcagcctggggattcgttgcttgtgcccttggcttgttggctttcttgtttggcctacttctcttgtcttccttcgctgcttgccctgtgat

SEQ ID NO: 545570 - DNA, 509 bp, Homo sapiens
  misc_feature (489)..(489): n is a, c, g, or t
ctgtcttaggtcacaaaaaggtcctcagcctgtagtgggtcacattgttagaaatgctgttacttggtgctgtaaaggaaatagcacttgaacataaatttaattttctcagcaaggtcatttttactttctgcagaaagggtacactcaccagcagtttagccaggagagtacaccgaacaaaggagacagggtcatttataacctgacgcgttcaccttactgctgtatctggtttccactggccagaacaggacctcgctttctgtatttgtcctgattggctagcaacttagaactttttaaaagagcaaaggtagaggagaacaaagggaggaggaagtaactggtggaatgctgagaaaggtgaaaacacctccaaataaggaagaggaataggctatgacctaacgcccgctgggactagtataagcatgccagggcaaatatttaggcgaaatcgcgggacctaagaacataaagtacgtngatttttcttttcttttttt

SEQ ID NO: 545571 - DNA, 142 bp, Homo sapiens
gctgtgtgtgtgctggggcgagtgaacacctgtgtgttctctgatagaagattgcgccgcgttgagatactccgtgtagatctctatgtgtataggtatctgtatatctttcctttcgtttaccacgtggttaaaaaaacct

SEQ ID NO: 545572 - DNA, 231 bp, Homo sapiens
gcacgagcagggttccagtcaggccgatccggttcgttcacggatggaaaacatacataacttgctggcttgtctggagtcacatgtacttaggtgacaatttacaaaaagtcatgtctgcatcttgatgggcaacaacccttttcaaccaaaaagtaattcaaaaatggcagaactgtttatggaatgcgaagatgaggagctgtaaccatggctgatgaaagtaaaaga

SEQ ID NO: 545573 - DNA, 407 bp, Homo sapiens
gcacctactaagagcatcggtcctgtccgagtttccccgcccctccccacgctttagctgcaggccctttttgtcatatgtctctatcctataccagatgatcttagtccttggccctgctggtgctataggtctgttgtatatcttgagtaatgtttcaggcctggggtgggaggggagctcccgttgcctctgcaataatgtgtccagggggagctgctgtcactcccccatccccgaggcagcccagtccctatgtcccaagtcagggaccctgggcctgggccatctattcctttttgttccacatttcctttctactctttctgctcatgagtcctgtccctgcatttgtcttgggaaacacggtattaatgagagtactattttggttttaaaaaaaaaaa

SEQ ID NO: 545574 - DNA, 467 bp, Homo sapiens
  misc_feature (124)..(124): n is a, c, g, or t
  misc_feature (128)..(128): n is a, c, g, or t
  misc_feature (139)..(139): n is a, c, g, or t
  misc_feature (147)..(147): n is a, c, g, or t
  misc_feature (155)..(155): n is a, c, g, or t
  misc_feature (167)..(167): n is a, c, g, or t
  misc_feature (169)..(169): n is a, c, g, or t
  misc_feature (171)..(171): n is a, c, g, or t
  misc_feature (173)..(174): n is a, c, g, or t
  misc_feature (176)..(176): n is a, c, g, or t
  misc_feature (179)..(179): n is a, c, g, or t
gccagttgtcgacggatgacttctcgcgtggcgtagcccatgtcgagagtcccgacaattagcatcagcgctaaaagggtaggggctccgaacgggcagtgtggcttagagctaaaagctcttnttanctgctgtgacnggtcattnctgtaatnggttgtgattgnanananncnggnggagaattaaatgagggaagctgtgtatacttcctagtaagagctattatatgaccgattacattaacatcatatggaaaaaaattgtcaaaagtactccgggaaagcccttaaatagttggtaaagtacagaacacatgattgtcaatatatgtaaatacaggatgagctaggacagaggggcccttcgttcacaccactgacaattagttcccacttttacctccggtctcagagatttgacttacgtgcgagagctttaatgcagagtagacctatctcacgtaa

SEQ ID NO: 545575 - DNA, 307 bp, Homo sapiens
tacatccaaccgaaaaatctcagccgaggagacctctagttagaacaggggagaactattcagaggaggagacgtggacgagggatgagcaccaataacaataaagatcctgacctgaaggcgaaggttctaaacacggagtagtgagtcaccggtgtggggtctccttcacaaggcgggcttcgaactcagaagagattccttccctgcgtatgccaggagacactaagaatcagaccacagacagtggatttggcaaagtgaccttacaggacgcttgccttgtgcctctaacatctcccgaaga

SEQ ID NO: 545576 - DNA, 325 bp, Homo sapiens
ctccagagggctgttgaaatagaggtacaggtatgacgtggggatctattcttggcagttcactcaacaaaatgtgtgaatcgattagaaacaatggatattacgagatgggcgaggaaagataaaggagggatcaagtttgtatgcggcattttggtgtgagcaacaacgtgaaaggtggtgtcctttattgagcacaggagtaggcatcattaacaaggtttgagtaaacacaaaatgatcattatatgtttgtgtgggcactttctatcagatcactcatacctataagtcaggcaactctgggtcagcatgttgccgggac

SEQ ID NO: 545577 - DNA, 184 bp, Homo sapiens
  misc_feature (9)..(10): n is a, c, g, or t
  misc_feature (15)..(15): n is a, c, g, or t
  misc_feature (19)..(19): n is a, c, g, or t
  misc_feature (23)..(23): n is a, c, g, or t
  misc_feature (32)..(32): n is a, c, g, or t
  misc_feature (39)..(39): n is a, c, g, or t
  misc_feature (45)..(45): n is a, c, g, or t
  misc_feature (48)..(48): n is a, c, g, or t
  misc_feature (54)..(54): n is a, c, g, or t
  misc_feature (57)..(57): n is a, c, g, or t
  misc_feature (66)..(66): n is a, c, g, or t
  misc_feature (72)..(72): n is a, c, g, or t
  misc_feature (82)..(82): n is a, c, g, or t
  misc_feature (87)..(87): n is a, c, g, or t
  misc_feature (125)..(125): n is a, c, g, or t
  misc_feature (128)..(128): n is a, c, g, or t
  misc_feature (131)..(132): n is a, c, g, or t
  misc_feature (135)..(135): n is a, c, g, or t
  misc_feature (138)..(139): n is a, c, g, or t
  misc_feature (152)..(152): n is a, c, g, or t
ctatgaggnncctgnggcnggtngggatgtcngggtggngctgtngcntccgcngcngctgctgcnggtgcnggttgtgagngggtntccagtgggctcctctgggcgtctcatggcctctaggngcnccnnggngcnngaggggctgggcntgggggtctgcttcctgggtgtctttgtctgc

SEQ ID NO: 545578 - DNA, 496 bp, Homo sapiens
acaaatacttggaattccaatgtgtttttgcttccgtgaggattaattggaaaggtttttaatgacattccactgatttcagatttgctgagatgacttcaataaatgtcctgtatgtttcaaaaaaaaaaaaaaaaaaaaaaaaaaaaaatgtgtgtggggcgcgcgcgccgcgggcccccggaaaaggtttttaaaaccttcggtgtggggggcgcggggcgccccgggtgacgtggagacactggtggcccataaccgcttggtccctaagggagaatccgggcgcacagggaacttagcgcggcgttgggggtttccctcaccaatataataaaagcgcgcgcggggggagcaccccgagagcgtcgttcgctggagaaaacctccacgaggagggagggctccgggagggcgcacatacggggaggtgtctatctacaacaagggggggtcccagacggagcgccgaattatcaaaaattaaaccgcccgg

SEQ ID NO: 545579 - DNA, 962 bp, Homo sapiens
  misc_feature (613)..(613): n is a, c, g, or t
  misc_feature (656)..(656): n is a, c, g, or t
  misc_feature (695)..(695): n is a, c, g, or t
  misc_feature (802)..(803): n is a, c, g, or t
  misc_feature (819)..(819): n is a, c, g, or t
  misc_feature (840)..(840): n is a, c, g, or t
  misc_feature (879)..(879): n is a, c, g, or t
  misc_feature (906)..(906): n is a, c, g, or t
  misc_feature (910)..(910): n is a, c, g, or t
  misc_feature (912)..(913): n is a, c, g, or t
  misc_feature (927)..(927): n is a, c, g, or t
agaggttaaaagatgtcaagaagctcagaatggcccagaatctgatgtgtggactcatcagtcaaaaatcaggtgctccatacttgcttgcagtgcctacgtggctctggctttgggtgataacctcatggctttgaatcatgcagataaacttcttcagcagcccaagctgtcaggatctcttaagtttttgggacatttatatgctgcagaagccctcatctctctcgacagaatatctgatgccattactcacttgaacccggagaatgtcactgatgtctccttagggatctcttcaaatgagcaggaccaaggatcagacaaaggtgaaaatgaagcaatggaatcctctggtaagcgggcccctcagtgctaccccagttccgtcaactctgccaggactgtgatgctgttcaaccttggcagcgcttactgcctgaggagcgaatatgacaaagcccgaaagtgtctccaccaggcggcttcaatgatccatcctaaagaggtgccccctgaggccatcttgctggcagtctaacgttgaactgcagaatggtaatactcagctggccttacagatcatcaaaaggaatcagctgctcccctgcangtgaaaacacactctgaagtgagaaagaagccagtgttctacngcctcgtccacccgatccagcccatccaaatgccggctnttcaccactgtgcagagaaagtgatacttcacttttggaaaactgttacctgagacccaggggagaatttactggccattttagttgtatcacagcagaatgaatannagatggtgaaggctgntaattttgagtcaattctacncctgacttttggccaaaagcttacttaaaattaaggatntactaagtcatcatcagctgtttttcntaantnnagccagctattaantttgagccattatgtaatatatgccataggcaatt

SEQ ID NO: 545580 - DNA, 1043 bp, Homo sapiens
gctccttctgcttctgctttctttgacctgttgcccctcgctcactgttcggccgttgttggctggccctgtgggctttgctttggctctctgtggcaacttgttccttttctgtcttttggtgcggattcccgtgatctgtctatcctatggtcacgtcacctactgtgttcgatatagcccccgtccgggcctcttcgctgatcccctgctcttctgtgtcgttccgagtcacgcgctcatcttcttcctatgtctccctgtcgtatgctggtggtcagcttcaatacttcgttacccgtcctggcttcccctcgaacagcctaccttcttcggagcacccggtccagagtatgtagtgcgtaccccctatcctgtataccctcactacctgttcattgatttggtcgggtctcacctcaagttttcactatttgcgtatccttatccaaggactctcggggaatcaagtacctcccacattgttactcactttgcttctcgtttttattccagagaccactttgagaatacatatggtatggtctgaggcctatgagcatcaatggcttcctagggtttccatcgtgtgagcacaccatatatttacagtagggtgatagacgtagacacacgagcatatgtcacgcgtgccgctaccatatatctttcgctatccccaccggcgtcataagtatttagctgactcgccacactctacggaagccaatatgaaatgatctgctgtcagtgctgtgagccctaggagtcatcatttcttttcgagccgtaggtggcccatgacgtggcacttgtattagcataactcatcactagacatcggactacacgacacgtactacgttgtagctctacttccactacgtcctatcaagaggagctgtattcgccatcataggaggcttcatccacatgatttcccctattctcaggctacaccctagaccaaacctacgccaaaatccagttcactatcatattgcatcggcgtaaatcttatattatccttgccgcacaacaca

SEQ ID NO: 545581 - DNA, 959 bp, Homo sapiens
  misc_feature (18)..(18): n is a, c, g, or t
  misc_feature (298)..(299): n is a, c, g, or t
  misc_feature (343)..(343): n is a, c, g, or t
  misc_feature (347)..(347): n is a, c, g, or t
  misc_feature (610)..(610): n is a, c, g, or t
  misc_feature (653)..(653): n is a, c, g, or t
  misc_feature (692)..(692): n is a, c, g, or t
  misc_feature (799)..(800): n is a, c, g, or t
  misc_feature (816)..(816): n is a, c, g, or t
  misc_feature (837)..(837): n is a, c, g, or t
  misc_feature (876)..(876): n is a, c, g, or t
  misc_feature (903)..(903): n is a, c, g, or t
  misc_feature (907)..(907): n is a, c, g, or t
  misc_feature (909)..(910): n is a, c, g, or t
  misc_feature (924)..(924): n is a, c, g, or t
ccatctcaaaaatttttnggggaaaagaaaagaaaatatgccctctaccttctgagcccgaggagaaaagaaagaaaatatgctctgttgttctccccctcagatttattttcgtgtttttgtaggatcagacaaaggtgaaaatgaagcaatggaatcctgtaagtaagaagttttgtgatacttaagtagcctgcctgcatccctaaaatttagattctaaatcttctgtgttcgtttttgtgcctgaggaatactgctgtgccaagtggctcctcaaggcgatagttgggttgcnnccttgctgttggcacggcctcttcaccagtgtctacactctttntccncagctggtaagcgggcccctcagtgctaccccagttccgtcaactctgccaggactgtgatgctgttcaaccttggcagcgcttactgcctgaggagcgaatatgacaaagcccgaaagtgtctccaccaggcggcttcaatgatccatcctaaagaggtgccccctgaggccatcttgctggcagtctaacgttgaactgcagaatggtaatactcagctggccttacagatcatcaaaaggaatcagctgctcccctgcangtgaaaacacactctgaagtgagaaagaagccagtgttctacngcctcgtccacccgatccagcccatccaaatgccggctnttcaccactgtgcagagaaagtgatacttcacttttggaaaactgttacctgagacccaggggagaatttactggccattttagttgtatcacagcagaatgaatannagatggtgaaggctgntaattttgagtcaattctacncctgacttttggccaaaagcttacttaaaattaaggatntactaagtcatcatcagctgtttttcntaantnnagccagctattaantttgagccattatgtaatatatgccataggcaatt

SEQ ID NO: 545582 - DNA, 384 bp, Homo sapiens
atccttgaacaatgttaaacactttttgaaaatctgtcctgcaaatcagtactatcaagagaataatccaccgtactggaaaaaattatttgcaaaacatatatcttataaaagattgttatctaataatatacaacacaactcttaatactcaacaagagaataaacaacccagttttaaaatgggcaaatagctagaggccattattctaagcgaattaacgctggaatagaaaacctattaccacatgttctcacttattagtaggagctaaacattgtactcacagacctaacaatggtaacacagacgctgtggactactagacaggggagggaaagaggagcaagggctgaagaattgttgggtactacgctttggca

SEQ ID NO: 545583 - DNA, 137 bp, Homo sapiens
tcatcatgcagcaaacacaaagtctccgcctgcgcacgtcaccccatccaggacctgcagctcgccctgtccaccacagcagcttccacaccaggtggcgcagtgttcagcagggcgcacgtgccccctcacctgct

SEQ ID NO: 545584 - DNA, 2759 bp, Homo sapiens
  misc_feature (2410)..(2410): n is a, c, g, or t
  misc_feature (2453)..(2453): n is a, c, g, or t
  misc_feature (2492)..(2492): n is a, c, g, or t
  misc_feature (2599)..(2600): n is a, c, g, or t
  misc_feature (2616)..(2616): n is a, c, g, or t
  misc_feature (2637)..(2637): n is a, c, g, or t
  misc_feature (2676)..(2676): n is a, c, g, or t
  misc_feature (2703)..(2703): n is a, c, g, or t
  misc_feature (2707)..(2707): n is a, c, g, or t
  misc_feature (2709)..(2710): n is a, c, g, or t
  misc_feature (2724)..(2724): n is a, c, g, or t
agtgggtaccgggacgccgtgaggcggaagctgtgtatggcgggaggctgtggcggtcccttggtggggaagctgttgctgttgctagacgacgggaactagctctcgtcacttcctcagcccgccgtctgcccactcctctagccggaacctgggggcccggagccggggtaggcacagagttgtcctcggaggtccaggacagcggccagcccggcggcgggagtcagggccacgccacctgcagggaagaacccgagtcgaagcgggaagatggctgcagacaagcctgcagatcagggagcagagaaacatgaaggcacaggtcagtcctctgggatcactgatcaagagaaggagttatccaccaatgctttccaagctttcacatctggaaattatgatgcctgtctacaacaccttgcctgtctacaagatataaacaaagatgattataaaataattttgaatacagcagtagctgagttttttaaaagtaaccaaacaacaacagataatttgagacaaacacttaaccagctgaagaatcaggtccactcagctgttgaagaaatggatggattagatgatgttgaaaacagcatgttgtactataatcaagcagtcattctttatcatctgcggcagtatacagaagccatatcagttggtgaaaaactttatcagttcatagagccttttgaagaaaaatttgcccaagcagtgtgttttttgcttgtagacctgtatatattaacctaccaagctgagaaagctttgcatcttcttgctgtcctagaaaaaatgatttcacagggtaacaataacaaaaatggaaagaatgagactggtaataacaacaacaaagatggatctaatcataaagctgaaagtggagctctaatagaagctgcaaaatcaaagatacatcagtacaaagtacgagcttatatccaaatgaagtctctgaaagcatgtaaaagggaaatcaagtcagtcatgaatacagctggaaattccgcaccctctctctttcttaaaagcaattttgagtacttaagaggtaattatcgaaaagccgtgaagctattaaatagttcaaacattgctgagcatccaggattcatgaaaacaggtgaatgcttgagatgcatgttctggaataaccttggttgcatccattttgccatgagcaagcacaatttgggaatattctactttaaaaaggctctgcaagagaatgacaatgtctgtgcacagctcagtgcaggtagcactgatccaggtaaaaaattttcaggaagacccatgtgtacgttactaaccaataagagatatgagttgctgtataactgtggaattcagcttcttcacattggaaggcctcttgctgccttcgaatgtctgattgaagctgttcaggtttatcatgcaaatcctcgcctctggctacggctggctgaatgctgcattgctgccaataaggggacttctgaacaagaaactaaaggccttcccagcaaaaaaggaattgtacagtctattgttggtcaaggctatcatcgtaaaatagttttggcatcacagtctatacagaatactgtttataatgatgggcagtcttcggccattcctgtagccagtatggagtttgcagccatatgtctcagaaatgccttgttgctgctacctgaagaacagcaagatccaaagcaggaaaatggggctaaaaatagtaatcaattaggtgggaacacagagagcagcgaaagcagtgaaacttgcagcagtaaaagccatgatggagattaaattcattccagctccaccttcttctccattgagaaaacaggaattagaaaacttaaagtgctccatacttgcttgcagtgcctacgtggctctggctttgggtgataacctcatggctttgaatcatgcagataaacttcttcagcagcccaagctgtcaggatctcttaagtttttgggacatttatatgctgcagaagccctcatctctctcgacagaatatctgatgccattactcacttgaacccggagaatgtcactgatgtctccttagggatctcttcaaatgagcaggaccaaggatcagacaaaggtgaaaatgaagcaatggaatcctctggtaagcgggcccctcagtgctaccccagttccgtcaactctgccaggactgtgatgctgttcaaccttggcagcgcttactgcctgaggagcgaatatgacaaagcccgaaagtgtctccaccaggcggcttcaatgatccatcctaaagaggtgccccctgaggccatcttgctggcagtctaacgttgaactgcagaatggtaatactcagctggccttacagatcatcaaaaggaatcagctgctcccctgcangtgaaaacacactctgaagtgagaaagaagccagtgttctacngcctcgtccacccgatccagcccatccaaatgccggctnttcaccactgtgcagagaaagtgatacttcacttttggaaaactgttacctgagacccaggggagaatttactggccattttagttgtatcacagcagaatgaatannagatggtgaaggctgntaattttgagtcaattctacncctgacttttggccaaaagcttacttaaaattaaggatntactaagtcatcatcagctgtttttcntaantnnagccagctattaantttgagccattatgtaatatatgccataggcaatt

SEQ ID NO: 545585 - DNA, 853 bp, Homo sapiens
atcttaccacgcccatagcatcaaggctgcgaaagtagtgtccacaacagctcaggttccctacatccgtgagtcaccgggaaaactccttccaggcccgatcaccatgtagctgcacatggattgtgctcaggcttccccaactagtcaactccaagcccatcaccattgcctcgaaccccggacttccactaccagtccacgtagacgcaaggcgacgtggcaggctctgttgattattaatgccttatgttatcatggacaagcagacggggcaggtgatgtggagccaccactcccagttacaggaggtcctacaaacaagatctccacggcttctcaggtctcccaaggaacaggttccccatgttcctaaaattcatggaagtagtctatgtaccatctactgtcaagcgaggaggattcgttgtattgcatctatgccacctctttgctccaattggcgagtcatcgcctgagaaggttcggaaagccctcatagatcctagtagagcaggacggactcggagctttcacaacaagtgatcatcaaatcaggaacctggtgaagcccctcacgtgcccgcaagcaggagctgccagccagtcaccactcccgcagtatgtgactgtgaaagggggtcacatgatagctgtgtcccctcataaacaggtcagtaactcctggacgaagggcatggcccagtcaagcacaggttcagcccgtccaaggattgctcggggtaccagtagggtctgctttaccttcaactagtgaaggcaggctgtggcgatccagtggttggccgagatcctgcgtagcccaggccagccgtcttctgtctccaaagca

SEQ ID NO: 545586 - DNA, 133 bp, Homo sapiens
acctttattgacgctgcgtgtagtttattagggacgagtgctccctgcctacccctcccacaccctccttctgggaggtctgtcagccccaactgtagaagtagattttcttgccagtgtgggcaagtaatcc

SEQ ID NO: 545587 - DNA, 762 bp, Homo sapiens
  misc_feature (368)..(368): n is a, c, g, or t
gatcatgtataaagggagcaggaggaacaggcttcctgtgccgggggtgatatcgagagtgatctcggattagctgaaaaggacaaaacagaagagttagctccaggttttgcttcagagaaggaactatagtgctgaaagtaatgctgttggttcttgcacgagaaacccttatgttgtccacttattccatggtaattacacatggggtgggggagtgggtctctcagtccatgggcaatttcgagtggcctacagaagacagtgtcttttagtcgtatgcctagaaacgtgcaatatggactgttcccgtgagtgttgtggtggagggttagtttctttgccaacagatttcctaatgggaaaanttggttacttccgttgcattaacaggattcctaagactaaaatggaagagatgtgtatccagagcaggaattgctactcacttgtgtagattctgaaaaagttggtcatgtaagaggaagatttgtaggcttgaagatcatccttcaggagagaagaatagccgcatctgtctatagagaaatgaccaatacagagtctgacgattggatccgaggacaaagtcttggtataactagaagggaacctcgttggacccatgattaaacagttcgtctttcaagcaaatactgtgggaagaaattatttgcccactttcccggaagatggttccgcttgtgccctagacagttgagaggctttttgtaacgttccagaactctaagaccaagaagg

SEQ ID NO: 545588 - DNA, 3264 bp, Homo sapiens
agtgggtaccgggacgccgtgaggcggaagctgtgtatggcgggaggctgtggcggtcccttggtggggaagctgttgctgttgctagacgacgggaactagctctcgtcacttcctcagcccgccgtctgcccactcctctagccggaacctgggggcccggagccggggtaggcacagagttgtcctcggaggtccaggacagcggccagcccggcggcgggagtcagggccacgccacctgcagggaagaacccgagtcgaagcgggaagatggctgcagacaagcctgcagatcagggagcagagaaacatgaaggcacaggtcagtcctctgggatcactgatcaagagaaggagttatccaccaatgctttccaagctttcacatctggaaattatgatgcctgtctacaacaccttgcctgtctacaagatataaacaaagatgattataaaataattttgaatacagcagtagctgagttttttaaaagtaaccaaacaacaacagataatttgagacaaacacttaaccagctgaagaatcaggtccactcagctgttgaagaaatggatggattagatgatgttgaaaacagcatgttgtactataatcaagcagtcattctttatcatctgcggcagtatacagaagccatatcagttggtgaaaaactttatcagttcatagagccttttgaagaaaaatttgcccaagcagtgtgttttttgcttgtagacctgtatatattaacctaccaagctgagaaagctttgcatcttcttgctgtcctagaaaaaatgatttcacagggtaacaataacaaaaatggaaagaatgagactggtaataacaacaacaaagatggatctaatcataaagctgaaagtggagctctaatagaagctgcaaaatcaaagatacatcagtacaaagtacgagcttatatccaaatgaagtctctgaaagcatgtaaaagggaaatcaagtcagtcatgaatacagctggaaattccgcaccctctctctttcttaaaagcaattttgagtacttaagaggtaattatcgaaaagccgtgaagctattaaatagttcaaacattgctgagcatccaggattcatgaaaacaggtgaatgcttgagatgcatgttctggaataaccttggttgcatccattttgccatgagcaagcacaatttgggaatattctactttaaaaaggctctgcaagagaatgacaatgtctgtgcacagctcagtgcaggtagcactgatccaggtaaaaaattttcaggaagacccatgtgtacgttactaaccaataagagatatgagttgctgtataactgtggaattcagcttcttcacattggaaggcctcttgctgccttcgaatgtctgattgaagctgttcaggtttatcatgcaaatcctcgcctctggctacggctggctgaatgctgcattgctgccaataaggggacttctgaacaagaaactaaaggccttcccagcaaaaaaggaattgtacagtctattgttggtcaaggctatcatcgtaaaatagttttggcatcacagtctatacagaatactgtttataatgatgggcagtcttcggccattcctgtagccagtatggagtttgcagccatatgtctcagaaatgccttgttgctgctacctgaagaacagcaagatccaaagcaggaaaatggggctaaaaatagtaatcaattaggtgggaacacagagagcagcgaaagcagtgaaacttgcagcagtaaaagccatgatggagattaaattcattccagctccaccttcttctccattgagaaaacaggaattagaaaacttaaagtgctccatacttgcttgcagtgcctacgtggctctggctttgggtgataacctcatggctttgaatcatgcagataaacttcttcagcagcccaagctgtcaggatctcttaagtttttgggacatttatatgctgcagaagccctcatctctctcgacagaatatctgatgccattactcacttgaacccggagaatgtcactgatgtctccttagggatctcttcaaatgagcaggaccaaggttaatgaggacatctttgatcagaactggtcactgtttccatttccctcctgtcataattcaggatgtgtggaaatttaggcatggtggtaatgagaagaaagttttaggttggctttccacatttttgtctgtacttactttgtagcagttgtttgctaagtagacctgagagttaatgatcacatcatctaaattctcacttttgaaaggctggtactgttagaatggttaattttggttctgatactatttatttgttttcctttggagtgattctaaaatccataggggagtaaaaatattgcattcaagagtcagttttagtccaggcgtggtggctcacgcctgtaatcccagcactttgggaggctgtagcaggagggtcacttgagcccaagagttcaagaccagcctgggcaacctggtgagaccctgtctctattttaaaaataagggacaaacaaaaaacacaacaaaaaaaaaacacatggaggacagcacaggccacgaagaaccaccaaaaacacaaggaggggacgggggccccaaaggaaacagaaaacatgggcacaaaaccgtgttccaaagaaaaaccaggagagagaaaaaaggacgggagattcacaccacaaaaaaaacacgcccggggggaaacagcgcggtttcgaaacaaaacacaaaagaggacaacacagagaaaaaaaagagagacataaacaaagggagagacaaaagagaagacaaatcataaaaataccccgacgagtgcggaaaaagaaaaacaaaagaaaaaagaaaaagagaagaaagacacaaaaaaaagaaaacaaagaagaggagcaagacaaaagaaggaagagaggagaggaggagaagaggagaggtaggcaggaagcaaggagaaagaggacgagaagcgccgaaagagaaagaggaagatacagaaaaggcaagggaaggagaagagaggacaagagaaaaaagagagaaccgaagaaaagaaaagaaaaacagggggagacgaagagagagaggcagaaaaggaaagagggaaggaaagcggaaagcagagagaaggaacagaagaggagagacaacgaagaagaacgaacgacgagaggacgcacgacactaagcgagaggagct

SEQ ID NO: 545589 - DNA, 2677 bp, Homo sapiens
  misc_feature (2328)..(2328): n is a, c, g, or t
  misc_feature (2371)..(2371): n is a, c, g, or t
  misc_feature (2410)..(2410): n is a, c, g, or t
  misc_feature (2517)..(2518): n is a, c, g, or t
  misc_feature (2534)..(2534): n is a, c, g, or t
  misc_feature (2555)..(2555): n is a, c, g, or t
  misc_feature (2594)..(2594): n is a, c, g, or t
  misc_feature (2621)..(2621): n is a, c, g, or t
  misc_feature (2625)..(2625): n is a, c, g, or t
  misc_feature (2627)..(2628): n is a, c, g, or t
  misc_feature (2642)..(2642): n is a, c, g, or t
agtgggtaccgggacgccgtgaggcggaagctgtgtatggcgggaggctgtggcggtcccttggtggggaagctgttgctgttgctagacgacgggaactagctctcgtcacttcctcagcccgccgtctgcccactcctctagccggaacctgggggcccggagccggggtaggcacagagttgtcctcggaggtccaggacagcggccagcccggcggcgggagtcagggccacgccacctgcagggaagaacccgagtcgaagcgggaagatggctgcagacaagcctgcagatcagggagcagagaaacatgaaggcacaggtcagtcctctgggatcactgatcaagagaaggagttatccaccaatgctttccaagctttcacatctggaaattatgatgcctgtctacaacaccttgcctgtctacaagatataaacaaagatgattataaaataattttgaatacagcagtagctgagttttttaaaagtaaccaaacaacaacagataatttgagacaaacacttaaccagctgaagaatcaggtccactcagctgttgaagaaatggatggattagatgatgttgaaaacagcatgttgtactataatcaagcagtcattctttatcatctgcggcagtatacagaagccatatcagttggtgaaaaactttatcagttcatagagccttttgaagaaaaatttgcccaagcagtgtgttttttgcttgtagacctgtatatattaacctaccaagctgagaaagctttgcatcttcttgctgtcctagaaaaaatgatttcacagggtaacaataacaaaaatggaaagaatgagactggtaataacaacaacaaagatggatctaatcataaagctgaaagtggagctctaatagaagctgcaaaatcaaagatacatcagtacaaagtacgagcttatatccaaatgaagtctctgaaagcatgtaaaagggaaatcaagtcagtcatgaatacagctggaaattccgcaccctctctctttcttaaaagcaattttgagtacttaagaggtaattatcgaaaagccgtgaagctattaaatagttcaaacattgctgagcatccaggattcatgaaaacaggtgaatgcttgagatgcatgttctggaataaccttggttgcatccattttgccatgagcaagcacaatttgggaatattctactttaaaaaggctctgcaagagaatgacaatgtctgtgcacagctcagtgcaggtagcactgatccaggtaaaaaattttcaggaagacccatgtgtacgttactaaccaataagagatatgagttgctgtataactgtggaattcagcttcttcacattggaaggcctcttgctgccttcgaatgtctgattgaagctgttcaggtttatcatgcaaatcctcgcctctggctacggctggctgaatgctgcattgctgccaataaggggacttctgaacaagaaactaaaggccttcccagcaaaaaaggaattgtacagtctattgttggtcaaggctatcatcgtaaaatagttttggcatcacagtctatacagaatactgtttataatgatgggcagtcttcggccattcctgtagccagtatggagtttgcagccatatgtctcagaaatgccttgttgctgctacctgaagaacagcaagatccaaagcaggaaaatggggctaaaaatagtaatcaattaggtgggaacacagagagcagcgaaagcagtgaaacttgcaggtgctccatacttgcttgcagtgcctacgtggctctggctttgggtgataacctcatggctttgaatcatgcagataaacttcttcagcagcccaagctgtcaggatctcttaagtttttgggacatttatatgctgcagaagccctcatctctctcgacagaatatctgatgccattactcacttgaacccggagaatgtcactgatgtctccttagggatctcttcaaatgagcaggaccaaggatcagacaaaggtgaaaatgaagcaatggaatcctctggtaagcgggcccctcagtgctaccccagttccgtcaactctgccaggactgtgatgctgttcaaccttggcagcgcttactgcctgaggagcgaatatgacaaagcccgaaagtgtctccaccaggcggcttcaatgatccatcctaaagaggtgccccctgaggccatcttgctggcagtctaacgttgaactgcagaatggtaatactcagctggccttacagatcatcaaaaggaatcagctgctcccctgcangtgaaaacacactctgaagtgagaaagaagccagtgttctacngcctcgtccacccgatccagcccatccaaatgccggctnttcaccactgtgcagagaaagtgatacttcacttttggaaaactgttacctgagacccaggggagaatttactggccattttagttgtatcacagcagaatgaatannagatggtgaaggctgntaattttgagtcaattctacncctgacttttggccaaaagcttacttaaaattaaggatntactaagtcatcatcagctgtttttcntaantnnagccagctattaantttgagccattatgtaatatatgccataggcaatt

SEQ ID NO: 545590 - DNA, 2627 bp, Homo sapiens
  misc_feature (2287)..(2288): n is a, c, g, or t
  misc_feature (2332)..(2332): n is a, c, g, or t
  misc_feature (2336)..(2336): n is a, c, g, or t
agtgggtaccgggacgccgtgaggcggaagctgtgtatggcgggaggctgtggcggtcccttggtggggaagctgttgctgttgctagacgacgggaactagctctcgtcacttcctcagcccgccgtctgcccactcctctagccggaacctgggggcccggagccggggtaggcacagagttgtcctcggaggtccaggacagcggccagcccggcggcgggagtcagggccacgccacctgcagggaagaacccgagtcgaagcgggaagatggctgcagacaagcctgcagatcagggagcagagaaacatgaaggcacaggtcagtcctctgggatcactgatcaagagaaggagttatccaccaatgctttccaagctttcacatctggaaattatgatgcctgtctacaacaccttgcctgtctacaagatataaacaaagatgattataaaataattttgaatacagcagtagctgagttttttaaaagtaaccaaacaacaacagataatttgagacaaacacttaaccagctgaagaatcaggtccactcagctgttgaagaaatggatggattagatgatgttgaaaacagcatgttgtactataatcaagcagtcattctttatcatctgcggcagtatacagaagccatatcagttggtgaaaaactttatcagttcatagagccttttgaagaaaaatttgcccaagcagtgtgttttttgcttgtagacctgtatatattaacctaccaagctgagaaagctttgcatcttcttgctgtcctagaaaaaatgatttcacagggtaacaataacaaaaatggaaagaatgagactggtaataacaacaacaaagatggatctaatcataaagctgaaagtggagctctaatagaagctgcaaaatcaaagatacatcagtacaaagtacgagcttatatccaaatgaagtctctgaaagcatgtaaaagggaaatcaagtcagtcatgaatacagctggaaattccgcaccctctctctttcttaaaagcaattttgagtacttaagaggtaattatcgaaaagccgtgaagctattaaatagttcaaacattgctgagcatccaggattcatgaaaacaggtgaatgcttgagatgcatgttctggaataaccttggttgcatccattttgccatgagcaagcacaatttgggaatattctactttaaaaaggctctgcaagagaatgacaatgtctgtgcacagctcagtgcaggtagcactgatccaggtaaaaaattttcaggaagacccatgtgtacgttactaaccaataagagatatgagttgctgtataactgtggaattcagcttcttcacattggaaggcctcttgctgccttcgaatgtctgattgaagctgttcaggtttatcatgcaaatcctcgcctctggctacggctggctgaatgctgcattgctgccaataaggggacttctgaacaagaaactaaaggccttcccagcaaaaaaggaattgtacagtctattgttggtcaaggctatcatcgtaaaatagttttggcatcacagtctatacagaatactgtttataatgatgggcagtcttcggccattcctgtagccagtatggagtttgcagccatatgtctcagaaatgccttgttgctgctacctgaagaacagcaagatccaaagcaggaaaatggggctaaaaatagtaatcaattaggtgggaacacagagagcagcgaaagcagtgaaacttgcagcagtaaaagccatgatggagattaaattcattccagctccaccttcttctccattgagaaaacaggaattagaaaacttaaagtgctccatacttgcttgcagtgcctacgtggctctggctttgggtgataacctcatggctttgaatcatgcagataaacttcttcagcagcccaagctgtcaggatctcttaagtttttgggacatttatatgctgcagaagccctcatctctctcgacagaatatctgatgccattactcacttgaacccggagaatgtcactgatgtctccttagggatctcttcaaatgagcaggaccaaggatcagacaaaggtgaaaatgaagcaatggaatcctgtaagtaagaagttttgtgatacttaagtagcctgcctgcatccctaaaatttagattctaaatcttctgtgttcgtttttgtgcctgaggaatactgctgtgccaagtggctcctcaaggcgatagttgggttgcnnccttgctgttggcacggcctcttcaccagtgtctacactctttntccncagctggtaagcgggcccctcagtgctaccccagttccgtcaactctgccaggactgtgatgctgttcaaccttggcagcgcttactgcctgaggagcgaatatgacaaagcccgaaagtgtctccaccaggtgagtccagagtgggaggaactgaaccttgtaaagcagcctacacaagttcgaggtttatattttttgttactttgtttgaagcatctgatcagtttgttaaatattggaatatcactttcccagatataaaatattcttacaagtaacacacgcgcgg

SEQ ID NO: 545591 - DNA, 224 bp, Homo sapiens
  misc_feature (37)..(37): n is a, c, g, or t
  misc_feature (165)..(165): n is a, c, g, or t
agaaaacgaaaagtattaactaaagagaatacttcanttgtggtactaaagtattcttgagctgtgggatttttttttttcctcttttttttgagacagagtctcgctctgtcgcccaggctggagtggcaccatctcggctcactgcaagctccgcctcccggnttcataccattctacctcagcctcccgagtagctgggactacagacgcctgccaccacg

SEQ ID NO: 545592 - DNA, 1994 bp, Homo sapiens
agtgggtaccgggacgccgtgaggcggaagctgtgtatggcgggaggctgtggcggtcccttggtggggaagctgttgctgttgctagacgacgggaactagctctcgtcacttcctcagcccgccgtctgcccactcctctagccggaacctgggggcccggagccggggtaggcacagagttgtcctcggaggtccaggacagcggccagcccggcggcgggagtcagggccacgccacctgcagggaagaacccgagtcgaagcgggaagatggctgcagacaagcctgcagatcagggagcagagaaacatgaaggcacaggtcagtcctctgggatcactgatcaagagaaggagttatccaccaatgctttccaagctttcacatctggaaattatgatgcctgtctacaacaccttgcctgtctacaagatataaacaaagatgattataaaataattttgaatacagcagtagctgagttttttaaaagtaaccaaacaacaacagataatttgagacaaacacttaaccagctgaagaatcaggtccactcagctgttgaagaaatggatggattagatgatgttgaaaacagcatgttgtactataatcaagcagtcattctttatcatctgcggcagtatacagaagccatatcagttggtgaaaaactttatcagttcatagagccttttgaagaaaaatttgcccaagcagtgtgttttttgcttgtagacctgtatatattaacctaccaagctgagaaagctttgcatcttcttgctgtcctagaaaaaatgatttcacagggtaacaataacaaaaatggaaagaatgagactggtaataacaacaacaaagatggatctaatcataaagctgaaagtggagctctaatagaagctgcaaaatcaaagatacatcagtacaaagtacgagcttatatccaaatgaagtctctgaaagcatgtaaaagggaaatcaagtcagtcatgaatacagctggaaattccgcaccctctctctttcttaaaagcaattttgagtacttaagaggtaattatcgaaaagccgtgaagctattaaatagttcaaacattgctgagcatccaggattcatgaaaacaggtgaatgcttgagatgcatgttctggaataaccttggttgcatccattttgccatgagcaagcacaatttgggaatattctactttaaaaaggctctgcaagagaatgacaatgtctgtgcacagctcagtgcaggtagcactgatccaggtaaaaaattttcaggaagacccatgtgtacgttactaaccaataagagatatgagttgctgtataactgtggaattcagcttcttcacattggaaggcctcttgctgccttcgaatgtctgattgaagctgttcaggtttatcatgcaaatcctcgcctctggctacggctggctgaatgctgcattgctgccaataaggggacttctgaacaagaaactaaaggccttcccagcaaaaaaggaattgtacagtctattgttggtcaaggctatcatcgtaaaatagttttggcatcacagtctatacagaatactgtttataatgatgggcagtcttcggccattcctgtagccagtatggagtttgcagccatatgtctcagaaatgccttgttgctgctacctgaagaacagcaagatccaaagcaggaaaatggggctaaaaatagtaatcaattaggtgggaacacagagagcagcgaaagcagtgaaacttgcagcagtaaagccatggatgggataaattcctcccgctcccaccttctgctcctgggaaaccggatttgacaacttatgggccccacatggtgggaggccaagggccgggttgggggaaaccccgggttgagaatgggaaaatttcggagccaggtcgggtcttgttgggattatttggaagcccctttcgagaatgggtcacgaacgga

SEQ ID NO: 545593 - DNA, 346 bp, Homo sapiens
tggggctccatagggaagtcttatggacaacaaaacgtgtccaattaagttctgggatggaatcgcaacaagggttcagttaccccctttccctccctattttggaagacttaaaaagggaagaaccaacccaaaaggttcatccccacaaggccaaacacgatgcttttggaccagagtcggcccaaaagcccctcgggggagctctttctcaacccgcctcacgggggccaggtccatccggggggtgccgggccccaggggctgcagccacaagtttaatagtcgggaataggtgggaatagagtgggggaggcagcagaggtgtgaaagggtcaaaagaggg

SEQ ID NO: 545594 - DNA, 2720 bp, Homo sapiens
  misc_feature (2371)..(2371): n is a, c, g, or t
  misc_feature (2414)..(2414): n is a, c, g, or t
  misc_feature (2453)..(2453): n is a, c, g, or t
  misc_feature (2560)..(2561): n is a, c, g, or t
  misc_feature (2577)..(2577): n is a, c, g, or t
  misc_feature (2598)..(2598): n is a, c, g, or t
  misc_feature (2637)..(2637): n is a, c, g, or t
  misc_feature (2664)..(2664): n is a, c, g, or t
  misc_feature (2668)..(2668): n is a, c, g, or t
  misc_feature (2670)..(2671): n is a, c, g, or t
  misc_feature (2685)..(2685): n is a, c, g, or t
agcggggtgtatttcttttctgcttagttcaaacctaaaggcaatgtttatttagaaatgaagtctatggtgtaaagactgtcaaggttgtgggtcaaagagctctgtacgcatagaaggtcagccatgttcattaggccagagtagaaggaaagtcaagcttatgggtgaacggtcgtatactctttcaattggcaacggagactactttgggcaaataaagaaatgctgtgggattatgtgcagactctgtctgatcagggagcagagaaacatgaaggcacaggtcagtcctctgggatcactgatcaagagaaggagttatccaccaatgctttccaagctttcacatctggaaattatgatgcctgtctacaacaccttgcctgtctacaagatataaacaaagatgattataaaataattttgaatacagcagtagctgagttttttaaaagtaaccaaacaacaacagataatttgagacaaacacttaaccagctgaagaatcaggtccactcagctgttgaagaaatggatggattagatgatgttgaaaacagcatgttgtactataatcaagcagtcattctttatcatctgcggcagtatacagaagccatatcagttggtgaaaaactttatcagttcatagagccttttgaagaaaaatttgcccaagcagtgtgttttttgcttgtagacctgtatatattaacctaccaagctgagaaagctttgcatcttcttgctgtcctagaaaaaatgatttcacagggtaacaataacaaaaatggaaagaatgagactggtaataacaacaacaaagatggatctaatcataaagctgaaagtggagctctaatagaagctgcaaaatcaaagatacatcagtacaaagtacgagcttatatccaaatgaagtctctgaaagcatgtaaaagggaaatcaagtcagtcatgaatacagctggaaattccgcaccctctctctttcttaaaagcaattttgagtacttaagaggtaattatcgaaaagccgtgaagctattaaatagttcaaacattgctgagcatccaggattcatgaaaacaggtgaatgcttgagatgcatgttctggaataaccttggttgcatccattttgccatgagcaagcacaatttgggaatattctactttaaaaaggctctgcaagagaatgacaatgtctgtgcacagctcagtgcaggtagcactgatccaggtaaaaaattttcaggaagacccatgtgtacgttactaaccaataagagatatgagttgctgtataactgtggaattcagcttcttcacattggaaggcctcttgctgccttcgaatgtctgattgaagctgttcaggtttatcatgcaaatcctcgcctctggctacggctggctgaatgctgcattgctgccaataaggggacttctgaacaagaaactaaaggccttcccagcaaaaaaggaattgtacagtctattgttggtcaaggctatcatcgtaaaatagttttggcatcacagtctatacagaatactgtttataatgatgggcagtcttcggccattcctgtagccagtatggagtttgcagccatatgtctcagaaatgccttgttgctgctacctgaagaacagcaagatccaaagcaggaaaatggggctaaaaatagtaatcaattaggtgggaacacagagagcagcgaaagcagtgaaacttgcagcagtaaaagccatgatggagattaaattcattccagctccaccttcttctccattgagaaaacaggaattagaaaacttaaagtgctccatacttgcttgcagtgcctacgtggctctggctttgggtgataacctcatggctttgaatcatgcagataaacttcttcagcagcccaagctgtcaggatctcttaagtttttgggacatttatatgctgcagaagccctcatctctctcgacagaatatctgatgccattactcacttgaacccggagaatgtcactgatgtctccttagggatctcttcaaatgagcaggaccaaggatcagacaaaggtgaaaatgaagcaatggaatcctctggtaagcgggcccctcagtgctaccccagttccgtcaactctgccaggactgtgatgctgttcaaccttggcagcgcttactgcctgaggagcgaatatgacaaagcccgaaagtgtctccaccaggcggcttcaatgatccatcctaaagaggtgccccctgaggccatcttgctggcagtctaacgttgaactgcagaatggtaatactcagctggccttacagatcatcaaaaggaatcagctgctcccctgcangtgaaaacacactctgaagtgagaaagaagccagtgttctacngcctcgtccacccgatccagcccatccaaatgccggctnttcaccactgtgcagagaaagtgatacttcacttttggaaaactgttacctgagacccaggggagaatttactggccattttagttgtatcacagcagaatgaatannagatggtgaaggctgntaattttgagtcaattctacncctgacttttggccaaaagcttacttaaaattaaggatntactaagtcatcatcagctgtttttcntaantnnagccagctattaantttgagccattatgtaatatatgccataggcaatt

SEQ ID NO: 545595 - DNA, 342 bp, Homo sapiens
  misc_feature (162)..(162): n is a, c, g, or t
  misc_feature (313)..(313): n is a, c, g, or t
  misc_feature (331)..(331): n is a, c, g, or t
ggtaatttacaaagaaaagaggtttgattggctcacggtcctgcaggctgtacacaaagcatggtgttggcatctcttagcttctggggaggcctcaggaagtttccaatcatagcggaagacagagagcaggcatcacatggtgagggaaggggtgaggtnccaggctccttaaacaaccagatctcatgggaactatcagggcaagaactgactcattaccatggggatggcaccaacccattcatgaggggtctgtgcccattgacccaatatctcccagtaagccccatctccagcatgggaggtcacntttcagttttgaggtttnggagaggacac

SEQ ID NO: 545596 - DNA, 1375 bp, Homo sapiens
  misc_feature (338)..(338): n is a, c, g, or t
  misc_feature (552)..(552): n is a, c, g, or t
  misc_feature (557)..(557): n is a, c, g, or t
  misc_feature (746)..(746): n is a, c, g, or t
ttttcaatcatttatttaacttctttaattgaaacacagttttcttcctaggttgttctcactccaggtcttcagggccagaagggaatagggtatttttaaactattatcaaagaatctcaaaatatttaaagaaatattattattattatgttattattattatatctttctaactatttttatgggaatatttaaaatatttctagagaggcttttgtggtctctctctctccatttatactctctataggtctcaagcctctcatttatatcaccccgagagaggacacaagaaagaggggctgtgcctctcttctctatagacaccctctccncttctctctcctttattgtctcctctctttgtctcccacccccgagacacgaggggaacaacacaagctctctcgagaaagagatatctcctataagacgagcgatatatagaaagtctctcacgacgtatatatgtgttgtgcgcaagagagagcgcgagagagacggggacaaaaaagaaaaaaaagctcctcgaggtttttctctctctcnccacnacctctctcgtcgagacccacatttgtgccgccgacgtgtgttgtgctcgttgtcccgagggggccccgtggttttctcatgtgcgcacgccttttgtgtaccccacgagtctcgccgtgggaatctcctatgagggggggcgtgggggcgtataagatctccaagagaagctctctgtgtagcgccanagaacccagggtggcctccacgtgatattatttcccctctttttcccccaaatcttcagtgtggcgcaggtgtgtgcaagcggtttaaacccccaaagacaagacattctctctcccagtgtgggcccccaacgaggggccacgaggggaacacactcttattgtgcattgtggaatataagtctacccacagggggagcaaacgaaacacgttacatgtggccctaagtgtgggaaaaaaccaacccctttggtgaaacaagggggccccagaaaggaaaacccgtgtgtctttttcacacccatatttccccccttttttttgttccccccaactccctgtgtgatagcagagggggacgaggaaaaaggcgtctcttggttcaaccccctcatccctcccttttgggtggtgtgaaacacgacttatcaaaaacgccaagagcgttccctctgtggtccaagaactctcaaaagggccccaacggttccccctttggttcaaggcgaaacacgagcggcttctcaagaaaaacaaaacgctgtgaggctcctggtgcgtggtcgcagcccccgcctggtttgttgtcgcccccacgggtggcatctgtgcgcgaacccaccttttc

SEQ ID NO: 545597 - DNA, 283 bp, Homo sapiens
ggtcaatgaaggtgaatacgaggctgaaggaaatagcaagattcacctacacagttctggaggatggttgcacgaaacacactggggaatgtgagcaaaacagtctttgaatatcgaacacgcaagggctgtgagtactcacctattgtagcatcttgcaccctcatgacattggtggtcctgcagtcaagaatttggtcgtggcacgttggccctgttatgctgttttattcaactcaaactcgtatctgcaaatcccatacaaaacaaaatatttaactcc

SEQ ID NO: 545598 - DNA, 2694 bp, Homo sapiens
  misc_feature (2345)..(2345): n is a, c, g, or t
  misc_feature (2388)..(2388): n is a, c, g, or t
  misc_feature (2427)..(2427): n is a, c, g, or t
  misc_feature (2534)..(2535): n is a, c, g, or t
  misc_feature (2551)..(2551): n is a, c, g, or t
  misc_feature (2572)..(2572): n is a, c, g, or t
  misc_feature (2611)..(2611): n is a, c, g, or t
  misc_feature (2638)..(2638): n is a, c, g, or t
  misc_feature (2642)..(2642): n is a, c, g, or t
  misc_feature (2644)..(2645): n is a, c, g, or t
  misc_feature (2659)..(2659): n is a, c, g, or t
agtgggtaccgggacgccgtgaggcggaagctgtgtatggcgggaggctgtggcggtcccttggtggggaagctgttgctgttgctagacgacgggaactagctctcgtcacttcctcagcccgccgtctgcccactcctctagccggaacctgggggcccggagccggggtaggcacagagttgtcctcggaggtccaggacagcggccagcccggcggcgggagtcagggccacgccacctgcagggaagaacccgagtcgaagcgggaagatggctgcagacaagcctgcagatcagggagcagagaaacatgaaggcacagtctggaaattatgatgcctgtctacaacaccttgcctgtctacaagatataaacaaagatgattataaaataattttgaatacagcagtagctgagttttttaaaagtaaccaaacaacaacagataatttgagacaaacacttaaccagctgaagaatcaggtccactcagctgttgaagaaatggatggattagatgatgttgaaaacagcatgttgtactataatcaagcagtcattctttatcatctgcggcagtatacagaagccatatcagttggtgaaaaactttatcagttcatagagccttttgaagaaaaatttgcccaagcagtgtgttttttgcttgtagacctgtatatattaacctaccaagctgagaaagctttgcatcttcttgctgtcctagaaaaaatgatttcacagggtaacaataacaaaaatggaaagaatgagactggtaataacaacaacaaagatggatctaatcataaagctgaaagtggagctctaatagaagctgcaaaatcaaagatacatcagtacaaagtacgagcttatatccaaatgaagtctctgaaagcatgtaaaagggaaatcaagtcagtcatgaatacagctggaaattccgcaccctctctctttcttaaaagcaattttgagtacttaagaggtaattatcgaaaagccgtgaagctattaaatagttcaaacattgctgagcatccaggattcatgaaaacaggtgaatgcttgagatgcatgttctggaataaccttggttgcatccattttgccatgagcaagcacaatttgggaatattctactttaaaaaggctctgcaagagaatgacaatgtctgtgcacagctcagtgcaggtagcactgatccaggtaaaaaattttcaggaagacccatgtgtacgttactaaccaataagagatatgagttgctgtataactgtggaattcagcttcttcacattggaaggcctcttgctgccttcgaatgtctgattgaagctgttcaggtttatcatgcaaatcctcgcctctggctacggctggctgaatgctgcattgctgccaataaggggacttctgaacaagaaactaaaggccttcccagcaaaaaaggaattgtacagtctattgttggtcaaggctatcatcgtaaaatagttttggcatcacagtctatacagaatactgtttataatgatgggcagtcttcggccattcctgtagccagtatggagtttgcagccatatgtctcagaaatgccttgttgctgctacctgaagaacagcaagatccaaagcaggaaaatggggctaaaaatagtaatcaattaggtgggaacacagagagcagcgaaagcagtgaaacttgcagcagtaaaagccatgatggagattaaattcattccagctccaccttcttctccattgagaaaacaggaattagaaaacttaaagtgctccatacttgcttgcagtgcctacgtggctctggctttgggtgataacctcatggctttgaatcatgcagataaacttcttcagcagcccaagctgtcaggatctcttaagtttttgggacatttatatgctgcagaagccctcatctctctcgacagaatatctgatgccattactcacttgaacccggagaatgtcactgatgtctccttagggatctcttcaaatgagcaggaccaaggatcagacaaaggtgaaaatgaagcaatggaatcctctggtaagcgggcccctcagtgctaccccagttccgtcaactctgccaggactgtgatgctgttcaaccttggcagcgcttactgcctgaggagcgaatatgacaaagcccgaaagtgtctccaccaggcggcttcaatgatccatcctaaagaggtgccccctgaggccatcttgctggcagtctaacgttgaactgcagaatggtaatactcagctggccttacagatcatcaaaaggaatcagctgctcccctgcangtgaaaacacactctgaagtgagaaagaagccagtgttctacngcctcgtccacccgatccagcccatccaaatgccggctnttcaccactgtgcagagaaagtgatacttcacttttggaaaactgttacctgagacccaggggagaatttactggccattttagttgtatcacagcagaatgaatannagatggtgaaggctgntaattttgagtcaattctacncctgacttttggccaaaagcttacttaaaattaaggatntactaagtcatcatcagctgtttttcntaantnnagccagctattaantttgagccattatgtaatatatgccataggcaatt

SEQ ID NO: 545599 - DNA, 420 bp, Homo sapiens
atgaggaagtcctatgtgccaggccgtctgaatcctgggctcaagcgtcgctgtctgggctcccaaagtgtagattacagggtgagcatggacgtggctgtaatatgatttgatgaggttaggcatgatgtcagaattctattcaaatctggtctgccctggagctccaagcccatctccctagatgtgttctccacatcacctcttgggtttggacaggtaccccaaacacaaccctaaagagaaccacagtacttcattcagtgttccctatcacaggactggcgtcaccactcaacccctccttggaaacctgggtgccatctttgattcctagtttggcttttcctctctatatccagagtcgccaatcctactcctggcttcctgtcacatataccctcttttctccacctgcac

SEQ ID NO: 545600 - DNA, 122 bp, Homo sapiens
ctgttgtggcaatccaatacaggcgcattgccggcgcttattttgtctggatggttcagtgatcagtcatcctgagtcagtgacgccagcatgcttcctatatggctggttcagaatataag

SEQ ID NO: 545601 - DNA, 2504 bp, Homo sapiens
  misc_feature (2155)..(2155): n is a, c, g, or t
  misc_feature (2198)..(2198): n is a, c, g, or t
  misc_feature (2237)..(2237): n is a, c, g, or t
  misc_feature (2344)..(2345): n is a, c, g, or t
  misc_feature (2361)..(2361): n is a, c, g, or t
  misc_feature (2382)..(2382): n is a, c, g, or t
  misc_feature (2421)..(2421): n is a, c, g, or t
  misc_feature (2448)..(2448): n is a, c, g, or t
  misc_feature (2452)..(2452): n is a, c, g, or t
  misc_feature (2454)..(2455): n is a, c, g, or t
  misc_feature (2469)..(2469): n is a, c, g, or t
agtgggtaccgggacgccgtgaggcggaagctgtgtatggcgggaggctgtggcggtcccttggtggggaagctgttgctgttgctagacgacgggaactagctctcgtcacttcctcagcccgccgtctgcccactcctctagccggaacctgggggcccggagccggggtaggcacagagttgtcctcggaggtccaggacagcggccagcccggcggcgggagtcagggccacgccacctgcagggaagaacccgagtcgaagcgggaagatggctgcagacaagcctgcacaggtccactcagctgttgaagaaatggatggattagatgatgttgaaaacagcatgttgtactataatcaagcagtcattctttatcatctgcggcagtatacagaagccatatcagttggtgaaaaactttatcagttcatagagccttttgaagaaaaatttgcccaagcagtgtgttttttgcttgtagacctgtatatattaacctaccaagctgagaaagctttgcatcttcttgctgtcctagaaaaaatgatttcacagggtaacaataacaaaaatggaaagaatgagactggtaataacaacaacaaagatggatctaatcataaagctgaaagtggagctctaatagaagctgcaaaatcaaagatacatcagtacaaagtacgagcttatatccaaatgaagtctctgaaagcatgtaaaagggaaatcaagtcagtcatgaatacagctggaaattccgcaccctctctctttcttaaaagcaattttgagtacttaagaggtaattatcgaaaagccgtgaagctattaaatagttcaaacattgctgagcatccaggattcatgaaaacaggtgaatgcttgagatgcatgttctggaataaccttggttgcatccattttgccatgagcaagcacaatttgggaatattctactttaaaaaggctctgcaagagaatgacaatgtctgtgcacagctcagtgcaggtagcactgatccaggtaaaaaattttcaggaagacccatgtgtacgttactaaccaataagagatatgagttgctgtataactgtggaattcagcttcttcacattggaaggcctcttgctgccttcgaatgtctgattgaagctgttcaggtttatcatgcaaatcctcgcctctggctacggctggctgaatgctgcattgctgccaataaggggacttctgaacaagaaactaaaggccttcccagcaaaaaaggaattgtacagtctattgttggtcaaggctatcatcgtaaaatagttttggcatcacagtctatacagaatactgtttataatgatgggcagtcttcggccattcctgtagccagtatggagtttgcagccatatgtctcagaaatgccttgttgctgctacctgaagaacagcaagatccaaagcaggaaaatggggctaaaaatagtaatcaattaggtgggaacacagagagcagcgaaagcagtgaaacttgcagcagtaaaagccatgatggagattaaattcattccagctccaccttcttctccattgagaaaacaggaattagaaaacttaaagtgctccatacttgcttgcagtgcctacgtggctctggctttgggtgataacctcatggctttgaatcatgcagataaacttcttcagcagcccaagctgtcaggatctcttaagtttttgggacatttatatgctgcagaagccctcatctctctcgacagaatatctgatgccattactcacttgaacccggagaatgtcactgatgtctccttagggatctcttcaaatgagcaggaccaaggatcagacaaaggtgaaaatgaagcaatggaatcctctggtaagcgggcccctcagtgctaccccagttccgtcaactctgccaggactgtgatgctgttcaaccttggcagcgcttactgcctgaggagcgaatatgacaaagcccgaaagtgtctccaccaggcggcttcaatgatccatcctaaagaggtgccccctgaggccatcttgctggcagtctaacgttgaactgcagaatggtaatactcagctggccttacagatcatcaaaaggaatcagctgctcccctgcangtgaaaacacactctgaagtgagaaagaagccagtgttctacngcctcgtccacccgatccagcccatccaaatgccggctnttcaccactgtgcagagaaagtgatacttcacttttggaaaactgttacctgagacccaggggagaatttactggccattttagttgtatcacagcagaatgaatannagatggtgaaggctgntaattttgagtcaattctacncctgacttttggccaaaagcttacttaaaattaaggatntactaagtcatcatcagctgtttttcntaantnnagccagctattaantttgagccattatgtaatatatgccataggcaatt

SEQ ID NO: 545602 - DNA, 432 bp, Homo sapiens
  misc_feature (59)..(59): n is a, c, g, or t
  misc_feature (129)..(129): n is a, c, g, or t
  misc_feature (176)..(176): n is a, c, g, or t
  misc_feature (196)..(196): n is a, c, g, or t
  misc_feature (225)..(225): n is a, c, g, or t
  misc_feature (256)..(256): n is a, c, g, or t
  misc_feature (276)..(277): n is a, c, g, or t
  misc_feature (280)..(280): n is a, c, g, or t
  misc_feature (285)..(285): n is a, c, g, or t
  misc_feature (287)..(287): n is a, c, g, or t
  misc_feature (298)..(298): n is a, c, g, or t
  misc_feature (304)..(304): n is a, c, g, or t
  misc_feature (306)..(306): n is a, c, g, or t
  misc_feature (312)..(312): n is a, c, g, or t
  misc_feature (314)..(315): n is a, c, g, or t
  misc_feature (327)..(327): n is a, c, g, or t
  misc_feature (338)..(339): n is a, c, g, or t
  misc_feature (347)..(347): n is a, c, g, or t
  misc_feature (350)..(350): n is a, c, g, or t
gagggttttctcataaatgagggctgcacattgcctgttctgcttcgaagtattcaatnccgctcagtattttaaatgaagtgattctaagatttggtttgggatcaataggaaagcatatgcagccanccaagatgcaaatgttttgaaatgatatgaccaaaattttaagtagnaaagtcacccaaacacttcngctttcacttaagtgtctggcccgcaatnctgtaggaacaagcatgatcttgttactgtnatattttaaatatccacagnnctnacttntnccaaatgatcntagtantngcctananntatctttctctnacctgttattnntcaatttntcncagtatttttatacgaaaaacacttctattgatatctcttagtgtgcagttgataagaaagtttggtatataatggtgggta

SEQ ID NO: 545603 - DNA, 550 bp, Homo sapiens
  misc_feature (59)..(59): n is a, c, g, or t
  misc_feature (129)..(129): n is a, c, g, or t
  misc_feature (176)..(176): n is a, c, g, or t
  misc_feature (196)..(196): n is a, c, g, or t
  misc_feature (225)..(225): n is a, c, g, or t
  misc_feature (256)..(256): n is a, c, g, or t
  misc_feature (276)..(277): n is a, c, g, or t
  misc_feature (280)..(280): n is a, c, g, or t
  misc_feature (285)..(285): n is a, c, g, or t
  misc_feature (287)..(287): n is a, c, g, or t
  misc_feature (298)..(298): n is a, c, g, or t
  misc_feature (304)..(304): n is a, c, g, or t
  misc_feature (306)..(306): n is a, c, g, or t
  misc_feature (312)..(312): n is a, c, g, or t
  misc_feature (314)..(315): n is a, c, g, or t
  misc_feature (327)..(327): n is a, c, g, or t
  misc_feature (338)..(339): n is a, c, g, or t
  misc_feature (347)..(347): n is a, c, g, or t
  misc_feature (350)..(350): n is a, c, g, or t
gagggttttctcataaatgagggctgcacattgcctgttctgcttcgaagtattcaatnccgctcagtattttaaatgaagtgattctaagatttggtttgggatcaataggaaagcatatgcagccanccaagatgcaaatgttttgaaatgatatgaccaaaattttaagtagnaaagtcacccaaacacttcngctttcacttaagtgtctggcccgcaatnctgtaggaacaagcatgatcttgttactgtnatattttaaatatccacagnnctnacttntnccaaatgatcntagtantngcctananntatctttctctnacctgttattnntcaatttntcncagtattttaacgcggaaaaatttgttttgaaacccctgagtacccgtttaataagagaatttgggaaaaattagggggggaaattattttaaaccgggtatgcccaaaattttaaaccgtgtgaaaaccactgttttaaaaaaaaattttcattccgaaaaaaggcaagataaattgaaacagagaaaaaaaaactcga

SEQ ID NO: 545604 - DNA, 415 bp, Homo sapiens
ggagcatacagagtgtgctatcagcaaggacgggtctgtgctatctctgggtactacacggaattcagcccccacggaaaaagatgagtatgccggccggtgaaccaggtgacttggtcacagacccaagatagttaagtgggatcgagacatgtaagcagcatcatggaggttggaagatgccgcattaggatgggatgaattccaaattctgcttgcttgctttttaatattgatatgcttatcacacttacactttatgcacaaaatgtagggttataataatgttaacatggacatgatcttctttataattctactttgagtgctgtctccatgtatgatgtatctgagcaggttgctccacaggtagctctagcagggctggcaacttagaggtggggagcagagaatt

SEQ ID NO: 545605 - DNA, 767 bp, Homo sapiens
  misc_feature (32)..(32): n is a, c, g, or t
  misc_feature (262)..(263): n is a, c, g, or t
  misc_feature (265)..(266): n is a, c, g, or t
  misc_feature (637)..(637): n is a, c, g, or t
  misc_feature (702)..(703): n is a, c, g, or t
  misc_feature (713)..(713): n is a, c, g, or t
  misc_feature (726)..(726): n is a, c, g, or t
  misc_feature (732)..(732): n is a, c, g, or t
  misc_feature (744)..(744): n is a, c, g, or t
  misc_feature (747)..(747): n is a, c, g, or t
tttttttttactctcccccggggggggggggnggggggggggcgcccccccccccccaaaaaaataaaaaaaaaaaaaaaaaaaaaaaaaaaaagggggggggggggccggcctcttctttttttaagagaaaagaatttttttttttgggggggggggtttttacaccaagaaaaaaaaaaaataaagagggggcgcccccccccaaaaaaaaaaggagaggagcccgtttttttttttttttttaaaaaaaaaatttttnngnnaaaaaacccccccccccccccacaaaagaagggggggggggggggggggccccccccaaaaatatatttataataaaaaaaaaaaccaccgttcccccccccggtggtggggaaaaaaaaaataaaaagaaggggggggggccaaacctttggaaaaagccccccccccaagatgggagccccctctttcttttccccccccaaaataattttaaaaaacccggggtatatatttttccacactttaataaggggcccccggccctgtttgtatttttttctcccaaaatcttcaaaaaaaaagttttttttaccccttttggttaaaatttaaaaaagaaaaagggtttttgaaaggaaaaattttaagnaaacaatttttttaaagaaatttttaccccataaaagagtccccttttaaaaaaggcccattacnntaattgaagnaactggggtgccntaatgnaattcctcacanccntacacgtggctgacgattat

SEQ ID NO: 545606 - DNA, 112 bp, Homo sapiens
actcgtatattctgtgacaggtataatcctggagccaggaaaggctctgagaaggtgaaagaacaccacgaacaaagtcttcagatggggctaactcagcagttgaggtcac

SEQ ID NO: 545607 - DNA, 288 bp, Homo sapiens
agggtatcttttcactctccttctggccaaaagatcaggcctccaagatgtaactcatctcaaataagtggagaccaggccacgatggtttctcccagacagcggattctagtattggtgcttcatgcagcttcccgggaaggtttatctccttaataaatctggagggcagatctggccgtgtctccacaggtcacagggaccgccaacatcctttgcgcaagcaactccactggaaggtgccgggtgtcccggggcacatctttgctcgcagctcgtcgtcgccaa

SEQ ID NO: 545608 - DNA, 252 bp, Homo sapiens
agattggaacacgttggcaacattatggcgcatagagttactaatgtttggcatgcaacctccatccgccataagtgaatcttctccaactctctacaacgataaggcacttgttcgcctcatgcacgcagctcgctttgcatttatgtaataggcccattgagagcgtttgtgtgtggccatatatgttagcattctcagtgtgagataagagagcctcactcctcgcgtgccatactcgtacagcccggg

SEQ ID NO: 545609 - DNA, 208 bp, Homo sapiens
tggttagaatcgaatagtgcggcagaacgggatggaaaacgggtcacgacgggagaagccaaagaaaagtgtccattaacttcaagaaatactagggttctagtgctgggaaatcatctcagcttccatctaaaatagttagtctgtgtcttctaaataaacagagacctttgtctctgggttgagcctttcctcttctttagatttt

SEQ ID NO: 545610 - DNA, 386 bp, Homo sapiens
  misc_feature (63)..(63): n is a, c, g, or t
  misc_feature (65)..(65): n is a, c, g, or t
  misc_feature (67)..(67): n is a, c, g, or t
aggtgggaagtcctcaacgctgttgcccccaggctggaagtgccagtgttgaagatccttggncncnaatgcaaatcctcccaccctcacaggtaagcctgggacctacaggcacctgcccacccacgcccggcctaatttttgtatttttagtagagatggggtttcaccatattggtcaggctggtcttgaactcctgaccttgtgaaccgcccgcctcggcctcccaaagtgttgggattatagtcgtgagccaccgtgcccgtcctagagtcagattttaaatcttcaaatattcaagaccggtttattagctatttgaggttgtgaacgcttctccttccttacaagtgcaaagcctaactcattgaatgtgtggattaca

SEQ ID NO: 545611 - DNA, 758 bp, Homo sapiens
  misc_feature (189)..(189): n is a, c, g, or t
ggaggacatcgcgtaactctagtgatcatctccaccatggcctggggtctgctgctcctcaactcctccatcaactcaagggcacagggtgcgcgtgggcccatgtctgcctctgactcagggcgtgcctccgttgtcgtgcggtcctccgtgtgtactatgttcgtgtagtcaacgcgagtgcgtccncttgatcaacgtttgtggaaagctcatgctatgttgtacagttgagtggccattgagtacagcgtactggttctccatgagtacccaagcaaggcgagcgccagaggcgagatgagcccgcgagagactctactgagttatagtgaaggttcagtcacttccgtggccctgtcagagggtgatttgcgttagaatacagcgttacctcttagagcataccatatgtacatatgggctgaaacaaccgggtcacatacccccttgaaacccccaatttccttacccttgggggggggctttcccaaaaggtgggcctttgggaaaagggggaaaccggaaaggggggccttttggaaggtttttcaacttgttgaaccgtttgggcgaaggggcttccagaattagattagccaaaagggtactgccaaacccgagacgttgggtcgagataactatccgtgcgacagagattgggtgaacccaaaaaggtatgagaggcccctgttcccctttaaaggggggttccaagggccccccaaaaagggggccttgggcccccccccccttcc

SEQ ID NO: 545612 - DNA, 315 bp, Homo sapiens
aagggtccaggcttggggagaggccccaaagttgagaactagtaagtgaacaattgttgtactgaagcacttagttacgatgaccgctagatcatcaaacaacctgtggtgtaaatatgtttttcccaaaaaacgtagcacccttcagcaggaccctataaaactttcctccagcccttgcctctttgcaggtagccccttctctgctgagctgcccactgcaacatattttcacaattactctaataaatctgcccttctttacctacaactatcttggtaaatggctttaccacctgcaaaactgaccctagg

SEQ ID NO: 545613 - DNA, 1381 bp, Homo sapiens
gctctaccggcgggatttgatggccgtgactgtctcaccagaacagttctccgctcccagatcatggcgctccctcgggctatcctgccatcggaaagtcgcagacagtcgaggccatcgatgagtgataggttgacaggcagcgttcacctaatggcatgacccagttcacaaggccggttcctaactcatccacagcacttacctgggtaataccaatgtgctgggtatgtacatctacaatctgatgacggtgcaacgtcgaccaggccggcgatccaacgggatgaacaagcaaggagcgtggtggacgtgctgttgacccacttggtagagaacaccaacaccagtgtgtggtttgtggcgcatatgtgggacatacggtggtaagagcccccatcgagagccataccggaccgttcacatgagctgatcatgtatgcctgagtcaccaacttcaagttggacttgatattggcaaacgaaagcgtctgtttcctttattgaacgcaaacttgtgggccactatacaaatcataaaccgcacacgtataggggaccttttaacccagtgttccacgttggcaacagaacaagtggggggcaggcactcggaaggggattgagacattaaggagaagcacaagactcgcgtacggaacagggaccttacaggacaagccaattgactcaggaacaagtcacctttgacagcttaaggtcccattccccggtcgcttcgaatttggacccacaatcaaaccccaaaggaatggctggcccagtggctttccacttcccttgcctgacctcacgacagagaaaacggaggactccacaccatttagacttcgggatggactctcgaaagggttgaaatccaggggaaggcgcaaactttggtcggagccccagaaagcacaagcctctggcactttagggagcacacgacacgcagtgcagtgattttgcacgcccataggacgggagatacactcccatggttggacaaccccagcaaggtctggtctacgggagggcacaagggacttggaaggcactggaatccgagacgagcccactccgaggggctgagacccaaaagggaggacacaacaggggactacacaaccaaggaagaggtgcaaccacacaaggatccgagtgcggcaaacaaaccacacagcgaaaggcactggagccgcggcgcacacaagaagcccaccagccggattgggccccatacgcaacgaggaaggtcggagccccacgacatatcagcgggacatagggcaactcccatgcacaccgggcgatacccccgccacacttgtcggcgaaccgacagcagggcagcccggacaaagggagcaccaccaca

SEQ ID NO: 545614 - DNA, 1711 bp, Homo sapiens
  misc_feature (237)..(237): n is a, c, g, or t
catattcgggtgatagtactgagatgtatagattgacatagagtcgagtcatcatataccagctgtctgatactgtaagttggagtttttccttcactatggtgtggagacttgtgtcttttggaatccatagagaatacttgattgtgaaggctatggaagtgatgaggtatgttgtgaagtcttaggctatcgaatcatgtacacatggatgatcctctcatccacatcccacanatctactagacatagctccctagtcgtgatgaagacgcgtgcctctgcgcctgcgtaatcttccgaggggacaacgttgcagcatcgccctggctcaagctgtactaggcaagaagaaggtggtgtgtagcgcatgtctacgccaggagtcggccaagatcgtttacgacgggcatgtttaccttgctttgtcacacaagcgctaggggccctatctaaatgtacgagctccctaggttggtggacccattgtagaccttagttgtcggtaaggtactcctagccgctgtgacccattctctcttcacgtgcaagtgtggctttgctttggtgctaagttgcggcgaccattgcttcacttgtgtttgggtggcccttgcggggctctcgatggccggttagtgaccgcaagtttgggggagcccaagcaaaggtgccttagggctggaggatgctctcgattgcggttgtcaatccgtgcgaagacaccttcccaaagcagtcgttaccaaagccatgggtgccatagagcactctttaagcttagacaagccaaacacagtgggattagcgcccctcgtaatcgtatgtcgtagggcgatttgccgtttatggacctccctcgttcttagctgcatttgcacccgatttggcatgggcttcgctgtggctgaaagccacaaccggcttgttttcgttgggctttgaagccccttgtgctagctagctaagggtgaccatttgtaagttgtgcccgcaattttactcccaatcgcctccgtttgcctcgtggaacccccttacaagggggatgatccaagtgccggtggcctcttcccagtaaacgactcgggcgtgtgggcgtagagacgcaacctttccaggacgaccattcagggtggagaaacgcaccttaaacttacctgcaggaactaaggggcgacttcccacttcgaaacccacgcgagttgtgcactgaactcctgggtacatcgcgacgggctgaacaggcaattcaggccgcgggttttcccctttaaaacctttggccaccttgccccaccgggcacttaaccaagggcgttggctccaatatgcgcccatttacgcatgaatgtcgcggggccgactcataggacaaagggtcggcctgtgcgtatcataacgaaccggcttttcccaatgccaactgctctttgcccgcacgcgggcacccgtgactcgaaccccccctggcgcgcaccccacctagtaaaccaaccccctgacgagaagcacgattgctgggcgcagaacgcgccagccccaccgactgaaaaaggggccccattcgatagaccgcgcgagtacaccacacactccttgtgcccacgactcacacccctgcaacactgaaacacacgcgcccgcgtcagccataggagacagaccccatgcgcgactatccgaacacaaccgcacacgcggacacgcg

SEQ ID NO: 545615 - DNA, 137 bp, Homo sapiens
taatcgagtggtacccctagttttagaagttaatagcagaaggaatggaatcggcatagcgggtgatagccccgtatgagaaatgtagatggtggaactaggcgcgaatagagtagggcgggacacgtgaaatcctg

SEQ ID NO: 545616 - DNA, 135 bp, Homo sapiens
tcatcagctcgctaccatttatgccgtgaacacactggacaggtatgtctcaagcagctacacgtacagcctcatggagctgaggagctgctacggttacatacgcagtgtaacccccggactcgtaaacatgga

SEQ ID NO: 545617 - DNA, 413 bp, Homo sapiens
gagagagagagagagagagagagagagagagagagagagagagagagagagagagagagagagagagagagagagagagagagagagagagagagagagagagagagagagactctgccatgttcaacgtgggacctgacgctgacacgtaccgcctcacatatgcctacttcgctggtggggatgctggatatgcctttgatggctttgattttggcgatgatcctagtgacacgtttttcacatcccataatggcatgcacttcagtacctgtgacaatgacaatgatcagtttgaacgctactgtgctgcacaggatggatctggctggtggatgaacacgtgtcacgctggccatctcactggagtttattaccaaggtggcacttactcacaagcatctctccttggg

SEQ ID NO: 545618 - DNA, 106 bp, Homo sapiens
atgtgtatctgaggcggagtgaggaggagcagagattatgcactgcggtcagtctgggcgatacgagtgagacctgtctcagaaaaaaaacccccaaaaaacaaaa

SEQ ID NO: 545619 - DNA, 102 bp, Homo sapiens
acaacaggctatacaataaggtactcacatataacatgcaaacaggtggttttctacttggcccctttcagtatgtccccataagacaaacacggccatatg

SEQ ID NO: 545620 - DNA, 132 bp, Homo sapiens
agaaaatggggattcctccaacccgggcgatcaggacgtagggactaaggcacacacctccgccgttcttgtagcagaggtaggggcagcgccacacgttgcccaagcccacggcgcagcccacgcaacacg

SEQ ID NO: 545621 - DNA, 311 bp, Homo sapiens
caggcagatcacaaggtcagcagttcaagaccagcctgaccaacatggtgaaacccgtctctactaaaaatacaaaaattagccgggtatggtggcacgcacctgtaatcccagctacttaggaggctgaggcagaggaatcgcttgaacctgggaggtggaggttgcagtgagctgagatcgtgccactgcactccagcctgggtaacagaatgagacgctttctcaaaaacaaaaaaaagagtcagaaactaatatatttttcatgaaaagcaaaatccatttatcattagatcaagtctgttacaccc

SEQ ID NO: 545622 - DNA, 199 bp, Homo sapiens
taatcagctcggtccccttttttttttccagcggaataacgaaagttttatacggtatgtaagggagcgaaagatagcgggacgcggctatattcagattcaggcgtcaaataattctcaagttatacggtgcactttatttatatatacatatatagaccaatgcgacgggcgtcagtgtcggtctaagcactttaga

SEQ ID NO: 545623 - DNA, 133 bp, Homo sapiens
  misc_feature (104)..(104): n is a, c, g, or t
gataaggtttcactacgtcgtccaggctggtttcgatatcccgatttcaatgatcttcttgcttcggcttcccagtgtcgagattgcaagcgcgaacatctcgnccagctcccagggtggtttacatgtgact

SEQ ID NO: 545624 - DNA, 130 bp, Homo sapiens
gggtcatgaatttttttgtttgtcatggaaatgtaaaagtggaatatttaaacatttcagtttagttttgtaatgtcaggaattttttaaaaaaattaaaaaatgggctggagctttttttttttgaata

SEQ ID NO: 545625 - DNA, 113 bp, Homo sapiens
ccagacgaagtaactgctctgaaatgacttgacacaatagaacttcattttatctagttgaatcacttgaaacccagtattgttttcaatgaaatgtgccagtgtggagagag

SEQ ID NO: 545626 - DNA, 705 bp, Homo sapiens
tcatcagaacattttttattccttaccatcaataattctcaggactgacagacgcctttacaagaaacatgtagggttcttttccccccaatttgagtacatactactgataactgctaaaatctaaagaagccgggtgccattcgcaaaacaattcgcccaaggaacacccttttttggaaacttttgtttaaaacccggccactgaacaatgaacgtaagctggcgagatgaaacaaaatctttccggacatggataacgctcctacacggcggaggctttgaacctaaacaaagtcacatagctttgtcccagaataccaaggagaagggcggatacggatattggaccacatgttcctggcccggtgcaagacacctggcatcctagacggcgcgtgttactaccgccagcgcattgctgatcccggaacaacagggctaagcacgcggaacccaccatcctatcttaaaacgttggaaattgaagcggggcaatcacaccaacaacctgccgccctgctccccccaattaataacgggacgtcccgggttgtacaccggggaatactatatgaataccatcaaatagtttataacaaaccgcccataacactatgcccagaagtcgatacaactcatagtgaccaaaaggagcgaaaggtaatcgacacaggggaagtgggccagtaacataaaccacga

SEQ ID NO: 545627 - DNA, 624 bp, Homo sapiens
gttaaacaccagaatttggttcaacaattttcgaggacattttagcacctttttcaccgaggcgcgtttaaaagaaacaccccgcgggacaccccttgggtctcataatccgggccgtgtaaagaccactaccctttcccccactttttatttccaaaatgtttacctccaaatatattctgctaaaagaagtatagctcttgaaacacctatattgtgcctctcttttttaactaccccaaatttggggtaagaactccccctccaaaaaatgtggatcatcataaaaatatatgtaataattatatccccccactttacatatattttttggaaaaccttatagaatccttgagcaaccttttaaaatgtgtaagataaagagatcccccatactccccaatagtaatcccacaactattattggcatcttttgaacaatctctacacccatcttggaagtatatattcttcccaacacattcattgtattctattcatgtcccaggcgcagatatcctagtattaatattatctatcttattttaattatatttattatttataattgacttttctatttctcctctaaaacaaaaataatccccgcccatcaaagtcaaa

SEQ ID NO: 545628 - DNA, 133 bp, Homo sapiens
ccgcgggtatagatatctagttagtacagttgggtaatcttttgtaattcctaggaggtaaatttgtcataaatggatgcagattttctgcatagctataaaaatagtttgtggtaaactgctttcttcatat

SEQ ID NO: 545629 - DNA, 259 bp, Homo sapiens
  misc_feature (7)..(8): n is a, c, g, or t
tggaaanngactaagcagtagagcgttgcgattttgagaggccgggacgtggaatggttcgggtacaggctgagctcctgtctctctcagtgacatcgctttagccctgcgtggccatccctgacgcaccgccgtgatgcccaggaagacaggcgactggaagtccaactacttccttaagatcatccaactattggatgattgaatagaaagaaagaaagaagagaagtaaaaaagataaaataatataaaaaaaaac

SEQ ID NO: 545630 - DNA, 812 bp, Homo sapiens
  misc_feature (66)..(66): n is a, c, g, or t
  misc_feature (566)..(566): n is a, c, g, or t
gctgatcaacataggctggtgggagtacaggactcgcctcctcagggttccctgtgctgccacttngcagccatggcacaatgaacagatatgcagccgggtcggatgttacgagacacataagaatgggtacaatcaaacctggcagcaggattcagccggatcacatctaccacaaactgccagcaacaccttcagagtcgtggagtcaagttgcaggatcagcaggttgtgatcaattattcaatcgtgaaagggctgaagtacaatcaggccacgccaacttccaccagtgggagatgcccgcaggtctacggttaaactttgcaagtaaagaagaggcaacacattctccaatgcaatgctgtttgcctgaacatcatgaattcccaagaaggaggcccctccagccagcgtcaggtgcagaatggcccctctcctgatgagatggacatccagagaagacaagtgatggagcagcaccagcagcagcgtcaggaatctctagaaagaagaacctcggccacagggcccatcctcccaccaggacatccttcatctgcagncagcgcccccgtctcatgtagtgggcctccaaccggaccctcaaagagcagaacacccagccataacaacgaagcgacacaacagagaccaaacgagaacaagacacaacaacaacgaagaagaaacactaaatcagaagacaaaagcgaggcctcccataaaggcccagacaacaaagcaagacagagaaacacacaagagaaacaaaagggaaaaaaaaaccacgcaaaaaaaagagaggagcg

SEQ ID NO: 545631 - DNA, 863 bp, Homo sapiens
  misc_feature (397)..(397): n is a, c, g, or t
  misc_feature (528)..(528): n is a, c, g, or t
  misc_feature (569)..(569): n is a, c, g, or t
  misc_feature (589)..(589): n is a, c, g, or t
  misc_feature (606)..(607): n is a, c, g, or t
  misc_feature (630)..(630): n is a, c, g, or t
  misc_feature (655)..(655): n is a, c, g, or t
gctggacgtgacatttatggtccttggacaaggcctcggattatccaggtcctttacctggaacataaagatgtcaggttaatatttacaatcagatcaactttggagaaattttctactaaaaatggaattcccccagaggtgggcaggaattatggtggggttctggacaggctgggtttaggggctggtgaactacacacaggcactggactagaagactaaaattctctctggcttaagccctttggaaatacctctggtgaggagccacactattaactaggatctaacctcccaaattagatctcaagggtgctccaatccttttccttcatattgaagagatattactctcttatgtggggtcttataattgactcctattatacccttnaagtgtcttccaggagaagaagaacgaaaattgtgagcttcaattattaaccatggtgtgaacctttttcctcctaatttccctggcacatcgtctccccaaaccggtggagaccctgtaattattctacnaggacaacgtgggtgttaagtccaaaggcccccagactggnagacaaggtatctacgtggncaacaaaagcgggccannaaatggatgtggcagacatgggngatctcatctatactctcctatagnaaaccagtcctataaagttaagttacaacttttccaagtgaaggtttgcgcaggctaaattattccaaggccccacggggtccttggagaaaattttccctattttggagtatattgttgcccattttataagcgcttggaaaccagtcttccgagtcataagttgcgttctcgggggattaggctctgcgttaccctgggtatcctg

SEQ ID NO: 545632 - DNA, 372 bp, Homo sapiens
agcacggagtaactgtaagcttctgagagaatagagcgctaggttcccaagcttagggaatgttggagggttcctattcattcctcttgacaaagttcctgggcagagcaaagtaaagggcttctaacctagggacaatagtcctagacttggggcaaacaactcttgtaatcggggtcagcaagagaaactctactggcaaatttgaatgtcaggtaggaggcctctagaacaaatgtgcaggccgggcgcagatggtacacgccctatcatcctagcactttggaaggccgagacgggcgggatcacgaggtcaggagatcgagaccatcttgggtaacacggcttccggggtacccggagctcaaattc

SEQ ID NO: 545633 - DNA, 585 bp, Homo sapiens
aataacatggccctgaataaacactgaactgcaagcggaaaatgtattgaccaaaacgaaacaatggaaaatggccaggggaaacccgaaaaaaaaaaaaaatacaacacaaaaacaccaggtgggccggggggccaagatccggtaaacccaaagggaaaccggcagacagctaaaattacaattagaagccaggcggtttgaaaaaagctaggcagtcaataaccctttggaacggaaggcacactccctaataggtaaaggtaacggcccggaaaaagggggcttataaagggaacacctacacagcctagttttgccacaaccttgaccaccaaaaaagttcaaaaagcgtctaaaggccaaataaaaggggagacgctaacagccacaacaccaatttaaccaagaagggtcccataccacaacgcggggattggcatgacagaccaaagaaccccaagaagaaagaaaaaaaactgggcggaggggacaaaacaggcacgggggaaaaaaaaaaccgaccggggtggagggaaagcacccagggaaggcccggttttgggaacaacaaattcgagcgga

SEQ ID NO: 545634 - DNA, 881 bp, Homo sapiens
gcaccaaattgcggatacgccggtcagcggggggtgcccggtgggccctggtggccctgtggatggggaaccgcggtggcttccgcggaggtttcggcagtgtgcatcctggtggacctggaggtcgctggcctgtgtgacgtgtggccggtggaccgatggccgcagtgagctctgcggagtgcaagtgccagaggataagggagttggactgcaccgtcacgcaaagttgtggcacgcttggatcaaatgacaatgagagatcatagtcacctgtgatggagaatcgtatcttcgttctccgctggctccaatttagaggacatcaggagaatcagttgagtttcgttcgctggggagcctcttctcaatggtactgacggtctttgaaggattactgccaggtgcagagagcagaccccgtgccgagccaggggaaccagtgttcaagtgcatgtcgttgctatcaggggactacatatggccacagtcgagtctgggctgttaacgtgctccaaggcagagtgggcaccgacataccgtggtgccatcatcctgggcaaggctctccatctgtacaccgtgacgcagaggctactgggggaacacagatcggccaaggcgcacagctgtcccttgcagaggtgacaggccgctgcggctctgcgctggatacgcctcaatccctgaaccaggtgcaactggcatcgtctccggcaccatgtgccctaagacgctgttcatgatggctggtatccgatgactgctaacacatcagccggggctgcacttgccaccctgggcaagtttcgccaaggtcagcctttgatgccatttctaagaccttaagctacttgagcccgtactcttgaaggagactg

SEQ ID NO: 545635 - DNA, 181 bp, Homo sapiens
acctggtgatggtattggcttctatcagcatctcttctctatatgcagtcccactaccagctggaactgcagtgctgcatcgactggagcccatgtcactgatcccctcataggatgctagaagccagtgtctgcctcagggaaggatatggacttgggcacagatggcatgtcaccgtat

SEQ ID NO: 545636 - DNA, 109 bp, Homo sapiens
cagcagatccttggtgtcatgcttgtcttccatctcaagcatttatccaaattctgctcacagacatgaggaagcaggctgtagatttaagggcactcaaggggcaaac

SEQ ID NO: 545637 - DNA, 252 bp, Homo sapiens
atctcttggcgtattgtcagtgtcttggcgcgaccagccagtgtctaaaatgccattggtttttcctttgccttagctgtagtcaagtggcatctcgatttaggagttgcctccgagagctgtgttctgtccatcacctgtgtattggccctgtgtttaccactctggcctgtcgtcacccccttgccccctgttgcaaattctcatggtacgggttgggtggtgaagagcgcgtgtcccactctcctcttt

SEQ ID NO: 545638 - DNA, 901 bp, Homo sapiens
gcatacagttgccagagtacccctggcattcccatgaactcgagcctccaagggaccgggaggatagcgggtgtcctttgtatagtggttggaggttcggtgatcattgctctggattgggtggactcccgcgcatgccagccacatggcagctattgcctcacctttctccagacagccgagtaccctctagtgcacgagctgtgttctttccgctcgcgaagagacgagggtttgatggactaggtcggcaatccatgccaacgtagtagtccagagcgaacgttggcgagcgtggtacggtagagctgcacacatgcaggcctcttgtcttaacatccgcctagttcgacctcatgtcgttgccgtatccgcttgggcttttgtcgatactaggacgcgaaaggatcgacacggtcacgtaatcggaggcccttttgtatcgggcttcggagatgggtgacacggcttgtttgctctctgagaccatgtttgcccaatatgtcgctctatgtgagtgtctctagagcacgaagttcattaactagctgagctctccttgcgcaatcgaccatgcactcgaattgtccaagtaatctagggggttctatcagcgtattcatactccctatggggcgggacccattgcgtaccactctcctggatatcgtagtgtccgccaggttgattactgtaatcgtgatagtagcaataagtcgagactgcaggggaacacgccatgggtcttctttgtgaccactggctccacactgtactccccccgctctctacaccttttgcgtgcttgcgtgcgattcctgggccatggctggtgccgacggattgccggagactgtcgtgacagaaccctcgtaatttgcgtgtgccatgatcatcaaga

SEQ ID NO: 545639 - DNA, 339 bp, Homo sapiens
  misc_feature (254)..(254): n is a, c, g, or t
  misc_feature (314)..(314): n is a, c, g, or t
aatctgaaagtggatatttggatagctttgaggatttcgttggaaatgggattacatataaaatctagagagaagcattctcaggaacttctttgtgatgtttgcattcacgtcacacaactgaacattccctttcatagagcatgtttgaaacactctttctgtagtatctgcaaacggacatttccaaagccttcaggcctctggtgagaaaggaaatatcttcaaataaaaactagtcagcagcattctcngaaacctctttgtgatgtgtgtactcaactaacagagttgaccttccttttcacagagcngtttggacactctatgggtcctctg

SEQ ID NO: 545640 - DNA, 189 bp, Homo sapiens
tagaggtatcccccctagtatccgcagtttcaatagactgtactatgcatgcagggcacttttgatcttttctgagaagtactgtccctacagtgagcttacaatattcagtgaaatcatgttgtcatcagatctgctgtcatcccagctttttgtttcatttggtcgcgcacagtcggaatcgatttg

SEQ ID NO: 545641 - DNA, 1006 bp, Homo sapiens
aaacagtaggaacggcgaggatctgaattttgtccaatggttctacaagcatttgagcttctggttcagagcttcatagttctctaacatcagaaagttcatttcttgaggatagcagaaccgaggccctcaagtgcaatgctcatttaaaggatccagagataaacagaaggagaatgacaaattacggagagtccctctccaggaagaccgtgagccctggagcaccttcagcggcgcagatatgccagcgctgaaggagagaaaatgaaaggctgcagaaagaaggcagcgagaaggagagacacaaccgggcagcggatccaggaggtccgctgaagcggccaggagctgagcatgcgtgcaggaggacgcgtgaaacgtcgaggcgagcaggctgctctcacagaatgacgagctatgcagatctctccgagtggagctgaaggcgtatgagaagctggatgaaagagacagcaggagactgagagagcgcgtcgggagaaggctggaaggggcaggatcctttgcagggaccctgcaacagcctcctgatggagatccaggctctggcttgcaactagaaaggaggatcgagaaccagaagcaatctgcagagcaaggctcaaggaacaggtggcaaggggggcagagaaggcacaggaaggagccctcactctggctgtccaagccgtgttcatcccctgaggtgcccttcaggctgacaaggactgatggtgacgatatatgccatggaaagtggtattcatttgatctgttgatctcgcagagtgacaccaaatcagttgagagaatctcaatctctgggaatggaaggatccctctcgggaacggggagtcgggcatacatcggggtgccgcggcatggccaacggggcaagatgcggcagttggcatgaaataggcgcaaacccgcgagcggggggaaccggcggcgaggggagcccggttgggggcacaacacggcctcccgcccagggaaaga

SEQ ID NO: 545642 - DNA, 196 bp, Homo sapiens
gtgtagcacaacctagggtcagttttggcaggtggtaagccatttaccaagatagtcgtaggtaaagaagggcagatttattagagaaatgtgcccgcaggttgttgtgatttgctgtctctaacaatgttcatacaataattgttcattattgttctcaacttggggctctccccaacctggggacccttcctta

SEQ ID NO: 545643 - DNA, 83 bp, Homo sapiens
taaaaaaaaaaaacggggtttgtggcgggactttgaacaatttcctcagaaccttttaataaataagtttgggaatgcttaga

SEQ ID NO: 545644 - DNA, 708 bp, Homo sapiens
atgaccccaatacgcaaaactaagcccctaataaaattaattaaccactcattcatcgacctccccaccccatccaacatctccgcatgatgaaacttcggctcactgccgtttggctgcctgtcctgatcctccaatatcaccacgaggactgattcctaggccatgcactactcaccagacgcctcagaccgccttttgccatcaatcgcccacatcagtcgagacgtaaattatggctgaatcatccgttaccttcacgccaatggcgcctcgaatattctttatctgcctcttcctacacatcggggcgaggcctatattgacggatcatttcgtctagctcaggaaacctgaagacatcggcattatcctcctgcttgcaatctatagcaatcaggccttcataggctatgtcctcccggtgaggccaatatcagttctgaggggccacaggtaatgacaagacttactatccgctcatcccgatatcatgggacaagacctagttcaagtgaatctgaggaggctaacgcagttaggacggtcccaccctcacacgattctttacctttcacttcagtcttgcccttcattattgcggccctagcagacactccgactcctattctgcacgaaacgggatcagaaaccctaggaatcactccattcgagtaaatcacttcaccttagtaacaatcaagagcc

SEQ ID NO: 545645 - DNA, 257 bp, Homo sapiens
actacacacacacgacacacacacacacacacacacactacctattctattcctcgcaaagaacgatcgctatagtctagaagcatagaattgcccccaagttccgcgcaccagctcgaattcatatgaagtgcacttgttatatccttagtagtatgctgtagggccagcccagcttacagactcccattattgtcgatcagtgccgtctgccctgcccatgtgcggcctcaggccactggcaggcaggcggcgaa

SEQ ID NO: 545646 - DNA, 292 bp, Homo sapiens
atatcccaccctccagtggttctgtcttggcttaagatccatcctgttgaagctcttggctcctcctgtctgagctgtgtttagtcttgcgtgagtgtttcacagcaggttgattattgggctttgggccaaggaagtgagatccaacatggtcaaaacccctgtgaactctagagccctgccctcagactcttaccgacaccacagctgtcagggcagagaccatggagcttggccgcagaggaggggggctgcatggggctcagatcccaccccgtgtgaaaaagtccta

SEQ ID NO: 545647 - DNA, 306 bp, Homo sapiens
agtgggtgacactattgatctttctctagtctgcaggctgtcatagaaggttcttagattatatttgtcatgtctttcaatcgcctgtaatcagtgactatcatttccacacttgtcttgagcatttaacccagtagtcgaatatagcttttgtttttatgcggcttcctgtatgggtattatccctcggtatgggtaatggtgcagaggcaatggagaaaagcagaagttgtagctgatgcaggtatcctatgcccttgatggatgagacttaaataaaatttttgaagttaaaaaaaataaaaa

SEQ ID NO: 545648 - DNA, 373 bp, Homo sapiens
gcgaggtctgttacccagcattcccagagcccagcacactgatgtacagaggagtcctccagcgaagggtcagtgtgagagggacggagagagggagagagggagaggctagccatgaacatgtgggaacacagagagaaagaagatgaacgagagagagagagagagagagagagagagagagagagagagagagggagggagagagagagagagagtgctggggtaggctggggtagggaagcagtccttaagatactaggttgacttgcacatggtgataggtgatgatataagctgtggctaggtcactgttgctacaatttctaggaggagcctagtggaattgtctgtaagctagtaacgtcgacgc

SEQ ID NO: 545649 - DNA, 222 bp, Homo sapiens
ctggctggaagacacatactctctgaagatcacgggggaggccgtccgcgtactacatagcagtcacgtcaggctgggacaattcctgtttacagagaactataaaagccctgccccctcctcacttggggctgatgccattctaggcctcagcctgtctgcatgcaggcgctcattgaaaacagtatgttgctccactaaagaagcacatgatagatagtg

SEQ ID NO: 545650 - DNA, 198 bp, Homo sapiens
acaggtaggattattgccaactacttaccgtataccaggaatatttataagccttgagagtacaaccctaataaggcagcctccgtgctcaaatagatccatctattgaaaaatcgataaagtcgagactaaagagagatccttggttgcgtataaaatcttaggttttaacttccaggctggcacagtgttgtaaca

SEQ ID NO: 545651 - DNA, 171 bp, Homo sapiens
agctaatcaggaaatgcatgaaagcatatcatggcattgcaaaacagcatggcgggtaaagcattacaagcatcatagcatctatggagcaaatacaatcagctcaatcagccaacccatgccgagcagaacactaacagcaagcaggacttgataggagcatgagcacat

SEQ ID NO: 545652 - DNA, 107 bp, Homo sapiens
gtttacgtgaccctagggtgttgtgacgtgtacattacgtgcgctgagtcggggcagggcgcctactagggtgtagaatcggcagtatgcttagttctgtggctgtg

SEQ ID NO: 545653 - DNA, 462 bp, Homo sapiens
tgagcgtactgatgtaagagcctgccatacttggttgctgtatatcagcgtattgattagatggtgactgtgtgaagctcacaagtctgtttgtgtctgcgaagaatgtgcggtcttttcttcatactgatcactatcaccagatttgccttcatgagttttccatggcctataccaagtatgtcggagattctctgcagcccaagacctacggccgcagcagcgtggaggagctcttgggagcaattccacaggtggtctggataaaaggacatggtcataagagaattgtagtgttaaaaaaatgacatgaaaagtcgtgcgagttcactacagtctctcccctggcactcatgaaaaccagccctcggagggcgagcgcatcctggaggtgcccgaatcgcacacagcctcggaactcacgcttggagctgacggcagtgggcccagtcacacagagca

SEQ ID NO: 545654 - DNA, 632 bp, Homo sapiens
cccaccttgacctgcctgaggacttccaggcagatggggtctgctccgcaggagtaggccgatcgttctaccaggtgcagccccctgcattgaaggccctgcatggagcaaggaagtggacgctctccaaggcgcgagaagaatgccatgcatcacacatacatcacgtgaaccagcgctgtgcaagagcgcgtccactttcacatgctgcgcgatggcacacccagagtctagcgagaccgtctcctcttccagacatggaggtcttcaacgccaacatcattcagctagccatcctgtcctcttcgctcaagcatccgttgcggctctaagctcttctactgcatccaagtggcaagtctctcgctccatcaccagccacttgcaggacccctaaccacctcactctggactgggtggccaatgtggagggcctgtccagcaggaggagtacaccaagcagaagctcaagaggctctgggtggtgcccgaccaacaagcagatcaacagcttccaggctcttcgtggaacgaggtactgaaaatcgctctgagcgatggcttctgcatcgattcttctcacccacatgctctggattttatgaacaataagattattcgattaatacggt

SEQ ID NO: 545655 - DNA, 312 bp, Homo sapiens
tgatcccattatcggtgatacggctgctcgcggtcatcatacaacgtctgagtgggacgtagacgtttgaagtccttgagacgacggattatgctgcgactgtgagtgcgtcgtagtttgcgtttgctaggcgaatacgtaatgaggatgtccgtccgtgggcgattatgagaatgactgcgccggtaaagcttcagggggtttggatgagccatggctgttactacacgggctatgtggctacttgcacgagtctgccatgagcgcttttcaggtctgtttgtcgtaggcagatagcagcttgttataatt

SEQ ID NO: 545656 - DNA, 903 bp, Homo sapiens
gcaccaaagtggctgtgatgacgcctgtgtgcatgctgttggtgggccctggttggccctgtgtggccctgggatgggtgaacctgcggtggcttcctgcggaggtttcggcagtggcatccggggccggggtctgctggcctgatggactggtgtgcctggtggccgatggcctgctggagctctgctggagtgcaatggccgagggataagtgagtggatgccctgtcaccaagttgggcctgcttggtcaatggacatgaagatcaagtccctggagggagatctatctcttctccctgcccattaagggaatcagcagatcatttgcatttcttcctgggggcctctctcaaggatgaggttttgcaagattatgccatgtgcagaaggcaagacccgtgccggccagcgcaccaggttcaaggcattttgtttgctatcgggggactacaattggccacgtcgggtctggggtgttaatgtgctccaattggagtgtgtggccacctgccatcccgttgggggccatcatccttggccaagctcttacatctgtcccccgtagctgcagatggcttacttgggggggaacagagcatcgggcagagccccacagctgtccccttgcaatggttgacatcggccgcttgctcggcatctagttgctggtacggcctcattccactgcacccagggggcacttggcatcagtacttccggcaacctgttgcctaacgaacgcttgcctcactgaatggctggtaatcgatgactggtaacaccttcagcccggtggcgcccgctgccacctcttggtgcaagttttcgccaagtgcaaccttttgaatgcccaattcttatgaacctactggttacttgagccccgatctctgccaggca

SEQ ID NO: 545657 - DNA, 255 bp, Homo sapiens
tcatagtagccagatttccataccgactgctcttgaaccacagcgctgatgtattcatgcggtacctgccgaagactcgacacggtcaggacatacggcaggcccacgccccagtgcgcggcatacggtcggaaacagctcggactatcaccacggcgtaaatagaggtgtagccgctgacgatgatcagcgccgccatgatcaggaagaacgcgccccagcagctctggatggtgtgcagggtagtaaggatcg

SEQ ID NO: 545658 - DNA, 1074 bp, Homo sapiens
tcggcacgagggagagacctagtctcgtagtcttttatttttttttttggggggtaggctcttaattaaacggttatggctgtactacagggtcagagtgcagtgtaagcagggtcagaggcccgcgttcagcccaaaaatgtggattttctctcccatatgtgactcacaggggggtgggttttcttcagaaaaagccccagaaggcagggaccaggtgagcctccaaggtttagaagtgtggaactggaaggcttcagttcacatgtgctgatttccacgccttccaggctggggcagaaaggaggaaatcgcccatgactgtgccaggttctccccattctggacaccagtggaatgtctgggtaaggacagcagcactgcacagcctcggtcttctgccagcgaggccaatcatgggtcaggacagcatattgcagtggtcagaagtgtctggagatccggaataagtgagacagggtgcagtgtaccctggtggaaagggcacttctgggcctgaaaacagctccatgtggagcccttgcaagatacagcgcgataggggccttgtggaaccaaaagcccaaaagccgtggataagggagacgccgtgccaggggccactggccaatggagagcaatccacccagaagcctttgaatcccccgtggtgtgcagaaagggactgtgagagaaggtgagtagacatttagagtgaacaggacatcatttaacaagcacagcaaaagtataagggttaaacaaaagttacaaaaatccaggaatagatttgagaaagaccatcatttaaagagaaggaatgatacaaatgaacatgagggggaatataaagaatgtatcaccaagaacatcactaccacgggaatgatcaccacgtgggaataaaaaacgacgtggaatgagccacagtagggggaggacccacagacgcaggggtcagcaacacaggagtgtacaccaaaagccagtgtcgcaagaacaagaccacacgagatggagagcgtgaaacaacaaagcgcagtgcaaagagcactgaggaaatacacaacccag

SEQ ID NO: 545659 - DNA, 313 bp, Homo sapiens
  misc_feature (103)..(103): n is a, c, g, or t
  misc_feature (120)..(120): n is a, c, g, or t
  misc_feature (122)..(122): n is a, c, g, or t
  misc_feature (143)..(143): n is a, c, g, or t
  misc_feature (171)..(171): n is a, c, g, or t
ggaaggtaattgaatcatgggggccggtctttcccatgctattctcataataatgaataagtctcatgagatctgatgggtttatcaggggtttccgcttttnctgcttcctcgtttttntnttgcccactgccctgtaagangtgccttacacctcctgccgtgattctnaggtctccccagccatatggaactgtaagtccaattaaatctctttttgttccccgttttgggtacgtctttatcagcagtgtgaaaacgaagtaatacactgtgtaactacacaaaacatcccctatttgcctaggctact

SEQ ID NO: 545660 - DNA, 309 bp, Homo sapiens
cagggcccctagtactctggccaaaggtctctgactgactccttcccagatcttctcagcttagcagctgaagactgatgctgcctgatcgccttggaagccccctggaccattacggatgctgagctttggataactcttacagtagaggattcccaactatatgaagacaccctagctggacgatcagttcttattaagaacctgacccctcaaactctacaacctcgatggactggaccctacttagtcatctatagtaccccaactgccgtccgcctgcaggatcctccccactgggttcaccgt

SEQ ID NO: 545661 - DNA, 391 bp, Homo sapiens
tccttcggcgccgagcacagcgagtcattgccacattgctggtggagctatagacctgctctcccgcgtcctgagccaggccagcgccgacctgtgtggccaccctgaggcacaaactaactgtcatgtacagtcagatcaacggggcgtcgtagagcactggtatgatgtgagaaacaggcagcaggatgtgcggatgactgcaatacagatcggtggagcagctacgacacgaatacacggaaatgaaggctctcttggacgcctcagagaccacctcgactaggaagattaaggaagaggagaagagggttcacagcaagtttgacaccatttatctgattctcctcaagtaagaagagtgagatccagaccttgaaggaggagattg

SEQ ID NO: 545662 - DNA, 363 bp, Homo sapiens
cactgcagccttgaccccctgggctcaaatgatcctcccgcctcagcctcccaagtagctgggactacaggtgcgtgccaccacacctagctagtttttctattttttgtagagatggggtttcaccacgttgcccatgtggtctcgaactcctggactcaagtgatccacccatcttggcctcccaaagtgttgggattacaggcatgagccatggcacctggtccattattagaattctatactacaaaataaatggaaggaattaggaagcaactagttgaactgtttttctaagaactttcaaatgggaaagtatagaattttcagctagaaaagggggggggcaaaaataaaaataat

SEQ ID NO: 545663 - DNA, 413 bp, Homo sapiens
caacaaaagcaaaaataggtaaatgagataacatcgagctaaaaagatcctgtacaacaaaggaaacgaccaacagagtgatgaaacaacttacagaatgggagaaaatatctgcaatttatctgacaagtattaataaccagaatatataaggagcaacaaaaaagcaagtatctgattttgaaatgcacaaatgatcagattagacatttctcagaagacatacaaatggttaattggtatatgaaaaaatgttcaacattactaataatactcagggaaatgggaatcaaaaccataataagctgggcacggtggctcacgcctgtaatcccagcacatgggaggccgaggcaggcagatcacgaggtcaggacttcaagaccagctcagccagcatagtgaaaccctgt

SEQ ID NO: 545664 - DNA, 327 bp, Homo sapiens
gctagaggacgcagtgctactccacaaacagctaatatccagaatctacaaagaactcaaacaaatttacaagaaaaagacaatcccttcaaaaagtgggcgaaggatatgaacagacacttctcaaaagaaggcatttatgcagccaacatacatatgaaaaaagctcatcagcactggtcattagagaaatgcaaatcaaaaccacaatgggataccatctcacaccagttagaatgacaatccttaaaaagtcaggaaacaacagatgctggagaggatgtggagaaataggaacgcttttacactgtttgtggaggtagcact

SEQ ID NO: 545665 - DNA, 278 bp, Homo sapiens
cagctcggtctcagtgatccccaatgcagcggactcggtacaaaccctactagccaggaagagagtgggggccaatattcaacattcttaaagaaaagaattttcaacccagaatttcatatccagccaaactaagcttcataagttaaggagaaataaaatactttatagacatgcaaatgctgagagattttgtcgccaccaggcctgccctaaaagagctcctgaaggaagcgctaaacatggaaaggaacaaccggtgccgagtccgctgcatt

SEQ ID NO: 545666 - DNA, 543 bp, Homo sapiens
ccccccgcgtctcgcccccgggtcccctgggggctattggagttataatggtggggtgatcttttatttggactcccctgtgtggaagaattttactccccggggatgtctcttccccgggtcccccacatggtgtagaaggggagtgtatatgcgcccttgaagagatgtaagtctttctcctgacgcccttcccaagtatcctccatagccccggggtttacacagcggtatctcaccccagagacttaaggattatgaggttgctccagctccagagaaagatgccagatacaccgtgggacaatcccacaagggccttaaagacgcgtgactagtgagctctaggctgtagaaattttaaaacatcacccatgtgattacatcgggccccttagattttctaacccaggaccagggtccccctttgctttgatttttttccaaaattggatttggggtccccagaaccaaggcccaagcttggttttaaggttcccatttggggttttggaccaaaaaaatttactttttttgtgccta

SEQ ID NO: 545667 - DNA, 991 bp, Homo sapiens
gaagtcccaggcgtgcggtggccatggcgctgtctacgtcgcgcggtacccgggccccgatgcggcagtgcggggggccggagggggcgaggccggggcgcaagggagtgcccggcgctgtcgaagggttgaagagcgggccccgcaaaagggagcagcaagtggcagcccgcgcaacaccagaggcgggctgattcgaccgagccggggaaccagtgagggcagaagcgcgaccccgggcggacggaggacagggtgaaccgacggcggagcgtgtgacaccagagggccccagagggtaaacaggcgaacggaatgggttagacggataaagaaacatggggcacaaacactaacaacgtgaggatcgcccacagggcaacaccagaggacaagtaaacacaaagacgaacagatgtccacacgggggaaccaccccaggtaggaagcgaggacacaccagcggagtggtagccagagggggagcccggaaaaacacacagagagaacaagcggcgagatgctggggccccaagtgtgagcccggcactttagaagcggagagaccgacatcctgtgacccccggaccagataagctgggggagagatacataaagagtacggacgggagcaagaagagccaaagcttaacacgcaaaggagtgttgccaagcaatactgtgtctacagaagggatgtcaccaaacaacgcggacaccaaggaggaactcgaataactacacaccagtgacgaagaacaccggtggggccaccggcatgcacaaacacagacacggcgggtgataccggcccatggaaacgacgcagtgacctggaggacaagtgtggacgggaaacagccttgttctccccacgggacgtgaaaccgtactgacccgtggaggcgaagaaaggcacaacgcgttggtgccacggagcgcgtgagagtactaccacacgatacgtacaacattggcggaccacgagtgc

SEQ ID NO: 545668 - DNA, 523 bp, Homo sapiens
tgtggccacggcagatcatcccctgggtctcccgagatcaactgtactaatgatgctcataccacatgatgaggaacgtaaggactagagtatcaccagggtatacttgaaacagcaaggtagggcgggtaaccttgcatacaacttagagtataacatcatggtgagtattccatccagagccagcactcgatgtattaacttacacctccaggtggatggtaaaaatgtcagcacgagaatggatcaaaaagcaggagtgcagagagagtgtgtgacaatcagaagtagacgaagctattaggaaagacaactgctctgaaattttagtacctattttaaaaggaaaataagctgattctctctcaggttcactgagggcctttggacctaatataaatattcttctcaacagtcctttccacaaatgtcttactcaaccctctctgttcagtaggtcattaatttagattccaatgatatgcaattcatgataatccaaatgaacagagattaccttggc

SEQ ID NO: 545669 - DNA, 309 bp, Homo sapiens
ataaccccccctgggttttttccccattctttttttggggggggggggctttaaaagaagcccattcccccggttttttcctcccccccgggtccccagggggggggggggccccccccttttttgttttttttttttttaaaccccccccccggtttccccccaaatgggggggggcccttttggggcccccccttttttttttgggggggtgggaaaagggcccctttttccccccgcgggggtttggggggggccccccttttccccaggggggggttttaaattttttttttgccccggggggga

SEQ ID NO: 545670 - DNA, 902 bp, Homo sapiens
  misc_feature (523)..(523): n is a, c, g, or t
ggcatagtgacttccttgcagagtataatatggaaaggggggaaaagagtaactttacagtggagaaatctaggacagacaccagctcagccaggtgattgatggttaacatcatccatgataagccctttctgatagcatgtcatccttgatagcagtcgacatcatacagaatgtgataagaatgggcactttagctctggtggtcctcctccccaggaactcgagaacccgaagtctgatcgaggagaacaaagcatcagcacaaattccaagttgagaagcattctttaaacatacctaacccagtacttctcaaaactatcaaggggcataaaacaacccaggaacaatcttgagaaccatggtccacagccaaggaggagcctgagaaggacacttgacttgcgtagactgtacctgtggtatcctacagtggaatgcattataccgcacggaccacacgaacacacacaaggggtcaattcgcgttcacgaaaaccctaaggcgaaccatcttgcnactacacagcttgttggaccttcaagttttcactacgtacatcgacgcacaacatggtttgcgaacagagcgcttacacagagggatattaagaaatagtccttaacatatagcaaagaagagactgcacacaggacaagccaccggggagaccaaggcaaaggggataacacaacacaggtgggacaactaaacaagcggccataccgactgagcaccagatcaaaggataggcgaagagcagtacgtgacccaacaaaggcacaaaaagacaatcgcaccaccgaggaaccacaacaataggagtcaccagagacagacccaaaaacaaaaaagggggacactaacaacaagacaaatggaaaaaaacaaaacaaaa

SEQ ID NO: 545671 - DNA, 166 bp, Homo sapiens
cggcgcggcctctatttggcgtgcatattagaaaacaaaggcacgtttcctagaaattcaactttacattaacacagaaaatcaattttatgagagtacagtaggttagcttgataatatagcaggttctaagtcacaagtcttcaagaggtttcttgaacagcta

SEQ ID NO: 545672 - DNA, 226 bp, Homo sapiens
ggcggcccggggggggggggacttccttttttttttggggggaatttggtttgggggattggggtggggcccccttttattttggggttaacccccctttgcccccgggttccccccggggtttttcccctttttccgggggcccccttttttttttttcccaaggggttttttttttgggggccccccttttttttttttcccctttaaaggtttttaaccttta

SEQ ID NO: 545673 - DNA, 167 bp, Homo sapiens
ttcctatcatcgccgcgtaatcttgcgcaccagcatgtgacgtatagagatgatcgatacagttaaaaaatttagccgctttacgtggcatcatatatcggatttacccctggggataccagaccctagtcgcagatcacgacttaacccatgaatgattgggatgc

SEQ ID NO: 545674 - DNA, 120 bp, Homo sapiens
cataatcgcatagttgcagatatcggagctggaactacctcttctgtaatttttattttttttcttcaaaacctactgaatttattaggttatggatttaaaatttctcctttcccctct

SEQ ID NO: 545675 - DNA, 657 bp, Homo sapiens
ctcgggttacgtgtagagcgattaggccctaaatgattgtccctctgggcttaccattgctcactgaacccgccattatcgttctctgcaacagtgtcttgtgactccctttctgtgctttctggattatacttggaatttttggatactctcctttgagcttccgggtctccttctgccatattcaccaaccacaccattgttgaggagtaaatgagagctggaaaaagcgtttcatttctctcctgagctggttcaaccagcatacgaagtggacctttcggacacaaaacagccactaaatcatatactgaaatcacagccaagatgagccacgcagtccattcagggaggtacttgataaacaccagggccatgagggcactaatcataatgagatatgcctgctggagtcgaagtggacctttccagtgaatggaaatcattcccaccacaccaaaattccagatcaggagtgcaacagtgatgtagtccacagcaacgttataggatttaaacacttcccccaagtaaatgaatgacaaaaagaacagcaacaatagagatgatataataagccatgcatggatgaccttatacacctgtatttatacagaaccaccaggaggatagtcatgacaacaatgacactgatca

SEQ ID NO: 545676 - DNA, 208 bp, Homo sapiens
ccccccccaggggggcccccccccccgggggggcccccccccccggggggggggggcccccccccccggggggggggggggggggggggggcccccccccggcccccccccccccccgggggggccattttttgggggggggcggggggggtttttaaaaattttgggggggggtttttgaatttcccccccccccggggggggggga

SEQ ID NO: 545677 - DNA, 330 bp, Homo sapiens
tttttggggcccttttcccccttttttaccccccccctttcccccccccccgggggggggggggggtctttcccttttttggtttttcccccgggtttttttcgggggcgcccccccccctttttttttttaaacttttaagggggccccctttttttttttttttttgggggaacaagggaccttggccccccttttggggcttttccccacgggggtttttttttttaaattttttttttggggggggggggggggccgggggttccccggggggcggggttttttgcccccccgggcccccttttttgccccccctttttcccccca

SEQ ID NO: 545678 - DNA, 643 bp, Homo sapiens
ggacgcgtgggtcgacccacgcgtcggaatcgctcaggaaagacacatctgcagattccagccggctaccctgcaaatagatggattccgactacacaagggagaaaacgcggaggtgacactctcctgcctggaaagaggacgaacgaccaaacaaacgcaaggactggactccatgccggaaggtatctggaagtcgtgacacgagcatctgcagctagccatattgaatgttgaagtgctggatattaaatgacaattctccccagattttcaagatctctcataccgtatgagatatctgagcagtgcagcagttgggacctcgccattcccctggacagatgcatagagagaccagatgatggggaaaattcccttccacacataactcgcatctctgccaatgatttatcacaactatcgaggttcggacccaggactgatgcagcccaagtatgcagaactcatagtggacagagagttagatcgggaagctgaacgtcaagctaccgcagcttcagcatcactgcctcacaacatggagagtacctcaaaggtctggctcatccatacctaaacaataaagcatccagactccaattgacaacagccctgcgttagagcacgccacactaatata

SEQ ID NO: 545679 - DNA, 376 bp, Homo sapiens
tttcatgggggatcaacccttccgcgtcgagttggagaaaagaataactactgaatgaggcagggtgaaagaacgtctcgagacagcgccttgctctattgcccatactggagcgcagtggcatgatctcgactcagtgcaaccttcgcctcccgggttcaagtgattctcatgcctcagcctcccttgtaggtcagattacgggcgtgtgccaccatgcctggtatatttttgtatttttgatagagacggggttttgccatgttggccagctggtctcaaactcctggccaccttggatccgcccaccttggcctcccaaagtgctggggttacaggcatgagccaccatgaccagccaaggcaggttactttt

SEQ ID NO: 545680 - DNA, 946 bp, Homo sapiens
  misc_feature (359)..(359): n is a, c, g, or t
  misc_feature (368)..(368): n is a, c, g, or t
  misc_feature (395)..(395): n is a, c, g, or t
  misc_feature (492)..(492): n is a, c, g, or t
accctacgaagagagtattccttagtgccctgtctggcaacttctggacagaccaggaggccttggggcttagagcacttcttcagcctcagctgcaaatccattttttcttgtcccttgttcccaggatgaagccacagtgtttcatcaggtacatttatcaggaatctctgtttctgtttatataacaatttaacttaagcctcaaccttcacagtgtacgcatcacatttccatggaaggattgcaggtattagaagatggtggatcatgtcttaaccacaggggaaatgtttcaggatgtttttatagaaactttcactaacaagcaggacacaggattgcagagagtggggtangaggcagtnaagggtgcattgttgttttccctcttntaaatgaagttataatgacatctgtgtttcaagagtgtggcaagtttggactgagcttgaaataaatacagtttaattggtttcaaataactgaacnaaatgaccattccatgccctgtgtaataaaatgttatagaattaaaacttattagacgttaaaatccatgaaggatattttgctggatgcccatccttcagcattctgatgaggatcttcgtgtatttgttcaatgaataagtgaatcagcagctaaatcctgacctttgatttcctcagttctctcctgcaattgtcactgatgctctcatctccagtccttgggcaaggcaggagttgaattagtatccccttatagtgggaggggtctagaaatagctgtgccactttagaagctaggctttgtgggcttttccgggggatggaatgatttcattttcctgctttctactccacataccaccaagatcagaattctgccctaaacactaatgtgtgggagcctgatgtcctgcctaagtcttgtcaaccatatcccaggtgactgacctcg

SEQ ID NO: 545681 - DNA, 95 bp, Homo sapiens
  misc_feature (23)..(23): n is a, c, g, or t
  misc_feature (28)..(28): n is a, c, g, or t
  misc_feature (57)..(57): n is a, c, g, or t
  misc_feature (85)..(85): n is a, c, g, or t
tgggaggctttatttccgggcgnaaggntctttgacccaagcgacaaaggtttaaanggtgcttggctttggccaattccttggnggttaaaaac

SEQ ID NO: 545682 - DNA, 823 bp, Homo sapiens
  misc_feature (1)..(1): n is a, c, g, or t
  misc_feature (5)..(6): n is a, c, g, or t
  misc_feature (10)..(11): n is a, c, g, or t
  misc_feature (124)..(124): n is a, c, g, or t
  misc_feature (780)..(780): n is a, c, g, or t
ngggnnaacnncgacggccgccccgcccggccgcgggggagaccacgggcccacaaggagaagggggacccagcgcgcgcccggaggggccgggaaacgacaaaagacccggcagggaggcgcnaacgcgcacccgcaaagggttttggggggacccacagactagcgcacagccgtcttgttttcaatgaggcacgccaacagctgtgtatctcgtcgagttgacctgtgttggccggctcgtttaccgcatcatgttatatagaaattgagctcttctgaaacggccaacagcttatgttgagtgatcccatttctgtcggtacgccccactttgaagacaattttgatatttttctgtgggcctgacagctcctatcggagtgggctctctttggttctcacacttactaagtgttggcgccgttctcataaccgcagatctatgactgttttaagcgcttaagtatcccatacattaaactcccctcccaacacaaaaaggaaagattatggtcgccttcaacatatatcatagtcctcgatatttacgcaatactaaatcccctaacaaggcccttcttccttgtgttttcaaaacttcggtgcctttttctcctatgcgtgcgtaagagagtctgcgaactctcctctatccatatacttatgtgcgccttttttgttctctatttcattatctttatataatgccggacttcgtatttctccttcttccatatctctaagagcggacacattaccataattttccttttgtanttacttgcttctggtctgatctatgcaccacacgaagtataat

SEQ ID NO: 545683 - DNA, 1450 bp, Homo sapiens
cccttgaacttctgatctatgtctacttacatttagctgagcaggcttactttcatgcactttactcatagcacatttcttgtgttaaccatcccttatagagcgtgacttgtataggccccatttcttacaacttcagaaatcttcacatttacccagtgcaattgtcacatgttgtatatctcattgccacacattcatacattaataggtattagcaacagggcattcaggatctatatatccaacacagcggtgcagcaaccagttcatttcaacataataaaccttattcagacatagcacaaatgcatttaacaaagcaaatgtatggtcaatagcacaattgtcccaattatcaacacagtctatttcccattagcattacatatcaagcaagattggtcaacaagtccccatgggaagggtgcatctggattcatcatatgtacagaacaatttcacacccactaggtaacccaagaagcattttaagcgaagacatcctttatacccaagcaaacagaaaccaattgtactatgaaaggcaacataccatatctccacacacacggcactaggcaaaacatttactctagggcacaaactcaaatcctccttaagaacccggattcaaagtaagtatatacccatcttgtaattatttccaacacttggaactttatccgtcattacaaacagcggtcccaacatatatgagaaaagacaaaaataacgccaacaaatttataaacggggttggcataacaagcgcgacatctactatacgacacattaccctgatagggccattatccctggaaaggttgtgctaacagcatccaaaggaagaactaagggaaaaacgaggccacgcaacaactccggcatacatacgggcaagccccaacttaccggggaattaacccatggatccctcaagcacaaactgtggtgcccaaaagaacacgtccaaacattcaggggaacgcacccacttaacacacaagagataaccaacacagtcaattctgaccacgcaaactgtgtatcaacacactacaaacacacactaaaaacaggacacttaatcaaaagatacaaacacgaaaggagtacagaacactcacgattaataaagtacacttctatcactacccagggtagtcaactcaaaaattcttaaacaatgtgcaccatcataaaccagaggacacaatggagaagatgaaacacagacacaaactaaatcaacccgtaccgaacacgatattgagcccaaacttattcaaaattattataggaacaccagagtatcttctttgaccttagacgtatacattgactatagcacatatattgatctacagtctaacaataagagacatgaataccaactataagaaagtaactcaacctccaacacattacactgataacacaaaacagt

SEQ ID NO: 545684 - DNA, 295 bp, Homo sapiens
tcgtcgagctcggtccggctgccccgcaagacgggagcggacactgcattacctaccagtgtgatctcctgtctgtgctacgaggcgctacaggttcggtgattcactgagtgatatgtgtgggttttggtgtgtgttcgtcaggtcctgcacctcctggctcccaggtgcgctgtgctgacgccgagggacttttcttgtgcttttgccctgcaggatttagtggccggtgaggagggtactaaccgcatatatgttgaccaatgccgtgaggccggacgtcttgcgggggctg

SEQ ID NO: 545685 - DNA, 1408 bp, Homo sapiens
ggcatcctgggtcctaggatccaggtaccgcggcttgaacctgcatctgaccggaagctgcgtcctgtcgccggttctgccggctccactgagccaggacaccgagcgtggcctatgaacggagcgtggacgtcgtgacatgaggttaatgagctgcgaggaaggcacgttcgaatgacacctgctgcagctactgggcgtcgtgcccattgttgccgtggccgggatggccgagcaattaagtggtactgggtgataggactctagaaggtgggcctggacaggagcgagggcctgtgagtgctggcacgccctgaggggccttacatgattcacaggcgacccttgtcccaccatgggtaggggaagacttgcgtggacatgggttgagccatgtgccacgatgctcgcagtgctatgttcgctttcttgccaagctcccgacgtcgcgcggcacatggccttgccatgtgtcctctccttgggacttccggtgcttcgagctttctagacgttatgtggccttgtgagcgtaaggcgtacgaccacgtctatgggatcactacaaatatcgggtaagcgagatggcttgcacggagcccgatttggttccaggcttggattgccataatccatgtgctttgctaggcacaaagatagggtgtgggccagcgacaagcgggggctgcctccgttccgttaaaccccgggcgaattctgggcctagagaatccgttatacaatagaagccccattattcccccaggggcgttcctaacctgtcggactcgcctggtggaggcgaaaacccttaaggaggcaggagaatcctctttgacatatgtgcgagccagtttctgactaggagtttagacccttaagagaggacttccttactttaggaaacatgtgtttccgaaacagggtgggtccccgataattgggtttggccctgtagggaggtttcccgcacaagatctgttccatatgcaaaagtcggcaagaaccctcgaggggaaacatggggggaactctcggcagttgggttcccggccgttttccaacggaagtctgtgtggataccctttagtggctcatttggtgccgcatggaatactttccagagaagtggcccccccgctaacacagttcttgtacttgggggttgcttatccccccagcatgttggtcacaacaggcgacaactactgcttgtgggaaaacacaggtggttgacctttccgttacttggcacaacaacattcccggtggcccattcaacatcggctgaccacaaacatgtgcatggtccatatcttaccgcggtgtgctgcatctccagaatttctacccagtgtggtgtaaagcccctatctaaatcgctttcccgctccaaaatgatttaacg

SEQ ID NO: 545686 - DNA, 426 bp, Homo sapiens
cagaggtcagttcgctatccctggagcctgcttcctgcccacttctctctctctctctttttcttttctttttttattggagattggattctcactctgtctcccaggctggagtgcagtgacacgatctcagctcactgcaacctccacctcccaggctcaagcaattctcctgcctcagcctcccgagtagctgggatcacatgttgtgcaccaccacacctgactaatttctataccttcagtagagacggcctttcaccatgttggccgggctggtctcgaactcccgacctcaaatgatccacctgcctcggcctctcaaagtgctgggatcacaggcgtgagccaccacgtagtcctctttctgcctcttttatgagtcaccattctaaatgtaattgggaaagtagggaagcctgaccg

SEQ ID NO: 545687 - DNA, 125 bp, Homo sapiens
gatgtctacaacaaaggatatggctttggcatggtcaagatagacctgaacaccaagtcttgtagtggagtggaattttctacttctggtcatgctgtacactgatacagggaaagcagtcaggc

SEQ ID NO: 545688 - DNA, 284 bp, Homo sapiens
gaacagggtaagcagacggtactatcacacgtactgaaaaacagtacctcatcaacacctaccagatactggaaaagccgactcactaaacaacgatggcgtaagaggtggtcttcttttgcaaaggcaacagtaatttgtgtggcatcattgtcaacagtgtacaaagcaatatttcgcacccattcaagtttacattatcaccaattgcttcattttttcattcaaacatagttgtatcatccaatcattcaccctattgccactgttgttcaagtaacatc

SEQ ID NO: 545689 - DNA, 271 bp, Homo sapiens
tgatctagaggatcctgctgctgctccctcttcacatgactgcattacagagagcggaagcccacggaacagctgcagaggtaggagccagcgtgttctcgcacttgtggccacacaggcgcccgggagtagcgctggcactcgttgacatcgacacacattctgctgatgccgtccaaaatagtaacccgttttgcattcgcagcggaaactggcgggagaagttccacgcaagggattgtccctttccaaaggggctcaagcagggggg

SEQ ID NO: 545690 - DNA, 241 bp, Homo sapiens
agatcatcctgactcagcctcctgagcagctggtacctcaggtgtgtaccaccacgcctggctaattttttaatttttgtagagacaggtttcgccatgttgcccaggctgctctagaactccggggctcaagtgatctgcctgcctcagcctcccaaatgctgggattacaggtgggagccactgcatctggcttctattctaattaaaactcgttgtcaccaactaaatttatgctcca

SEQ ID NO: 545691 - DNA, 289 bp, Homo sapiens
agaggatcccgttcacttctacactaacaggagggctggggtccctgccaccagttttcacctagccagtgatgtatttactccgtgcactagagattctcatacattgtaccaagttcagagcattgaaatatcattgctgtcgatctttcggtgcaagagaactgctctattgttgatgaatcccgtttttgcacacgtcggtagcatcatgatcgattgggctacggtgaaaactgggtggcagggaccccgagccctccatgttagtgtagacaattgaacgggt

SEQ ID NO: 545692 - DNA, 126 bp, Homo sapiens
  misc_feature (89)..(89): n is a, c, g, or t
aatttatgcaataagacctattctacgttctctgggctggccaaacacaagcagctgcactgtgatgaccagtctgggaaatcggtcanctgcaagttctgtgacaaggaatatgtgagcctgggt

SEQ ID NO: 545693 - DNA, 112 bp, Homo sapiens
aggaagtaacataagttgagttggggtggagttgggatcatcagaaggctgacatggaaccgcgtggagtgggcaatcatagcagtgtgaggtgggcaaggggagcaagggt

SEQ ID NO: 545694 - DNA, 1351 bp, Homo sapiens
gcttcgccgcttggctccgtctgttgggtggtgcgacacacgccgctgtgtcctcgctcgtggtgagcagcaggccactcagtgctggtcctggggcgtggcgcgctgtcacgccgggcaccgttgctcccagccctgctgagctgaaagataagaccctctgcctaccacgcagcgcacatggctgctcccatccctccatcctccctccagccctgccgcaaccctcacgtcgcccaccatcacacgacacctcgcactcatggtcacccaagctggatacatcacgacaccctttgcccccaccccaacgcgcacacgcccctacccccaacctcacccccaagagcgccaccctgcccgcaccaatgctcccccacgcatcggcctcctgaccaaccatatccaacctagccgcaaatccgccgccccaccccccaaacacacaccccggccactcccaccgccacaaacaccaaccgcaccaaaacccccgactcaccccacccccgcccccgcacccgcacccccccccctcacacccgccagccccccacccaacacacgcccccccacaccacccgaaccgaacgatccgcccgcgccacccgcccccccatcggcgcccaaccccgccccgcgaccatcccaccgccccctcctacactccgctcgcaccccctgcccatcgcctccgcccccccacctaagcgtccgccaccacccccctatccaacgccccaccagcgcacgccccccacacaccaccgccccaaacaatagaccaaccccaaacagaacctcccaccgcgcaccaccgccacgccacaacacgctaccaaccaccataaccgctcccctcgcacacccccccagccaccacacacacacccgcccacccaacaaacccacccaacgacacacaaacaccgacacgaacaacccaccacaacaacaccctaaccgacaagaccactggccaaccacacagaaaacggatcaactggcacttaccaaagacacccacacagtcggagccaacacagaccccacgcaaaccagacccacacacaacaaccgaacccaccacaaccactccgccccacccaggcaccgagcacaccaccgcccacaccaccgcggtgctcaccacaacacagaaacgcaagcacacagggacaacaccgacggcaaacaacacgccgcgcgccagatcacgcacagacagacaccaacacgcatccacgcgactcacagagcccaccagcagactcgcgcgctaaccacacacacacgaccggaacagcacccaacaatcagcagccaccacacagaaggatacacccgacag

SEQ ID NO: 545695 - DNA, 748 bp, Homo sapiens
atgcaaagagagttgccgcgtgtggagcggctctccatgaccagtctgaactggtagacaagctaaagaaatgtaacatgaatacacagttgccaacactgcgtgcagctgaatgtgtgctggttcacatgactccagagcaggccgcaaacctccagaagtgggcagccaacacttcagggagagccatgcacataaactacgaacaggtgaacatggttgatcggttagagcatatgatgatcgaaaacttagaaggacgccagtaagacctcgtggcagagatgacctgcaagctattagagtcacacctagaacgcttcctgacaaatgggcgggatacatgataggccgaaaacatgatggaccattacaacaggatacctcgagctgaactgagcacgatttaatgacttggctgggcaccaaaggacggaatgagcttggcctgactgagataacctattaatcggactaaagcttataacgagccagaacgcgtaccactgggtctgccggaggagaactgcatgctctttagcagtgcgtaggcctcgtggggacgtatacaccacactcttgagttacagtgggccctcagcgaggcccaaggtcctatttcgttgacgttgcaaagacatgggtaaataaaccaatctccccccttcaggcaatgcacagttagggtacattcagggaactcccgccctcccctttttgcccctccacgccgttctgaacttaatta

SEQ ID NO: 545696 - DNA, 204 bp, Homo sapiens
cgatgagccggtccgttatcgtccaacacatgcttctatgctcacgcagaaagggaaaaaacaggcacaagtggagtacggcaattaagtgtttattaatacatacattaataacatgcagtaacatgcatcacttctcacatttcattaatcaatgaagtgattaatttcatgaccatgtcttgacttaaaggtgttggggaa

SEQ ID NO: 545697 - DNA, 262 bp, Homo sapiens
atacatctatactaaggtaagcgcgacaatttccttctttggtggtactcccataaaaacacattccctttagttgaactttgttatagcaatcagactaagtatccttgctctcacttatcatctcttcatcacctaataccttttttaaattgttctccctataaatcgtccctcttggggtttctgaatttgaacctcaactgcctttttaatattctgattatccaatgtggtcgcctggttacatctgctccttggt

SEQ ID NO: 545698 - DNA, 641 bp, Homo sapiens
  misc_feature (146)..(146): n is a, c, g, or t
tctttgagatgtggaccgtcgtaaatcccatgggactactcgtagaggagctgaagaagagaaacatctcagctcctgagtctcgactcaccaggcagtctggaagcacaactgctcatgccatttatattttgttggcttatacntgtgacagaaagcatgattgcagagggacctggggaaactgtactcgttgcagaggaagaagctgcgcccgtggccctcaggaagctgtacggattcacagagaacaggcggccctgggactactccaagcccaaagagagcccaaagagagcagagcaaaccagcgttgccagctaggcagcaaggggtgacatcatcactactgagcaaagcagtgagacagggccagaggggaagagcgcagaatatgggagcagtgtctcagtgctcttcctgggccctagaactagacaagtgcttttcaggtgacatcaggtgacagggatttgtttcactttttttttctgtttctcttacacactggtttattactgtgtataatttgtacagctagatgtattttattccctccagctttgaagtgtagtcaaatacatgccatatgtgaagttcgttgtaatatgaataaaaagctattctttgaaaaaaaaaaa

SEQ ID NO: 545699 - DNA, 1181 bp, Homo sapiens
aaaaaaatttataaggtccaggaatcaaagatgacttgataggaattatgaatacatgcagaatgtggagtggttagaaagtgaaatcaatcgtattataggtccagcctagagggttgctgatagccaagtcacgtagcaacacaagtcagagtaggtagttatgtcctaagcaagaccagggataagatctgccaagtggtggcatgagtttcaatggaacccagatacagattaattggtgatcgccagatagtccaccctatatacccatatctacagatcagatggacatttatctaggctccatggaggtccacaattgggaacacagcatagctcagaaaagtggagggatcatatctacggaggatacatccattatcccaggtacaggaacctcgttcgaggaccccaacaaggtgagatcagtcaaagtctacatcagctatatacacttatgtggaaacggtctataaagttcctcgaaattcatatttcacttaaagcgccgtagattcatgagaatcaccgagataatcatccgtaggctgtgatttcaaatatagggtgtgagcacgggagccattgggcatggctgggagattcaccagagaaagggacacaccaggttctatactaaaaacacttacgtggtttcccaggacagaagtctaccctgataagatcttcggattcggaggcaaacttgacttctatgtgtctagctcagcgacatgagtcagatacgactattttgctccattaagacaacagggctatacaacacagaatcacattgggaaattccagaattagagcgccaaatgactccgaaaattgccataatcattggcacaaatgggctgaattggttcctggatggtacaagaagagcaagtggcaagaggaagagaacaggcaccatggaaccaaggcaaaaacgagaatggggccaaaagcttacgtgaaaacaacagagggggactgtacacagagcgaaaagaaaagacacaaacagaggcacgggcagaccaacaggaaagacgggagaacaccgacagagggacaataagtagacagcaaagagaggagcaaccacacgggaggaagaagattcacacacgcgaagaaccaagaagccgagagcaacaacgagggacacagggacgaaacgaacc

SEQ ID NO: 545700 - DNA, 279 bp, Homo sapiens
  misc_feature (14)..(14): n is a, c, g, or t
  misc_feature (134)..(134): n is a, c, g, or t
  misc_feature (182)..(182): n is a, c, g, or t
agatagttgttttnctgggagagttggatgcagaaaaacgacatagatgaccacagaggtccataatccacaaattataagcaatgggtgtttgtttttatacctttaggtttcctaagaacatttagattttncttaataggttggaaaattcaagtaatgttattactgattacattttncttttcttggaatttcccttaaagataatattgagccttactggaaacctccccaggtctttcgaagccacagtcccctcccactctagtgtaggaa

SEQ ID NO: 545701 - DNA, 398 bp, Homo sapiens
  misc_feature (316)..(316): n is a, c, g, or t
  misc_feature (367)..(367): n is a, c, g, or t
acggtgactcacagctgtaattccagcactttgggaggttgaggcggacagatcacaaggttaagagattgagaccatcctggccaagatggtgaaaccccgtctctactagaaatgcaaaaactagctgggtgtggtggcacgtgtctgtaatcccagctacacaggaggctgaggcaggagaatcacttgaaccaaggagtcagaggttgcagtgaaccgagatcgtgtccctggcactccagcctgggcgaacacagtgagactccatctaaaaaaaaaaattaaatattttttatttcctgtttattgcatntttgaaactttgttctataattttcctatttcaggatgtacataaacattngatgcaagagcacattatatggggggtttta

SEQ ID NO: 545702 - DNA, 923 bp, Homo sapiens
tttgcactacacacttctgttgcacctgaagctcgaattctgtctgatgagctggggtggtctgcagcctccctgagtgctggagaggctggggcctgcctgctgccgtcctggctgcctgctgccccctccctgcgtgccctggctctgtggagctgtgggctgcccctgctgctgcgggcacactggctggccagatgcgcctgaggcggtaccttcagcctgcaatgatgacggaaccctgggagatgcccccgtggagccagctgaagagcttgtgctgcttgctgtccagggctgctgctgcctgccgctgggctgcttgaaactcctcaaagttgagagcctggctagagggtgccgcccgccgggacgccggagggaaacggaagtcgggaggtgcaagagtgaccagacacggacagactggactgctgcatgaccttcggaacggcactgcgtaggcagcctccccggagcccacgaggctccccagcaccgttcactggtgggaggctgagccggtggaaaagacaccgtggaagatgactcagaggcgaccataatgtcgttacgtgtacacactctgcccaccctgcttgtgatccgtcgtcagaccgggctgcagggagctgctgtgtttgctgatgatcacacgtgactgtgtggccctgttgcctctggggtgtgccccaccgtttgcatctgtgccactgacatcgtccgctgcaccaacaaaaacctgtccaaggtgcctggcaaccttgcagactgacttaccgagcactgatctgagctattactcaacttgggctcctggactctgagctggattccagtatcgtctgcacacgctgaacccctactcctcggcctaacaactcaccagcatttcacggccagtttccacacccaattgactg

SEQ ID NO: 545703 - DNA, 910 bp, Homo sapiens
cctaggcatggaacccagcagccccctgggggagtggacagatccagcactgcctctggaaaaccagctggtaccacggggccatcagccgaacagatgccgagaacctgctcaggctgtgcaaagaggccagctacctggtgcgcaacagtgagaccagcaaaaatgacttctctctctccctcaagagcagtcagggcttcatgcacatgaagctgtcccggactaaggaacacaagtatgtgttgggccagaacagcccacccttcagcagcgtccctgaaatcgtgcaccactatgccagccgcaagctgcccattaagggagcggaacacatgtccctgctctaccctgtggccatccggactctgtagatgtgagaccagggcactatgatagacctggacccagtccttgtcacctgcacgggggcagcggttcttaccaaggacatgatgtcagaaacctggcttccccttgtcctaggatctagcaggcgctgaagattccttaatttattataaaggggagggaatcctgggccttggaataaagggaacctgtgtggaaaacaacaaaaacaagataaaaaaagaaaataaaaaaaaaaaaaaaaaaaaacaagagaaaaggagagataggaacaacaacaaagagggggggggggcgcttaaaatttttggggggggaacattggtagacaaggtgttttgtaaagagggcctatatggggatttttaagagagagagcgggggtatataaaacgatgtggggggagaaaatttatgtgtgtgcgagtggagaggacacctatggggggggcgacatggggagtacactaagaaatgcgcggagggaaaataattgggggtgtggggaacgcgttgttggggaagtcggttttatatc

SEQ ID NO: 545704 - DNA, 534 bp, Homo sapiens
  misc_feature (29)..(29): n is a, c, g, or t
ccagcctcttccgtgtatacaatacaccnctagatttatctaatagttagtgatgtgcacaccataaagtatcagtgaagctatctcatgttgtcctacactatcgttttcaaaaaatatctaccatctgccgccataagttgtgcatatatggtgcaaaaacgtcacgttaagtggtatatttctaatcaagtcataagtgcgcaaagcttaccatgtttgtgacagacctctcaagtgtgaatttcagtacagaagccttatatagtttgttgacttagaagatgccgccctgtgcttgaacaataaatgtcacgcagagttcgatgtcgttagattaaaagagagggtcatacaaattaattcttttttacacaacaagggtgttttgcattctgacctcaaagcaaagcccctggttaaaccagtccaaaagggccttaccttggagtacgtctttatttactcgtttttttgtaggccataccctaacgtaagccatttgatgacatgaaaaattctgcaggagctgta

SEQ ID NO: 545705 - DNA, 400 bp, Homo sapiens
cggcgctctaggcgttagcgagtgcgcggtccactgcgtgcggagcctgtggcaactcctatagcgcgccttgtggagacacgcgtcccagacctgtggctcctactggggagagcgctctgcggaagattgctggactcgctgaagagagactacgcacgagagccccagccacccattaaatcagatagagaggattcaccttcttacgctctgtgcggtcagaaaggactcattggctatgcgcaccacgaacccgagtcttttaacggatccttgagaaatgtggctgtagatgagactgagcacgcggggctgtaccgtgacagtggctgatttgcatgccatggactttgagccgagggtcacagacggtattactcggactctctcttcctgg

SEQ ID NO: 545706 - DNA, 200 bp, Homo sapiens
ttgctgcggtcgctctgaggatcccctatcgcgatagcggagcttggcgacagctgccaagcagtttcgcgatgaaatggggcctatgacgttcgcctttgtgcctggattcaaagtggccgtggagcggcagactttcccgatctacggaaccgaaatttgccctgaggcagtgacagcgaaagttttcattatcggtg

SEQ ID NO: 545707 - DNA, 766 bp, Homo sapiens
attttttttttttggaaattataaaaacaaatttaatttaagatctgaaatacaattcctaaaatatcaatttttccagaaaaaccggggcttacacaataagtgcaatggcctctattcagtgttaaaacggtgcatttagcattcaaattacaaaaaccagtgaaacaaattcaccattcctttcaacaattgtgagcaaagatagaagtgccttcagagacacccacccatagacagtggcacttgtgcaagcgaggcattgggcagtggtttacacattccaagccacccaatacacacacacacacacaaacaaaagacagccacaaaaagagcgtgtgggttatacacgagggatattattcacctctctcaagtgtgtgcaccacttagtgtggcaccctttgagtgaaaatatcgagggggcagttctgtgggtcacacatttcaccatatatacaacccacactattttctcagaaacacatatggggtgttaagagggtgtccaaaagagggaataggagacacaccaccccaggacattatcacaccacccacgtgcgagagacgccaaaaaagagcggcaacacaaacaacacggggaacacatcaacagaaaaaagagtctctaacccactccatggggcgaccacaaaaaaacaacagggcaacaacaccaagaggggataaagaccacagcctacggagaacaggccggacgaaccaacgggacggccatccaaccaacgcccacataaat

SEQ ID NO: 545708 - DNA, 757 bp, Homo sapiens
ccctctatctgatgcgatttgttgcttttttgccctcgttgtttgccccggctttctactggcccatctctgctttcatcgattctttttctttggtattatcactttggtgattttttgcgcttttgtgccatcatttttgttaattggtggtcttttatccgggtttgagcctcttctcgagtcttctgcttagtttcttcatgctctgctgtttgtcccggtgaacctcggccggatgcttgcctatctgatctcactggctagtcaactgttactggctttagaacccaatgtgtcgtgtactttatatttcgattctgttgcttcggagtgcgctaccgtctgtggtccctcttcatcagttgttgttatcgattttgctatctctacttgctgcatgtgtagtctcagtatgtgctggtgttcttgagtattttgttatggatctgtgcgatgttgcagtctgtcgttacggcttttcttatagtatttgaatttggattcagcgtaggtcctgtgggcctctgccgctacgtgcactcttcgtaggagtcgtccatgctctcgggctgcgctggggccgagtggctgccctgcgccccactcatttgcatggctcactcacacaccactcaagcaatagggcccacgcaataggaagaccccgcagagagagggtcagcaggggggccaccgcatgcgcctcccctcctatagcaccatggtggggctaggttacggggctagccccatc

SEQ ID NO: 545709 - DNA, 1006 bp, Homo sapiens
gctcctcagcttcagagcagcatcagtgacctgggacagtgaatccgataatgccgccttctgtctcgctggggcatcctcctggctggcagggtctgtgctgcctggtaccgctgtctcccatgtgcatgaggcatccctccagggtagatgcatgccgcgggaagagacaagataccatcccaagctgttgatctaggatctatccgatagccttgctctccaagatcaacctcaccgaaacatgggcgtgagtacagacgttcgatgccatatcccgcaagcgtggcaggcaaatcgagtctcgagcagcaagcacttaattttttcttgctgccccctgtgcagcaatctgctttcgtgtctgttatgcgaatagctcctgccctggggggtacgcacaaggcttcgaccaacatactaggtaaggacaatcctcgcctatgggccgtgcaatggccgaccctccattgtgtacgattccctggaggctccggtatccaatgtaacggtctccccagggaagttcctctcggttagcctcatatccagctctagcatagccgaatcttcctagctcgactctacctggcgaatggcactgttatccttccagcggaaggcgccttgtagacgctatggtggtgaattcatcctgttgtaagagagggaatggtcaaaaggacgtcgtaccgaaagtcagcattgagcacattccagctggtcgagacttgactgtgcggcacagcccgtatgtaggcccgaaagaagctaggatcgactgattgaccgtggaagaaactggtcactccccggcgagaaggtgtgtgggatctgggtccgcttgagcttgaacagctgactcaggttttagcttcttggtcgattttacatcttctcttctagaccggcccatggggactgaaaggatggttaggggtcatggtcttaaggatggcttaaccgtgtttattccccccgaggggtatgccaacaacctgttgct

SEQ ID NO: 545710 - DNA, 289 bp, Homo sapiens
tgcgtggcatcccagtactttgggcggccagtgtgcacggatcccctgagatcaggagatcaagaccagcctgaccaacatggtgaaaccccatctctactaacaatcaagttagccagatgtggtggtgtgcgcctgtggtcccagcaatagaggaggctgaggcaggcgggctgcttgagcccaggaggtcacgcttgcggtgcgctgtgtaacgtgccatgtactccaccctaggtaacagagcgagatcctgtctcaacgaatggggtaaatcctgcaaagaaat

SEQ ID NO: 545711 - DNA, 172 bp, Homo sapiens
ggaagggacattaatccaataaataaggaaggaagctgttgcattactcgggatttaaaagttgatttacatttatattcctcttctgggttccatgttttgtcactcatgtgcacattgcttcgccattgggccttccagtgtattgttctgcagtgttgaaacagatgga

SEQ ID NO: 545712 - DNA, 125 bp, Homo sapiens
cgcatggtagagatgtatttatggcagaggtagatagtctcacgaattcatagtagtacactggcagccgagctgtggtaggcatcctaataaaacgtgtccttataggctccatactacagact

SEQ ID NO: 545713 - DNA, 170 bp, Homo sapiens
tggcttgagctcaggagtttgagaccagcctgagcaacgtggggagacccccgtctacaaaaaatacagacattaaccgggcgtggtaccgtgtgcctggggtcccggctgcccccctctacaaaaaatacagatattagccgggcgtggtgccgttgttcttcgacgaa

SEQ ID NO: 545714 - DNA, 121 bp, Homo sapiens
  misc_feature (1)..(1): n is a, c, g, or t
nctagtgatctgcgctcagttttcaaagtactgggattatataggcatgagcactgagcctggccagaagcgttttcttcaaaggcctcagtgagataaattagatttggcatctcctgtc

SEQ ID NO: 545715 - DNA, 216 bp, Homo sapiens
actaagaggaggacagaggtggaaagagctaaatgtccttgaaaagaccttgaaaacacctgagtgtaccgcccactggagagacatacacatggacccctccacttctttctcctgactggcgaaagacagctgcgaagtgccatgcaaatacaaccaggtcttcgctgcatagctggacagtgtgtcatcagtctgataccatcttctgctcta

SEQ ID NO: 545716 - DNA, 100 bp, Homo sapiens
gcttatatcattcctgagtgcgcggagggctcatgtacccgtatatacctgttatcattgatgtgggcccccctttgcattaacagggtacctgagctca

SEQ ID NO: 545717 - DNA, 242 bp, Homo sapiens
gcgcatggagctgtcagaaaagttaccacagggataactggctcttggcgtactcatagagggaagcgtagagcgtcgctaggggtattttgcttcacagcgatagaaagagccgacatcgaaggatcaaaaagcgacgtcgctatgaacgcttggccgccacgagccagttatccctgtggtaacttttctgacacctccatgcgccacccgaagtgccacgcaatgtgccacccaaagag

SEQ ID NO: 545718 - DNA, 124 bp, Homo sapiens
aacaagctcactgcacaccatgcaggcatggccatgcacgcagccacgtggcagcatcgcacaggcagcaggcagctcaaccacacttcagtggcagtcgctagtatcccacacatccatcaca

SEQ ID NO: 545719 - DNA, 150 bp, Homo sapiens
  misc_feature (48)..(48): n is a, c, g, or t
ttgcgatggcgcggtacaggctgctttactcggaaagggatattgtgnccatcatgcccttcattgcctaactacatggttacatgtccatatgatccaccgtgcaatccatgcacgtaagtgagcggagtaatgagccaaccttcgggg

SEQ ID NO: 545720 - DNA, 189 bp, Homo sapiens
tcgtgcctggcctcaaaaaaatgtttttacaatcctccctctctagttactgtttcttcctgaccccataccagaaagtggaataaatcatacccttttgtattcccattcctttgtgtagttccctttccccggaacacgctttctccctatccttcctctctgccctcccgcaaaacacagcatagt

SEQ ID NO: 545721 - DNA, 785 bp, Homo sapiens
atagtaaagattaagtatataaggggcttgaggtacatataggtctgttcaaaaaatgacagctgtgtattaggttattgacctaactttccttgccaagtaaaagtctaatgccctgccccattagattcactgtacatgtcccgtggcttataaacaggctatctccccctgattaagaagcatgctccttttgagtctctacgataagactgtattttaggagcaggctggaaaaaatctttgaagatgttgcccacaagataactaggaagaaaaacaccagtaaatcagatgtggtgataagtcaaacaagactgggtggcaggctgactctttgctacttttgaagagttttcctcaataaatgaatcaagtaaatagtaacatagggaaatatttagacaaattaaacacatgaattaaagcaaataaagttgatacattattaccacatgcaaaatttctgttgccacaaaaaaaaatctatcatgcattcagaatcttgggattcttaaatgttctttggttctattctatatgtactttcttgggggcccctctttctgatataaagataggaatttgcctaaaaaaataattttagctcaagatgataagcctagggaccttctcacttatatgttggcagacaaagactcccaaatttttggctcccaattcctcttttccatattccaaggcgtggcttcacttcctcctctcaaggaaggagtgggagcacgaatgtcgggtacgagtcaatcgatctgcttgtgtttttt

SEQ ID NO: 545722 - DNA, 549 bp, Homo sapiens
gtcagtgggtacagatgtatgtcacatcgagacagaggttgggcatgaggagtgtctctcgtcacagtttgcctagaaggctatcaaaaagtattgttcttaattgtcagaaccatgttgcaccatgagcacgtctgaaacgggggacggtacaagacaggagtctcccagtatcacctaccctggacagagcagagcactggcgcgagagctgagagcctgagcatgtagcttccttgattgggaggcagaagagatgcccaaaggaggaagcgagaacttggaattgtatctcgcatggccctggattcttaggaaaatcatggcttcccaactggatgggcagcagggacttggggtgaagtaaatggtagactacccagccccgagtgacacagaacaagaacatgaatgtagtttaaacttttttcctactccaggagccattgggattccaatagggaggaggctggaggagtctcagttactagttccttctatttcccccaattcaccagtctagctgcttgcctagaaagtattttcctc

SEQ ID NO: 545723 - DNA, 103 bp, Homo sapiens
gcagtctatggggaaataagcaacagccgtcctcattcccctcccagcttcctttcccagtcagcagtgtggaggggagaaactcacgccttgcctcctactg

SEQ ID NO: 545724 - DNA, 882 bp, Homo sapiens
  misc_feature (221)..(221): n is a, c, g, or t
  misc_feature (228)..(228): n is a, c, g, or t
  misc_feature (252)..(252): n is a, c, g, or t
  misc_feature (257)..(258): n is a, c, g, or t
  misc_feature (292)..(292): n is a, c, g, or t
  misc_feature (296)..(296): n is a, c, g, or t
  misc_feature (301)..(301): n is a, c, g, or t
  misc_feature (309)..(309): n is a, c, g, or t
  misc_feature (311)..(312): n is a, c, g, or t
  misc_feature (353)..(353): n is a, c, g, or t
  misc_feature (369)..(369): n is a, c, g, or t
  misc_feature (378)..(378): n is a, c, g, or t
  misc_feature (390)..(390): n is a, c, g, or t
  misc_feature (395)..(395): n is a, c, g, or t
  misc_feature (429)..(429): n is a, c, g, or t
  misc_feature (435)..(436): n is a, c, g, or t
  misc_feature (441)..(441): n is a, c, g, or t
  misc_feature (451)..(452): n is a, c, g, or t
  misc_feature (460)..(460): n is a, c, g, or t
  misc_feature (475)..(475): n is a, c, g, or t
  misc_feature (490)..(490): n is a, c, g, or t
  misc_feature (494)..(494): n is a, c, g, or t
ggaggacttaatgctatttatgttgtgcctctgcaggcaaagcccttaataaatattttacatcctttctaatgacaatgaatggaattaatcactcaacaggtatagtattacgactcatgtttactttttaaaatgatttagaccgattttcagattttatttcgttatgattaaagatgtctcatgtacttggaaaagtgagcatttttttttttttnggttttncattttcataccaggcttaattgntcaanngactttttaattttggaagtactctgacacttcnaccntctantttattananntgggagggcaaatttttggtccaaaaacttacagacaagtncttggagagatttccnattatattnttagacttatangatantttttcccatactcagaatgaaaaccgggattanacgttnnggttngggggttttnnggtacaantttagctaatagctncaggctgagagattngtancatagcttgacaatttttggtgttgcacttgaaaggaatcacaccatttattccttagaagtatttcctgtgttgttctacccctttggacgacgggttgggactcccatttctcatccgagaatttatttacccttccggggctgtacagtcatctttaatcctattcctcttggctgttggtagtaagagccctttgggattgaacctttgctctctgcttgatttcaaacctgtggaaccccagatctgtaagtctcctgtggaatgcgttggctaatggtacgctaaatacccgctttttgttgtaaattgccccaattctgaggcctttatgtactacactggggccaatcgggtgggtaattttatccctgaccctctgtcg

SEQ ID NO: 545725 - DNA, 245 bp, Homo sapiens
ctgagcgggtgggagcgagggaagtggggggggattgagggggagaagaggggagaggggaggggagggaaaggggagagggggagacagggggggggaggagggcgggggggggggaggggagagaggggagaggagggcgagggagaggggaggggaggggagagaggaaggggagagggggaagagcaggaaggggaggaggggggggggaggagggggcgaggcgaggagggagggggagg

SEQ ID NO: 545726 - DNA, 344 bp, Homo sapiens
gtccccttgttgggagagctccgtgcgctaaattgtcagccagtaccagatcatcgatcctctcataccaagagaatctgaccgatgctccatctagtacaaagggccgctcgtagaagagcaagcagttggaatgctgattcatgagttagaatgtgttcccactgaagcttgcgcataccaaggatgagagttcaagacgatggaggatcagatcagaactacgacatcgtcaccattggggcgccagcagcacactgccaaggttttaagtcaggaggtctccggaaaaagctgcacaaatttgaagagaccaagaaacatacatcatctggctgccagtc

SEQ ID NO: 545727 - DNA, 212 bp, Homo sapiens
aaaaaaatttagtatattcatgtcgaggatcaaaggattgtattattaaataagcaccaccgaaaccgctgtaaatactgcaggttacagagatgtattgcgtttggaatgaggcaggactctgtccaatgtgaaagaaacccacttgaggtatcacgaggaaatctccacctgcccgcttcacaggaaagtcttatccagggccttcgtgg

SEQ ID NO: 545728 - DNA, 981 bp, Homo sapiens
  misc_feature (361)..(361): n is a, c, g, or t
  misc_feature (478)..(478): n is a, c, g, or t
cgcaggctcccaaaatggcgagtgaggctgcggggactcgctgagcagcgtagaaggagcgtacaaacgagtaggagctgctacacaggaccaatagcccaagtagagctaaccattgaaaaacagacatcagaacgcaaacgcatggagcggagagccgtgtataaagatactgcatttatacaccattcaacagtggcctgaatacaggctactgtagaaatatatgctatgatcgagacgggggagcgcgtacgagtccgagctccaaggtggactgcacgagagcaagctgtcgttgaaggacgaaataaaaccaaatgatgaacatacctaagcgataacgcccgcgcaaaggaantctaaaacggcaccataatctaccgaaggaagaaagaagagacaataaagaagataagacagtagattaatacagtactaaaatgataactataatcaatcaaaaagctctatatancatagaaacgtcaacataagacgataatcatataaaagaaccgatcataactaaagccacaacaagaaagcacatgcaataacccgcactggaagaaagatgaggcctgggaaattaacatacgacattcaagcgattcagatgaagagcgaaaagaatcattaattatctagcaatgaataatctataatgaggagaccgatagattgccgaaaattctgaagaaaatctatgatacaaccgaaataaactaagatgaagataagcaggagagcaataactatgatagacttaaaaaagatacaaaagatcgctatacatgaaaggatcgaataattaatgaaatattaaaataagctattccaaagaataaaacaaggggccaaggccatgcaaaaatgacaataaggaacagaggaactgaaagctgttaagaaggatgggaaatgattatggacaggtggtaatataaataattttaagggaacatgaaagaagagtca

SEQ ID NO: 545729 - DNA, 259 bp, Homo sapiens
  misc_feature (8)..(8): n is a, c, g, or t
gggctgantctagaggttccctctgatcgctctgcgttcttcttcatcatcatcatcctcatcatcgtcgtcatcatcatcttctgtgtttgctgaagtgatttcactttgtacctacactatatacaacggtatcttgattaaggtccaggaatcacatctggatttatccactagagaaaaacttgtgttctttgatgctcccccatgattgagcgatccagagaaagggtaccgcagctcgaaatttggtgaatca

SEQ ID NO: 545730 - DNA, 1132 bp, Homo sapiens
ggacaaggtaatccacgcaagatgaagcccaacatcatctttgtactttcccatgctcctcatcttggagaagcaagcagctgtgatgggacaaaacggtggatcactaaggccgattaccacagtgaattatcccaattatccacacggacaacagggccagccactattctggacaaaaaggcaagcaacaaactgacatccaaaggcagaacaactattcaatacacatatcatgtagatgccaatgatcatgaccaggacccgaaacagtcagacaatcatgatttgaatgacctacataagacgacaaaatcacaaacagacatctaggtggaagatcaacaactgctcaataatccacacagacagtcagagaccatgataacatcataagggtacatttgcaaagggtaaagtaataacaccataacaggaggcaatacgctcactcgtgagcacaacaaacatcctatctcacacgatccaacgggacactaagcccaactggacacacggaaatctaccatgtccactctcccacacacacgcaaacgaacaccgcctagaagtacattggacttaagtcaaagacaaaatctaacgccctacaggagacaacaaaacagggatgacaaacacagcggaatcacaaagacaacaacgatacacacaaacgaaaagaagcaccacacaacgaaaacaaaaacagcagacacaacacactacccagcacgacccacagagcccaaacacaaatatgtatcacgcacacagagcacgatgccaaccagacacaagagcaaacagacgtgcggaccacgcacaaacaccacagaaacaacagaaaagaaaaaaaaaagacactgaacaacaagaacaccggccagaacccacaacacacacagtcggcaaacgaacatcacaagccgaacgccgacgacaaccagagagagaatggagagacaacacgaagagagtcgagaaaagacaatagctcgtgaagcacaagcggccaggacgacaccgacgaaaagcagaagcgccgacctcaacgagacgaagcacgacaaaaactagctcagcccagacgaaaaagagaggagcgcggacgacggagccagagaggaac

SEQ ID NO: 545731 - DNA, 695 bp, Homo sapiens
ggtttcaccatgttggccaggaaggtctcgatcccttgacctcgtgatctgcccgcctcgggctcccaaaatgctgggattgcaggtgtgagccaccgtgcccggcaaaaaaaagaaaaagttttttttgtttttttttttttttggaaacggagttcttcgctcgtgtgtgccttaggcgtggagttgcaggtggcgcgaatctgggcttcacgtgcaaccttcgtgcctacgtgggtttcacaccaattctcttgcctcagccttcccaagtggtgcgtgggatataccggcgttgagccaccgttgccgtggccaataaagaaaagagttttataagttgccgaggcattggtacgcatgtgctctcttagtcccacgtatactacagagaggctagagcgcaagaaggactcgctgtgagcccaaggacgtcataggagttgccaagtgacgcacgttgatcaagcaccactttacacttccagcctgtgggtgaccagatgtgagacccttggtctcttaaagaaagtaagactaaattaacatagacaatatcgagacaccgagggaagatcccagtgttgtgctgtgtattaggtcccataggtttccatcatcgggccgtgttacccaccctccgtccaggagcacatccagaaacactttattcggccataatccgtacccagtct

SEQ ID NO: 545732 - DNA, 236 bp, Homo sapiens
tcagtcacgcgagcatctcagctcatccagcatcctcagctcactcgagcatcctgcagatacaacgagcatcctcagctcagcccagcatcctcaggtcaggccagcatcctcaggtcacaccagcatcctcagatcaacccagcatcctcagatcaacccagcatcctcagctcattccagcagcctcaggtcactccagcatcctcagctcactccaacatcctcagctcacc

SEQ ID NO: 545733 - DNA, 113 bp, Homo sapiens
tcagctcggtaccatccaacgccgcgtgactgcatcaacgccgcgtgagcatccaacgccgcgtgactgcatccaacgccgcgcctttccaacttgcggctgttggatgcagt

SEQ ID NO: 545734 - DNA, 168 bp, Homo sapiens
ggagctccaacgccctttccaggcgtgtctcaaggtggaaaaattcggggatctcatccttaaagccactgagccccagatggttctcttcaacctctatgacgactggctcaagactatttcatcttacacggccttctcccgtctcatcctgattctgcgtgccct

SEQ ID NO: 545735 - DNA, 1074 bp, Homo sapiens
  misc_feature (60)..(60): n is a, c, g, or t
  misc_feature (387)..(387): n is a, c, g, or t
cttagagctaacttgggccaggccctgaatctgcgctgtggctgtccctgaacgtgctgnagccctcctgtccctttccccccaagtcagtattaccctgtgaagccccttccctcctttattattcaggagggctgggggggctcccctggttctgagcatcatcctttcccctcccctctcttccctcccctctgcactttgtttacttgttttgcacagacgtggcctgggccttctcagcagccgccttctagttggggctagtcgctgatctgccgtcccgcccagcctgtgtggaaaggagcccacgggcactaggggagccgaattctacaaatccgctggggcggccggggcgggagagaaaggtggtgctgcagttgngtcctggggggccattcgattcgcctcagttgctgctgtaataaaagtctactttttgctaaaaaaaaaaaaaaaaaaaaaaaaaaaaaactttgtgtgcggcgcgcgcgcccggggccctcggaaaacagtttttaaagacacacaatcgggtgtgggcgcggcgcgggggcccaagggggtaagtgggaacctgtgggccaaacacgggtggttcccaagaggagaaacccgggggccagagcgaacaaagaggggcggggggattctcccacaccaaatataacaaagaccgccgcgggggggccaacccgagaagcgcggtctggggagacacaaaaatctccacagagagggggagtcctagagagaggggcgtcctataaagagggggggggaccctaactatcaaacacggggagagagtcccaaaaggggggagagctcgcggaaaactctcacaatataaaagacgcccgatgatctcgggtggtcgtaaaacaacgcgtagaagaaagaagggagaagagaaagagaaataaagcaaaacaaaaaaaaagaaaagaaacgaacaaaataaaccaagaagaagaggaacaaagcaaaaacaaagccaaaaaggtagactgaagagagccgggaaacacaaagagggagagcaagcaaaagacagaaaaaaaaaagagg

SEQ ID NO: 545736 - DNA, 923 bp, Homo sapiens
  misc_feature (923)..(923): n is a, c, g, or t
ggacgggagtggcggccgcgcggaggatggccaagatggcgtgcagctgcggacttcgcttcgcgtgggtagtgtttgggccctgcggtggcgcggggctcccgggctgcgcgtgcccggggtctgctgtgcagcgcgcggcccggggcagttccccgctacggacaacctcaggccagtggcctgtgtcgtcgaaggtctgggccctttcccggacggccggacagtggattgctggttcagcgcctggggccattgcctggggcggcaggggggttgcggggcttgggccgtgggctctggcctttcgggatggtcgagtggcccaagtggaccttggaaagctgggaacccagcgcacaaggctaattccggtggggtacttcaccggttggcactaccctactacttccctttgggcacccaacaccaaggaatcccagagaagagggtataccaagtgtaattacataaaatggcaaggggtggttagcagcccatcacgtggaccaaacaggacactgggaaccttaccggttggagaccataacccgggcaaaaccatagggatgagggccagttgtctgccatacccacctgggaaagtgcactggcaagggcctaacaggggcacgctcgggagacctggccctgagaaacaagatggggacggaggattccacaaagagaacagggggacaccaccagagtcggaaaacgactcggcgagcggacggaatgggcgaccaacttggccggaggcccaaagggggagaacagcacgtggatcgacgcgacccatagcttgtacacaccaagaaaggcgccagataccccccaaagacaaagctggaggggggataggcaaccggaggggcttgggcccaaaacaaaccagagaaagccatttgggccgccgcctn

SEQ ID NO: 545737 - DNA, 129 bp, Homo sapiens
ggacgaggacgtggtggttggtttcgtcaagtgtgttggacctcctggggagagtggggagctgctgtggcggctgctgaagggctgcgacgcggtggggaggtaggcaaggcggtccatggcggtggc

SEQ ID NO: 545738 - DNA, 1190 bp, Homo sapiens
  misc_feature (816)..(816): n is a, c, g, or t
  misc_feature (961)..(961): n is a, c, g, or t
ctccccctccgccgtgcggtggtgtattattaccacggccttccgttttttggtgggacccggttccacgactcgccgcttgggggtgccccccaattccccacgccggggggtgttgggccgcccccccacttatgggagggactccccccggggacccggatttccgcgccttctccgggactttcttattgcctttatgggccccccccgggccccggagtttaccacactgtgttcacccaccacggggggaaccacgtcttatttgagcccaccctttatgggccccctacattttttaggggttcagccaccccctaattaatggcaccacaagttttttgtctacccccaaaaaatcccacgggccctgggttatccccggttccccgggagaatttctccccggggaatatttctcgtctcgaccccccccaccgcgcggtctccgcgccttgttctccgggagggggcgccccttagtctttttatttggttggttgctctccccggttttcaactctcacttggggagagagatttgggggcgccccccacaaggggctttgccagagagagtctttgttgggtgttttctctggggagataaacctctcccgagagggacacacagagagggtcgtataaatctcgcactcgagaagttttttttgtgaatgtgccccctcgagtggagttccccccccgccgcggaggagccccctcgctttataactattctatccgcttgagacacctcggctctgtgggcccccacccgctcttttgtgctccacgcacacccgcggtgtntgttcttcgggcgcactcaccaagagtgtagaagagtttcactcgtctgtggccctcggggagacccacacactcggtgaaagagttgggcccgctcataagagaagcgcccctcgcgctcgagaccaccggtggagagcacttnttgtgagacacccacacacagagttgaggagtatctgcccacccaccccccacttctcacgaacacgaaagggtgtggaaagccacgagagccccctgtccacatgccccacagccacgtccccaccaacgcactatacaccgggtttcccttggcacagctgtatatttctggaggttctggaatgttgctcttcttaagacccttttatcaaaattttgtaccaaga

SEQ ID NO: 545739 - DNA, 404 bp, Homo sapiens
acctctgtctgtgagaataggattgcccactcttctaacagaacatcttcctagagcttaccctagccagcagcggggagctgcagtacagttacaacccagctcgggcgtcaccgtcactgaggtacgccaggatgtctactgctttatcctctatgaacatggcgggctctgagctgctgtcgctgctgtggctcagagggtcagtgggacggctagaggggaggacgtggattcccagggagttgctcgctcgcattaaaatagtcaccattgcctctactggaagcttctcacgaacaatcactcgacagcggatcagaagagccgcgttgacctggcaaggaagggttttcagtggttgccccaatcagagtgatcgtcccacattccacgtgagggtg

SEQ ID NO: 545740 - DNA, 646 bp, Homo sapiens
  misc_feature (68)..(68): n is a, c, g, or t
  misc_feature (105)..(105): n is a, c, g, or t
  misc_feature (186)..(186): n is a, c, g, or t
gagttccgccatggcctccttggaagtcagtcgtagtcctcgcaggtctcggccgggagctggatagntgcgcagtccacgacagaacaaatattcggtgctttnaacctacctacaacgagcgcgagaacctgccgctcatcgtgtggctgcttggtgaaaagcttctccgagagtggcaatcancttatgacaattataatcatagatgatggaagcccagatggaaacaacgggatgttgctgaaacaggttggacgaagatctatgggtcagacagaattcttgctaagaccacgaagagacaacaggttggggactaggacaccttgctattatattcactggaattggaacacattgccacaggaaaatttactattcatcattcatggctgctgatctctcacaccaatccaaaatttattccctgacttttacttcacggaaagcacaacaggagcgcgtcaatttggactatttggtcttctgggaaaacttcgtttaccacaagggacatcggcgacggtgtatattggctggggtattttgacaacagaaccattaatcaggccgtgtgggcccacattttttaacctcaagattcttgttgagaccaggagccatcttgttttaaccacggaat

SEQ ID NO: 545741 - DNA, 894 bp, Homo sapiens
  misc_feature (68)..(68): n is a, c, g, or t
  misc_feature (105)..(105): n is a, c, g, or t
  misc_feature (186)..(186): n is a, c, g, or t
gagttccgccatggcctccttggaagtcagtcgtagtcctcgcaggtctcggccgggagctggatagntgcgcagtccacgacagaacaaatattcggtgctttnaacctacctacaacgagcgcgagaacctgccgctcatcgtgtggctgcttggtgaaaagcttctccgagagtggcaatcancttatgacaattataatcatagatgatggaagcccagatggaaacaacgggatgttgctgaaacaggttggacgaagatctatgggtcagacagaattcttttaagatacatcgagagaaaatgtggggaactagagaagtgcatatattcttgtgataggaaacatgtccatgggaatatacgtcattattatggatgctgatctctcatacatccaataatttagttcctgaaagtctattaggaagcatcaacggaggtgtaagtggggagtaatgtctctggaactcgtgtacaatggaaatggggtgtatatggctgtgttttgaactcgaagaatattcagctcgtgggccaattttaaagtcagatctggtgagacaggagctctgattgaacaggaaagttgggattatgccgaaagaggttctagagaaattgtagaaaactgtgtttctaaaaggtaggtctcagatgggatgatggtcgggcagaagtggatatacttattgggagggccatatcagtgtggggccggtaatggtgactccagtggaggacgaaattttcttgtgaagggtatggctttgagaataagaagaaccatagagtctcggtaaaaaacgggggttgtaagtctaaaaatgggggggttttaccagttttatagggagaaagtttggaggtttacacaagcggtggattgg

SEQ ID NO: 545742 - DNA, 683 bp, Homo sapiens
ggtactggagccattggtggttgagttatgctgatggcgcctctctgaagggcaagttcaaagtcataagttgggtgctgaagacaagaaatgagaagtagtggatgagattgtagaacgtgacgcctcgcacagcatattggcttttatgacccccatgagctgaaaggcaggtcgaccacagctcgacaactatattgccaggttcgaaacgggataagtcgcaagacaagttaaatagaagaccaagaacaacattgaaagcaaaccaaggataatactgacagcgtgcgaaatgaactggagccttgaggtggatctagacttacaagcatactatctggggaattccagtcgaccaatggctattgcttacgaggccattaacttgggtgtagcaccttcaacccaccttcagtatatgtatagcaccaactactttggtaggcccacacttccgtggtaaactagacccttgtgcaaatagccaaagatagaattacccgggcgatagggatcccaccatagacaaagaacgctgtataactcctacgatgaacgatacatagagaacacgctgactggaaacaccactgactgttgcacgtggacaaaacgcattaggtacttgacaggcatggatacaaagtaaagcacaacgcatggcacacggggagcacaga

SEQ ID NO: 545743 - DNA, 369 bp, Homo sapiens
  misc_feature (152)..(152): n is a, c, g, or t
  misc_feature (180)..(180): n is a, c, g, or t
  misc_feature (193)..(193): n is a, c, g, or t
  misc_feature (291)..(291): n is a, c, g, or t
tgatgtatcgcccaacacacacactgaaaacaaaacactaacaacaacaaagtaaaaaacagctgtgtgtagtgatggaaagacttcctcttagcactgccattccctctgcttggaatgcatgtaaaaaacttttttatagcgggctaaanatcgtacactgagtaaccaattctcacngtccctagacccncattcttatgttccttcttcttcctgtattttctctccctatgtccatattctctttctgtccacgtattcctgtttgttcatacggcagttccactngtgagtcctgtactcatttctcattcattcatggctcactgtgtgtcatgttctattctaggtgtaggggataacata

SEQ ID NO: 545744 - DNA, 250 bp, Homo sapiens
cccctggtgggttttatcaacagcctcaagttttccagctttggggaatttctggtggttggggtagggcaggagcacaggcttggccgatggtggagaatcaaaaaggctgggaattttgtttgcatcatcccactccgcagggtccctgtacccccagttggtggttcctgacatttttatcctccttatttaagtccttcccagggtatgccccaccctttttgtattaaaagcctccttttttgga

SEQ ID NO: 545745 - DNA, 986 bp, Homo sapiens
tcgctctcctggttgacttatggtaatgccgtcactttaacctctggtccggagcatggtcacgctgttgccattgtgccgtacagtggagataagtggattcatgactgtgcagcaagaaatatgcgcattacactctcagtctgcttgcctagagctagcaatgtaatgatgttagcacattctatcctgatgatagcgactgatctttcctggggacgaagtcttctgtacttgatataattgactataaagagcatacactgaatctaactactagttcgtcgctcggtcgcttggataatctttggtcatttgcagcatacttgacaaacaccaatgcttactacgatgcgtagctgatagctaagggtgacaagtaatcgcgtcgcatgggaaagttgacattcatggcacacaaatttgttggttcagcaatggacaatattagtaattcgcctctttagcttgtggagagacatgtctctacaagaaaattttctgaagttcaaggatcctaaaggattcaaggttgatgccccctttttatggaggcccaaggacatgttgtgtaagcaagggtacacggtgaaattttccccaagaaaggtgtgccgtccttaatttaattattacgtgtctttcgcggtcgcaaagttacagtaggtcatgcccataaacagggtgggttaaaacttccacaatctctcctcttaggtgagacaggtgtatcctccaaatggtacaaagacacgttagaggtatcatacacgaacgggtgttccaggtcacaacatttcggttttgatcccccagtgacgttcccattgtaaaaggctagcccaacaacgtgcatattgcaacccttgtttggctaacggaaattgagcaatctcgatgtacattacttactggaaggcggatacacatgggttaccctcaaatggccttgagttcgttgcatggattgtgcaacttgtcgcgaa

SEQ ID NO: 545746 - DNA, 189 bp, Homo sapiens
gcacgagctcatttctactaaaaaaaaaaaaaaaaattggctggacatggtggcgcacgcttgtaatcaaagctaatcaaggctgaggtgagaggatcgcctgagcctgggaggttgcggctgcagtgagctgtgattgtgccactgcactccagcctgggcaacagaatgagaccctgtctcaaagtg

SEQ ID NO: 545747 - DNA, 407 bp, Homo sapiens
tcctgggtcacataatgccaagtgaggttaaaaagccagcaagtatggaagaaaaagactctttaccaaacaacaaggaaaaagactgcagtgaaaggcggacagtgagcagcaaggagaggccaaaagacgatatcaagctcactgccaagaaggaggtcagcaaggcccctgaagacaagaagaaggtcagcaaggcccctgaagacaagaagaagagactggaagatgataagagaaaaaaggaagacaaggaacgcaagaaaaaagacgaagaaaaggtgaaggcagaggaagaatcaaagaaaaaagaagaggaagaaaaaaagaaacatcaagaggaagagagaaagaagcaagaagagcaggccaaacgtcagcaagaagaagaagcagctgctcagatg

SEQ ID NO: 545748 - DNA, 916 bp, Homo sapiens
  misc_feature (916)..(916): n is a, c, g, or t
ggtggtgcttacggagaaaatccatgcagcagtgaaccttgtggcttctcttcaaatgggctaattgagagcgtgagtaagaggagaatcagctttcaggggcattcctaatgggcagtggatgacccagtctatttacagaccaaattccttcctttagtaatcattgtggaaaaaagaacaggaagaagaaagccatgttaagaatggtgcttctcaagtctgtaaaatgctgcagttttaatgcagttgtcaacaagtagaacctcagttggctacctgaagtgttgatagtatttactctagtggtgtaattgtaatgtagaacagtgtgtgttggtagtgtgaaccgtatgaacctaagtagttgtgaagaaaaagtagggttttgtaatactagctttgtattgacataattatcattccaggtttaatatactatatttccatttatgaagaacattgatttcttttgggagtcacttttaatctggaatttaaaaatacaagtctggagtatctatagtagatcttaatgggaataacctagatattcaattatcctttatacttagaagggatgcaataattacactgttaaggaggaaggtggtggttttggatatcaagtaaagctacagtgggcgttaatgtggaagtgagtggacaaaggttaactcaggtcctggcgtatcgaagtaagactcttggtaaccatggggttggagtggcagagacaatggctacagaagagcaggttgataggcaggtgtgtgacctagcaaacatgggagggacagaggcgaatttgcatgtttcgatgatatagaggatctcaataaagcactagagaggagacagtatcagtttctttctttctcttctctctcttctttctcgagaagagacagaaagn

SEQ ID NO: 545749 - DNA, 475 bp, Homo sapiens
atattcccggattcccgttgggtcttccgggtaggacgctgtagagtcaattgtgctgacaacacaggagccagaagagacctggtatatcatctccgtggaaggggatcaaggtgacggctagagacagacttcccgctgctggtgtagggtgacatggtgatggtccgacagttcgagaaaggtcgaaaccagagctcagagaaaaaggtacattccagctagtgcgtcattcggatcgagactgatacgtcagtaccggtatgaaaacgatggctgtgttacgttagatttattgagagataatgctaggaggtcatacgatgtagaccaattaaatagggcagacgcatgaagaaggtgtcttagccgaatttagcagtgacgcagggtaggccaagagcgaggtgtaggcaggaacttgctcgggcccccggcatttggcgatcccaactggcgtggggcagcagtagca

SEQ ID NO: 545750 - DNA, 303 bp, Homo sapiens
ctcaggatcccccgccattacaactatctcatactgtttagatgaaatagtcctagggcagacagttgtggatggcatctgggaagtctgaaactcctatctgtgtatatatcccatttgctaaagactttctaaccaaagtcttaaaagggtccatgactccccaaccacacatacatacaggaaattaaggatcattgatttttcacccaagtgctattattttacatactagaaatttgggcttcagagggattagttaaaaattggaaggttgcgtagcttttatttattgttagaaac

SEQ ID NO: 545751 - DNA, 106 bp, Homo sapiens
ttttagaggatcccacagaggaggtggacagcacggggggtgtttccctgcctgtggcatttgtgtgttggctttgagctgctgtctgagtagtggcactggggtg

SEQ ID NO: 545752 - DNA, 1039 bp, Homo sapiens
ttctctgctagggatcgttagtgtgagcactcaaacattagatatcccgaggtctcctatggtgggtggcaggatttaaaattcaatcaaatcctgtcctagtgttgtgcagtgtcttcgggcctgtggacacaggtgaatgagggaccagccctgccctgggctgtgagaagagatcagtacacccagagttagacatgtttagtagaaaaccggcatcattatgtctacgggtttcgtgtccattatttcatttccttacaggataaacagcctttattacagaaacaaaatggaacctttcatatacaaccttagtctttaaaggctgtgtggtccgtatcatgaatgcccatccagaggcaggattcgggcacatacctgtactacctgctccagagtgtgcgctccccacatcccctgagtaacccctctctggactgctgcctcagacacactgacggttccgtgtgagaaggttgacctccccctctgtgggggcacccagtctagggggaggtaccgctgccattttccctatgcaaaactcttaccgttgccctcatctcccgaaaccttgcagtaccctgacatggcctacatctgcacttaattttcttgccagcgcaagagacaccggaacacagccatgggccacatggtcacgggggggcctgcgtgcaccagaaagtgacaatgacatcagaacggcccgatctgagttgttccaaaagggcaacataacagtatctttatactggtcaaccggcctttggggaccggtcacaggaccgatgtgggcgcagaaaatcctggcacgggaaaagcatcatgttactgttgtcaaccgtaagcgcctggtaaattctcacccagtaagataagaccagcaaacataactgcttacgttcagacaacgacagcatcaacgacacagagcctcactgttatgtacccacatcgcgccgcatgatgagatgatatgacaagcacaaatgacaagtcgtcccgcatactatacagtagcacactaagtaaa

SEQ ID NO: 545753 - DNA, 500 bp, Homo sapiens
acgagcttgaactcctgacctcaggtcatctgcctgtcttggccttccacagtgctagatttacaggcctgagccactgcccctagccctcttctttttttttaattaaaaaaaaaattttttttttgtttgagacagagtctcactgtcacacaggctggagtgcagtggcacaatctcggttcactgcaacctctgccttccaggttcaagtgattcttgtgcctcagcctcccaagttgctgggattataggcacccaccatcacgcctggctaacttttgtatttttaacagagatgaggtttcaccatgttgaccaagctggtctcaaacttctgacctcaggtgatctgcctgcctcagcgtccccaagtgctgggattataggctgagccaccatgcccagccaaccttcttctatttaaaaactcttttaaacaaaggcaaaaatacatagcaaccaaagccaaaccaataaaccaaaatagctgtcttaaa

SEQ ID NO: 545754 - DNA, 254 bp, Homo sapiens
acttctagtggctgcaccacctcctcctcctcttgccagatgtgggctccagacgagctctctccgtagctgccattccgtgagtggttatagatcgtggtgtccctctcagctgctgcagtggctagcggcattcatggcaaagtgtcggatggtgctctcctccaggtactactgctcccaatttgtcatgtcggcatgtattagctctagaattaccacagttctccaagtaagagggtgccgatcaatag

SEQ ID NO: 545755 - DNA, 444 bp, Homo sapiens
gcacgatggtacctggtataaaataggcacgtaggccaggcgtggtggctcacgcctgtaatcccagcaccttgggaggccgaggagggtggatcacgaggtcaggagatcgagaccatggtgaaaccccgtctctaccaaaaatacaaaaaattagccgggcgcagtggtgggcgcatgcaatcccagctactcgggaggccgaggcaggagaattgctggaacccgggaggcggaggttgcagtgagcagtcagggtgacggagactccgtctaaaaaaaaaagaagaagaaatgcagagcctcaggcctcgccccagacctagtgaaccagcatcacaagtcacaagactcccaggtgatttgtacgcacattaaagtttgcatggggagactggctggtgagtactttaacaatcttcgtaaagcacactgtttcagtta

SEQ ID NO: 545756 - DNA, 191 bp, Homo sapiens
gagctgcgcgcgcaaggtatgagcatcgatgcagccatcaccgaactgctgaggcgccgggggcacaccgtatgaaagcgatcagcctcatccctgcccttgtgcagtcgctgctcaccctgatcgtggtctctgccgccttgctgctctatgaccgtactgtggtgcgcccagcgctacgcatcggcatg

SEQ ID NO: 545757 - DNA, 216 bp, Homo sapiens
tgtccaattgtgcagtcccattctttgtgattaaaatactagcagtcctcgaaatcctctctggatagatgcactgtgcgacagacgctattgcgatacttgagtcacaattttcctgagctgtgtcctccagctatgtgtgaataaagctgtagctcgataatgctaagggcaagaccaaaataataaggctaatgaaatatcattcagcaacag

SEQ ID NO: 545758 - DNA, 103 bp, Homo sapiens
cttttttgaaaaagaaagaaaaaaaaaactttgtgtatgtgactccaagcatgtaaccttaagatggtgcattttaaactggcaataaaggcctttcccaaat

SEQ ID NO: 545759 - DNA, 539 bp, Homo sapiens
actaaaccggtctaccgaacggacaagtgaagaccgtgtctgtactttacattacatgaactatgataatttagaaacatatataagtctccacacttccttattttcacaaaaatgccatagagagacaaattgaaacataacaaactagatatcttctctcatcccatgagccagccatggcaaaccagcagcagcagctcaattcagtcagccagaggaacaggtgaattctcatccacttctcatctcatgccctacaagcagagttttttcagcagcttgaagcacagcactgttgcactcatttattttccacacataaagcacattctccttgtgcactcaaactcacaatgtttaaaatcaggaaattagcattcaatgtatcattataatctaatccttcagcccctattcaagcattagcacttgtctcacatagtgtcttatataacaaaaagttccaagtctcacacacatcaacaccatggtcattaaacatgctcaggtcagtaaaagtaacctttcaatctgaa

SEQ ID NO: 545760 - DNA, 220 bp, Homo sapiens
cactgtgacacggaagaagggggtgaaataggaccatttacaaccacagaaaaagctctgtacatgtctagcgcctggcagaggggggcagcagggcagcagggggctgaagccggccctatttgtagaggatatcgtagtgtccaggccggtaggagaaggtagaccttggggctcggagccctcagggaatgatgtgcggcttggtggtgccgccctc

SEQ ID NO: 545761 - DNA, 1039 bp, Homo sapiens
  misc_feature (621)..(621): n is a, c, g, or t
ctgggacccgggccacagggtcagacacaagggccggcccggggaacactcaactgccaggtccagttaccagcagggtccccagggccccgggcaagcgcatgctggggtccgccatctcgaggcaagcatcgttccagggcatcgtcctggggggctaggcatcaagggctatggacagaatgcctgtgcaatcccagagaccccgtcgtgatcgttacctggtggaatgttgcccccgctgcgtttgccttccggccgtggaccctgagagtcatgggctctgccccgcccggtcccttgctccccagctcagttctggatttggggctgcccgtaacgcagcccgttagctgcttgtgcaccgtttcctgtccattgggcatcccccagtagtcaccccactccaccgaaaagtaaactgcaggtgaggccgtgccccgagtctttctctcggtgtgatttggcttatccggggcgcttgccttgccatgattctaactctctgcccattcgcgcgcaaggcacgtgggccgtggcccggctgggtcggctgaagaacttgcggatggaagctgcggtaagaggccctgatggggcccaccatcccggacccaagtnttcttcctggcgggcctctcgtctccttcctggtttgggcggaagcatcacctggatgcctacgtgggaagggacctcgaatgtgggaccccagcccctctccagctcgaaatccctcacacagccacggggacaccagtgcacctattacccagcgggaacaggatggagcacagagactcttggacacggggccgtcccccttgagtagagacccgccactcatgactgatagtacgccgctgactctggggtcagatcccgtgggctaggactcctgcccaccactcgcaggaaaccatgaggcataggggagactgttgagccttcagtgtactgcatgtgggaagtgggctccatgcacatacctcacagggctgttgtgacgggcgctataacgccgtggcaaagacagggt

SEQ ID NO: 545762 - DNA, 295 bp, Homo sapiens
gctcagtttggttgggttatttccgtattaacgctagttacgtgctaacaggctcaatattcctagaatgataatatcagactagctgacaagctccttgtttcttgtgatgtcttctcgtttcggagatgggccttttggtaggttccgtgtatccatgaataagttctgtcatgattcactattctataacttgcatgacctttactgtgttagctcttttactgttcttaatatttaagactttctttgttaacgacttatatgtccttatcattgtattaaagctgttgta

SEQ ID NO: 545763 - DNA, 550 bp, Homo sapiens
gaggaaaagatgacttcattctcgcggagaaagaaacaaccagcgtgcctatgcgtataaatcatctctctacagctacaaggaatagcatcccccatggagtagatcttcagtaagcgtctcatcgggtacagattgactatcagaccacggggattctgaagaagaaatcagaatgcggggctgagaatagttaaagggcttggagccagaaaactgtgccatgcataactccatcattctggttactgaccctcaggctttcacgaatacccactgtgctgcgctcgtcttcatcatcatagcctattagaagcaatggacgagaagcaatcgtgaaggaatcagtagtgaatacatgcatgatcccgtgtcgtagtctcatgcggtggcatgcttggtgcctgatccctgtccacagtggtgagggggctcggcacccctggctatctctcgggacctccctctaggtcctcctggtctgggctttgtggctctctgtttgcttttgggcagtatggctgtcctgtgatttcaggggcaggcgtgg

SEQ ID NO: 545764 - DNA, 639 bp, Homo sapiens
  misc_feature (525)..(525): n is a, c, g, or t
  misc_feature (561)..(561): n is a, c, g, or t
agactacaaggtttacagaaccctttaggatactgacatcatgtgactgacaccctagcttgagtactggagcgctcttgactcaccgaacagcctccacctcctcctgtcagcagttgcagtccaggtcatagaggtattcaagacagactcaactcatccacccaaggtcacacttgaggtgaccaaggtgaactatcgatgagccagtgaatgagacagatgtcattctgctggagcagaatgcaccatgctgtggccactgtgccagcctatacaacgtgtatgagaaggacgtcaaggagctaatcttgcgtgctacgtctattgcccgtacaacggattacgccgacgcggacacagtcctgcccaagtgtctagctgcctctaactatgccacgctggacatgatccgcgagggcatgccttatcagtactacgatccatgtgagactgtcactcataagcaggtacaggactactacgaggatgagcacgactgcagtcttatctgcagctcacggntgtgaaggacctctccgctctgcaagcatgcagctncgacctgtcctacagtacgtaattcaacgcactcttgcactgatgtgacatcgttatagacgtctgcgatcacggttt

SEQ ID NO: 545765 - DNA, 174 bp, Homo sapiens
acatcagcttaaggatgtggacaccagctggactgtcctggcaagctctgggttcaaggagcagctaggcagaactccagccttgaatgttcttccctgacttggaggatgggacagaagatactggacaaactagtacggccagcatgcaccagcatgtggaggcatgtgcag

SEQ ID NO: 545766 - DNA, 106 bp, Homo sapiens
ggtcgcagtcgagctcgaaacatccaaatatcttcaagttcacgctattttcagctccaaagaatttatgtgctattcctacaacttccttctcgatgttttcttg

SEQ ID NO: 545767 - DNA, 1354 bp, Homo sapiens
gtgatcccacatcctacagtcccgggaacccttcccaacttgccagctgaagtctgatgctggacatgctggttggcaatgtgccgtggaagaacccttggcacacgcgtgactatgtccatgccccaaactccacagtgcatacatggatacacctgcttggagcgacagctagcgattggccacggcacacggacctccgacaagaccacggacgacacagcgttgacagcattgaatcctcaggtggtcaattgaaaacctttgaactggcccgttcggcgcactgggccttgccaggctcacgcggaaaattcttggactccccacacgaagccaagctgcgtgcaaccaacaatacaaacatgtcgcatgcccactactcacacagtggtgtatgcctgcgaacaggagacgatattcgagttgttgaccgacattagagctgatgtacatgagcatagcgctacctatggcggcactgcttgaaagggcacactgtaccaacactggcacccaatgtaacaatttgccgtaggagtggcggtatcaaccaattaggcagcacaggaccaaccacaccttgggcgccgaacgaatagcaccgacgagaacaaacaggttagccaacctggtacttcggacaatgggcggggtaggacccggcgacacacgattccaaataaacggttacaaacatggacccctaccagacaaacacaccccttggacaatgaagcaggcacacctttgcctgtagcaccagaccaacgacctgggggttggcacgacacaacgcctactttaccacttggttgtttgaacggccaacccggaacgcggagccttttgccgacaggtgaaaaaaaggccccttttcccagggcccagatttgcaccaagggtaagacccctggacaggccccacaaggtacacccccacggaccactacaggggaagccccccaatttcccacaacgtttgagaacccaactgcacctcgctcaatggctactttggttcacaggcattacccccttgggtatttggcacgcactagaacagacggccctacattacgaaggaaattcacgtatagcgcagatccggcccagccagcaaaacacatacaatatgttctacaccggaaacgtagtactggccatcttgtggattcccattgacaactgccccccacgttggatttgcaacccacaaaattggatactaccccgtgcgtaggatatttgagaccacctcccgtggccctctacggggcacaaccagaatactcaagtagtgcgtaacagaggatagtaaagcgccccacaaagcagagcgaagcgctgtagg

SEQ ID NO: 545768 - DNA, 790 bp, Homo sapiens
accatgtgtgaattcaaaataatcaacttgggtttattataaaaaacaaaatatattaatataatgtatactaagatttttctatgcaacacttggccaggctgcggtggctcacgcctgtaatcccagcacttttgggagaccgatggagggcggatcacagggtcaggagatcgagaccatcctggctaacacggtgaaaccccatctgtactaaaaatacaaaaaattagccgggcgcggtggcgggctgcctgtagtcccagctactcgggaggctgaggcgggagaatggcgtgaacccgggaggcggagcttgcagagagcccagatcgcgccactgacacatctgactgggctgacagagtgagaccctgtctcaaaaaacaacaaacaaatcacacctaagaagaatatatgtgacctatgggcacagggcgcggtggctcacgcactgtacatcccagccctcttgggaggccgaggaggctggatcacagaaggtcacggacatagagacacaatccatggctaaacatgcgtgaaacccaaggcactacctaaaaaatacaaaaataaaacacataccaaaatgcgacgaggatgaccaccgcaagaccagcaaatcaagaaggacgaacccacgaccacaggccgcgacccccgaaaagccgcacgacggcagagaaccagcaacgccccctgcaatccaaccgggccaccccagtgcagaacccacacacacaaaacaacaaaaaaacacaccaacgcacagaaaacaaacgagcga

SEQ ID NO: 545769 - DNA, 82 bp, Homo sapiens
gacagcagcttctacatctgcagtgctaggactagcgggatagatacgcagtattttggcccaggcacccggctgacagtgc

SEQ ID NO: 545770 - DNA, 133 bp, Homo sapiens
  misc_feature (107)..(107): n is a, c, g, or t
  misc_feature (116)..(116): n is a, c, g, or t
atgatacgatcgagtcggtaccagcggaacagcactgaaattagagatgtgtgcagcatgcctggttaattttttttacttttggtggagacagggctctctctatngttgcccanggctcatcttgaactct

SEQ ID NO: 545771 - DNA, 324 bp, Homo sapiens
catgtctacacatattcacagcagcattattcgcaataaccaaaaggtagaagcaacccaagtgtccatcagtgggtaaatggacacaggaaatatgtttggtccgtacagtggactgttatacagccttcaaaaggaaggacattctgtcctatgctacaacatgggtgaacctaaaggacattgtgctacgtgaaagaagcctgtcacaaaaggacaaatactgtctgattccatatatatgaggtacccagagcagtcaaattcatagagacagaaaatagaatggtgattatcagtggtgtaataagtgtagaaatggaa

SEQ ID NO: 545772 - DNA, 768 bp, Homo sapiens
catctccatgacattactcatgaccttggaaagtaaaataggaacctatgaaactatagatatgtgaattagatagggttatatcaagctgtttgggtcacattcactatgccgagacaagtaaaagtggactctcagcgtaggactaggcagcgccctggttaagagtagatctggttgtgattcatcatgggaagggtaatacttgacaagcatatgctgtctgctttctgtgctctccaagtactaggttaaggctccaacatgaaggcatgtcaaggagagtgtaaggatgaggttgcgtcaaatatccagatctatatgtcgggtaagaaacatgaatcttagtctttgtatttagcataggagcctgtcttgactgggtagaatacaataattctatatacatttgcaagtccatgttaggtgtgtggtagggaacaaatcgatttattttatatacaaaaacaatcactttagtatgaagccatcaatgtgtccctagatttctcagggttacgagaaactgagttcatgatgatgacttacatgccttcaataatagagagacattggggttgaattgcagcctttggtatgggtgaggtcaagtgaaatatgatagtgcattagacaataaaatatctatgtctatatcatcgatcaattgttaagacgtctaacgtaagttgtactcgaaccactgttgttatggattgagatcctgtgagttgtttaaggggaaaaggcagaagggattggaaaatc

SEQ ID NO: 545773 - DNA, 93 bp, Homo sapiens
ccctcccacacagctcaaatggaaggaaactgattaacacatagaaattgtaggttgtaatcttgtgccaaccaataaaaaccagtatttcac

SEQ ID NO: 545774 - DNA, 406 bp, Homo sapiens
acaaaaccaacaggagagagagagacagaaatagagagagaaagggagagatttattatgaagaactaggtcatgtcattacaggggctgggaagttccacagtccaccatcggccagctagagacccaggattacctgttgtgtagctccagtctgagctagaggcctgaaaccggcagaattgatggtgcctcagtggcttcgaggaggcccacccactctggggagggacaactgccttgctcagtctacagattcacgtgttaatctcatccagaaagaccctcacagacacacctagaataacgtttgacctaacatctgggcacctaatggctcagtcaagttgacacttaaaattaaccatcacagacaataaaagagcctttttaaacatcaaaaaaa

SEQ ID NO: 545775 - DNA, 409 bp, Homo sapiens
actagctattaagccatggataaacatggaagaaactgaaagtgcatattactaagtaaaataagagaaccttaataggctacatactgtataattctagctatatgacattctggaaaaggaaaaactaaagagacaataaaataatcagtggttgacaaggattgagaaagggagggatgaatagaagcacagaagatttgtagggcagtctattctgtacaacactacaatggtagatacatgtcattatacatttgttcaaacccatagattacagagtaccaagagtggaccttaatgtgtagtatgaaccttgggtgataatgatgtgtcaatacaggcttataaattgtaattgtacctctcttgtgggggatattaatgggaggctttgcagtgtgtgggc

SEQ ID NO: 545776 - DNA, 159 bp, Homo sapiens
actgttccgtgcttgacacaccgtgctctgcgtctgcatacatcccgtgccccatacctgcccgtgcacgtgccgtgcacacctgcctgcgcacccacacacctacctgcacacctcctccgtgcccacacacctgcctgtgtgcccagcacacttacc

SEQ ID NO: 545777 - DNA, 240 bp, Homo sapiens
  misc_feature (179)..(179): n is a, c, g, or t
actgataccaatggcgtctaatttcatcaataatactacgatgtgacggtgcactgttcttcagcaagctcggaacaattcccgttacagagtttgggcccatctacctagagtactttctgaataacgttcatgacgccaaccacgtctcaatcaatagtggtctgagtggtttgggntcactacgcattcgtgctagggctaccgaagcctcggagattctgtacatccatggctcga

SEQ ID NO: 545778 - DNA, 1560 bp, Homo sapiens
atcacagtagcttgattctttcagccctcatcctctcacttgatcagttgttcaacagaatcagctgacataattgacacagtttattgggtgttaagtccgctctatagggatagtgactactttttttttttttttgctcttcttcctctcccctttctttatatgggtttaaatttaacataaagttgtttttataaggcttatttgtggctttaacttgtaagtctgattacatcattattgttccaaattcattatctctgtaggaacttttagttccattatatgaacactggataacctaattttttttaatgctttaaaaaaatggcaaaaagacgtcaggccaccctcatagtaagtggtgtagtattaaaatattttcacggaattaaaagtagcttgctgtcaaagaaacacctgagatgaattggtgtgaacgaattttgcaagtttaatttgatttatttcagagaaaatagaaaaaacaatgttagaaggttatttaaaatgatacttaaataaagaaagtgtgaggtctactttaaaaaaattcaaatgaagagaaaaagaaaaacagcattctagaaatggcatttctcctaattaattttccacttaatggaagattatcaattgtcctattttatgatcccaggactgaagacagttgtgggatatctgtcatatttatcctgtgagtcattgtgaataatgacatacagtactgaagtaatctgattttattctttggaaattcaatgcattggtcacactaataacatcaacatctgctatcacttatctttttaaaactaaccaaaaaagtgctgggattacaggcatgagccactgcacccaactcctctttcgtctttctttaacacacactaggctctttgtgtattatgattcagtgctatttgtaactgtgtcccagtgaccaaattgcactcgactcgatcagctgttcatccatttcgtgttttttcctgtcaaacattaatccagcaaatatatgaggtatttaccaatttattttcttagtattacaaaataattcattagcataaagtacaatagtgaaatatttgagttgttcggaacctcaattaatcctgttttacatttcagacctaaagctggcaatcaggagaagaagcactttgttttaaatgtggagaagataacacttgattccatttcattgtcattagtgtattaaccagcaggagaggtgatgagccatttttcaaatgaaataccttttatttccatataatttttttattttagagttcaatagctgtttctatgattatcctcaatttccatatgttactgaatctgaaaaacatctttaaaattcaaacagttccattttctctcttgtaagtgttaaatgtgataaaagtacatattttaaattgttttcagctcttggatatagcagcaataaaaacactaatttgtgggtatttaagaaaacctggagaataaactcatactttaaaagatcacaacacacaccacacccacacacacacataccacccg

SEQ ID NO: 545779 - DNA, 259 bp, Homo sapiens
ataagtagaactaagattctatcttggacaaccagctatcaccaggctcgtgtcggtttgtcgcctctacctattaatcttcccagctattttgctacatacaacggtgtgctcatttagctgttcttaggtagctcgtctggttacgggggtcttagcttttgctctccttgcaaagttatttctagttacattccttatgccgaaggtatcaggggttcagtcctatgctcatataatgctacgttgtcatttctca

SEQ ID NO: 545780 - DNA, 1600 bp, Homo sapiens
atcacagtagcttgattctttcagccctcatcctctcacttgatcagttgttcaacagaatcagctgacataattgacacagtttattgggtgttaagtccgctctatagggatagtgactactttttttttttttttgctcttcttcctctcccctttctttatatgggtttaaatttaacataaagttgtttttataaggcttatttgtggctttaacttgtaagtctgattacatcattattgttccaaattcattatctctgtaggaacttttagttccattatatgaacactggataacctaattttttttaatgctttaaaaaaatggcaaaaagacgtcaggccaccctcatagtaagtggtgtagtattaaaatattttcacggaattaaaagtagcttgctgtcaaagaaacacctgagatgaattggtgtgaacgaattttgcaagtttaatttgatttatttcagagaaaatagaaaaaacaatgttagaaggttatttaaaatgatacttaaataaagaaagtgtgaggtctactttaaaaaaattcaaatgaagagaaaaagaaaaacagcattctagaaatggcatttctcctaattaattttccacttaatggaagattatcaattgtcctattttatgatcccaggactgaagacagttgtgggatatctgtcatatttatcctgtgagtcattgtgaataatgacatacagtactgaagtaatctgattttattctttggaaattcaatgcattggtcacactaataacatcaacatctgctatcacttatctttttaaaactaaccaaaaaaggccgggtgcagtggatcccacccgccttggtcgcccagagtgctgggattacaggcatgagccactgcacccaactcctctttcgtctttctttaacacacactaggctctttgtgtattatgattcagtgctatttgtaactgtgtcccagtgaccaaattgcactcgactcgatcagctgttcatccatttcgtgttttttcctgtcaaacattaatccagcaaatatatgaggtatttaccaatttattttcttagtattacaaaataattcattagcataaagtacaatagtgaaatatttgagttgttcggaacctcaattaatcctgttttacatttcagacctaaagctggcaatcaggagaagaagcactttgttttaaatgtggagaagataacacttgattccatttcattgtcattagtgtattaaccagcaggagaggtgatgagccatttttcaaatgaaataccttttatttccatataatttttttattttagagttcaatagctgtttctatgattatcctcaatttccatatgttactgaatctgaaaaacatctttaaaattcaaacagttccattttctctcttgtaagtgttaaatgtgataaaagtacatattttaaattgttttcagctcttggatatagcagcaataaaaacactaatttgtgggtatttaagaaaacctggagaataaactcatactttaaaagatcacaacacacaccacacccacacacacacataccacccg

SEQ ID NO: 545781 - DNA, 190 bp, Homo sapiens
cccccacccccgttggtgtaagacggagagtataccttgtctctgcgacgtctacgaggtggacttctacttcggccattcaatagatatctcttagcacctgcccgatgctgcctctgtgctgggcaggggaaaagaggggttgagcagggaatgcctaggcctcactttagcttgtctagagagggag

SEQ ID NO: 545782 - DNA, 1515 bp, Homo sapiens
atcacagtagcttgattctttcagccctcatcctctcacttgatcagttgttcaacagaatcagctgacataattgacacagtttattgggtgttaagtccgctctatagggatagtgactactttttttttttttttgctcttcttcctctcccctttctttatatgggtttaaatttaacataaagttgtttttataaggcttatttgtggctttaacttgtaagtctgattacatcattattgttccaaattcattatctctgtaggaacttttagttccattatatgaacactggataacctaattttttttaatgctttaaaaaaatggcaaaaagacgtcaggccaccctcatagtaagtggtgtagtattaaaatattttcacggaattaaaagtagcttgctgtcaaagaaacacctgagatgaattggtgtgaacgaattttgcaagtttaatttgatttatttcagagaaaatagaaaaaacaatgttagaaggttatttaaaatgatacttaaataaagaaagtgtgaggtctactttaaaaaaattcaaatgaagagaaaaagaaaaacagcattctagaaatggcatttctcctaattaattttccacttaatggaagattatcaattgtcctattttatgatcccaggactgaagacagttgtgggatatctgtcatatttatcctgtgagtcattgtgaataatgacatacagtactgaagtaatctgattttattctttggaaattcaatgcattggtcacactaataacatcaacatctgctatcacttatctttttaaaactaaccaaaaaagtgctgggattacaggcatgagccactgcacccaactcctctttcgtctttctttaacacacactaggctctttgtgtattatgattcagtgctatttgtaactgtgtcccagtgaccaaattgcactcgactcgatcagctgttcatccatttcgtgttttttcctgtcaaacattaatccagcaaatatatgaggtatttaccaatttattttcttagtattacaaaataattcattagcataaagtacaatagtgaaatatttgagttgttcggaacctcaattaatcctgttttacatttcagacctaaagctggcaatcaggagaagaagcactttgttttaaatgtggagaagataacacttgattccatttcattgtcattagtgtattaaccagcaggagaggtgatgagccatttttcaaatgaaataccttttatttccatataatttttttattttagagttcaatagctgtttctatgattatcctcaatttccatatgttactgaatctgaaaaacatctttaaaattcaaacagttccattttctctcttgtaagtgttaaatgtgataaaagtacatattttaaattgttttcagctcttggatatagcagcaataaaaacactaatttgtgggtatttaagaaaacctggagaataaactcatacttta

SEQ ID NO: 545783 - DNA, 842 bp, Homo sapiens
gagatcgcaccactgtactccagcgtggcgacagcgagactccgtctcaacaaaaaaaaaaaagaaaaatcacaaaagaaaacactaggaaaatatattcaattaaatggcaaattaaggatcgaaattggtggcttcaaaaatatcttggcaatggacttctggaccaccaattacccaaagttggggccaaacttcacagatttaaagggcatcattctccacgagattggcccacaggttcaaaccaccagctccagggctcagggggtctccagggccacccttgtcatctggaccaattggcctacaatttcaagggattcccattatccgtggtacatggggtaatttactagaacaagtcacggaagtcaggactgataacagatttattaaccagcaatgtggttagcaattcgaatttaatggcgtatcgggaatggtaaagttacggttaacccaaaaatgtgcatagggtgaggcccgggaagggtcccaaatgcagtcttggtatggtccccagcccatgtgtgtagcaaatatgcagagtattggcaaccagagaagtcttacctgagccttactatccagatccttggtagggggttccataacatggggtatgtcggactggaatcagtgaccattgatggtcaaatcaatttcgagcctcctttggtatcccaaaagggccagggccggataaccacaggcccaaaacgtttataatcaccatgatggggacatacaggggagtggccaagctggcatctgggagctcaatctccttaaggttaagagtatctaaggggccacgtgggcattcgcaaaacacatca

SEQ ID NO: 545784 - DNA, 199 bp, Homo sapiens
aactcacgtgagtctgtctgatgcatcaagagtctcgacactaattcacatcatcgcgcagtaggcatcggcatacgtcggtcatgatatatggcatgatctcagtatgatctcgtgctgtctatccgcagaccgcgagatggtctagagtcagcttacatccctcagcaggaaagtttacccatgaggattggtggga

SEQ ID NO: 545785 - DNA, 934 bp, Homo sapiens
atcacagtagcttgattctttcagccctcatcctctcacttgatcagttgttcaacagaatcagctgacataattgacacagtttattgggtgttaagtccgctctatagggatagtgactactttttttttttttttgctcttcttcctctcccctttctttatatgggtttaaatttaacataaagttgtttttataaggcttatttgtggctttaacttgtaagtctgattacatcattattgttccaaattcattatctctgtaggaacttttagttccattatatgaacactggataacctaattttttttaatgctttaaaaaaatggcaaaaagacgtcaggccaccctcatagtaagtggtgtagtattaaaatattttcacggaattaaaagtagcttgctgtcaaagaaacacctgagatgaattggtgtgaacgaattttgcaagtttaatttgatttatttcagagaaaatagaaaaaacaatgttagaaggttatttaaaatgatacttaaataaagaaagtgtgaggtctactttaaaaaaattcaaatgaagagaaaaagaaaaacagcattctagaaatggcatttctcctaattaattttccacttaatggaagattatcaattgtcctattttatgatcccaggactgaagacagttgtgggatatctgtcatatttatcctgtgagtcattgtgaataatgacatacagtactgaagtaatctgattttattctttggaaattcaatgcattggtcacactaataacatcaacatctgctatcacttatctttttaaaactaaccaaaaaaggccgggtgcagtggatcccagcactttgggaggccaaggcgggtggatcatctaaggtcaggatttcgagactagcctggccacatggcaaaccctgtctcta

SEQ ID NO: 545786 - DNA, 193 bp, Homo sapiens
aacgtagtatggtgatgagtggcatggagaatgtgttaaaatcatataattacacctgcaactgtgatgtggggtactatgcggcccagctgtcagctcgtgattcagtgtgagccttcgcacggccccaccagctggtgtaccataggactgtacatcactacttcgcggaaaccttcagccttcagactca

SEQ ID NO: 545787 - DNA, 247 bp, Homo sapiens
atcaattactaccgtataggccaacataattacccccatactccttatcactattcctcataacccaactaacaatattaaccacaaactacgcggctacctccctcaccaaagcccataaaaaataaaaaaattataacaaaccctgagaaccaaaatagaacgaaaatctgttcgcttacattcatttgcccccacaatacctaggactaacccgacgaacgtactgatcattcctatggttgta

SEQ ID NO: 545788 - DNA, 1661 bp, Homo sapiens
atcacagtagcttgattctttcagccctcatcctctcacttgatcagttgttcaacagaatcagctgacataattgacacagtttattgggtgttaagtccgctctatagggatagtgactactttttttttttttttgctcttcttcctctcccctttctttatatgggtttaaatttaacataaagttgtttttataaggcttatttgtggctttaacttgtaagtctgattacatcattattgttccaaattcattatctctgtaggaacttttagttccattatatgaacactggataacctaattttttttaatgctttaaaaaaatggcaaaaagacgtcaggccaccctcatagtaagtggtgtagtattaaaatattttcacggaattaaaagtagcttgctgtcaaagaaacacctgagatgaattggtgtgaacgaattttgcaagtttaatttgatttatttcagagaaaatagaaaaaacaatgttagaaggttatttaaaatgatacttaaataaagaaagtgtgaggtctactttaaaaaaattcaaatgaagagaaaaagaaaaacagcattctagaaatggcatttctcctaattaattttccacttaatggaagattatcaattgtcctattttatgatcccaggactgaagacagttgtgggatatctgtcatatttatcctgtgagtcattgtgaataatgacatacagtactgaagtaatctgattttattctttggaaattcaatgcattggtcacactaataacatcaacatctgctatcacttatctttttaaaactaaccaaaaaaggccgggtgcagtggatcccagcactttgggaggccaaggcgggtggatcatctggtctcgaactcctgacctcgggtgatccacccgccttggtgccaaagtgctgggattacaggcatgagccactgcacccaactcctctttcgtctttctttaacacacactaggctctttgtgtattatgattcagtgctatttgtaactgtgtcccagtgaccaaattgcactcgactcgatcagctgttcatccatttcgtgttttttcctgtcaaacattaatccagcaaatatatgaggtatttaccaatttattttcttagtattacaaaataattcattagcataaagtacaatagtgaaatatttgagttgttcggaacctcaattaatcctgttttacatttcagacctaaagctggcaatcaggagaagaagcactttgttttaaatgtggagaagataacacttgattccatttcattgtcattagtgtattaaccagcaggagaggtgatgagccatttttcaaatgaaataccttttatttccatataatttttttattttagagttcaatagctgtttctatgattatcctcaatttccatatgttactgaatctgaaaaacatctttaaaattcaaacagttccattttctctcttgtaagtgttaaatgtgataaaagtacatattttaaattgttttcagctcttggatatagcagcaataaaaacactaatttgtgggtatttaagaaaacctggagaataaactcatactttaaaagatcacaacacacaccacacccacacacacacataccacccg

SEQ ID NO: 545789 - DNA, 1610 bp, Homo sapiens
atcacagtagcttgattctttcagccctcatcctctcacttgatcagttgttcaacagaatcagctgacataattgacacagtttattgggtgttaagtccgctctatagggatagtgactactttttttttttttttgctcttcttcctctcccctttctttatatgggtttaaatttaacataaagttgtttttataaggcttatttgtggctttaacttgtaagtctgattacatcattattgttccaaattcattatctctgtaggaacttttagttccattatatgaacactggataacctaattttttttaatgctttaaaaaaatggcaaaaagacgtcaggccaccctcatagtaagtggtgtagtattaaaatattttcacggaattaaaagtagcttgctgtcaaagaaacacctgagatgaattggtgtgaacgaattttgcaagtttaatttgatttatttcagagaaaatagaaaaaacaatgttagaaggttatttaaaatgatacttaaataaagaaagtgtgaggtctactttaaaaaaattcaaatgaagagaaaaagaaaaacagcattctagaaatggcatttctcctaattaattttccacttaatggaagattatcaattgtcctattttatgatcccaggactgaagacagttgtgggatatctgtcatatttatcctgtgagtcattgtgaataatgacatacagtactgaagtaatctgattttattctttggaaattcaatgcattggtcacactaataacatcaacatctgctatcacttatctttttaaaactaaccaaaaaagctggtctcgaactcctgacctcgggtgatccacccgccttggtgccaaagtgctgggattacaggcatgagccactgcacccaactcctctttcgtctttctttaacacacactaggctctttgtgtattatgattcagtgctatttgtaactgtgtcccagtgaccaaattgcactcgactcgatcagctgttcatccatttcgtgttttttcctgtcaaacattaatccagcaaatatatgaggtatttaccaatttattttcttagtattacaaaataattcattagcataaagtacaatagtgaaatatttgagttgttcggaacctcaattaatcctgttttacatttcagacctaaagctggcaatcaggagaagaagcactttgttttaaatgtggagaagataacacttgattccatttcattgtcattagtgtattaaccagcaggagaggtgatgagccatttttcaaatgaaataccttttatttccatataatttttttattttagagttcaatagctgtttctatgattatcctcaatttccatatgttactgaatctgaaaaacatctttaaaattcaaacagttccattttctctcttgtaagtgttaaatgtgataaaagtacatattttaaattgttttcagctcttggatatagcagcaataaaaacactaatttgtgggtatttaagaaaacctggagaataaactcatactttaaaagatcacaacacacaccacacccacacacacacataccacccg

SEQ ID NO: 545790 - DNA, 973 bp, Homo sapiens
  misc_feature (111)..(111): n is a, c, g, or t
agcggagacggagtttcgctcttgttgcccaggctggattgcagtgtcacgatctcggctcactgcaacctttgcctcccatattcaggcagttctcctgcctcaacctcncaagtggctgggattataggcgcctgccaccacgcctagctaattttgtgttttagtggagatggtttcatcatgtggccgggctggtctcgaactcctgacctcgggtgatccacccgccttggtgccaaagtgctgggattacaggcatgagccactgcacccaactcctctttcgtctttctttaacacacactaggctctttgtgtattatgattcagtgctatttgtaactgtgtcccagtgaccaaattgcactcgactcgatcagctgttcatccatttcgtgttttttcctgtcaaacattaatccagcaaatatatgaggtatttaccaatttattttcttagtattacaaaataattcattagcataaagtacaatagtgaaatatttgagttgttcggaacctcaattaatcctgttttacatttcagacctaaagctggcaatcaggagaagaagcactttgttttaaatgtggagaagataacacttgattccatttcattgtcattagtgtattaaccagcaggagaggtgatgagccatttttcaaatgaaataccttttatttccatataatttttttattttagagttcaatagctgtttctatgattatcctcaatttccatatgttactgaatctgaaaaacatctttaaaattcaaacagttccattttctctcttgtaagtgttaaatgtgataaaagtacatattttaaattgttttcagctcttggatatagcagcaataaaaacactaatttgtgggtatttaagaaaacctggagaataaactcatactttaaaagatcacaacacacaccacacccacacacacacataccacccg

SEQ ID NO: 545791 - DNA, 1070 bp, Homo sapiens
cgcatgatgaaacttcggctcactccttggccgcctgacctgatcctccagatcaccacagagagtattcctagcgcatgcactactcaccagacgcctcaaccgccttttacatccataactcgcccacgtcactcgagacgtagattatggctgaatcatccgctaccttcacgcccgaatggtcgcctcattatgctttatctgcctctttcgtagcacatcgggcgaggcctatgttacgcgagtcatgtttctcttacctcgatgaaacctgaagactacctcggcaatataatcctgcctgcttatggcataggtatatggcccaccgcactttcatagggtcgtatgatccctccctgtgaggccaaatatcgattctgtagggggccaccgttaatttacaaacttacatatccgccatcccatacattgggacatacctagttcaagtgaatctgatgaggctcactcagtaagacagatcccagccctcacaacgattcttgacctcttcatcttcatcttgcccttcagttgattgcgaggcccgtaaacagtagctccaactcgctattcttgcatcgaagacgggattaaaacatacccctctaggaatgagcctccccattcccgataaatatccagcccttccttcccttttcgtgcacaatcatatgacgccgcgggttacttgtcttcgcttctatccttaatgacctgtagaactatgctccaccaagagcctcctaggcgagcccagagaaattattccccggggcgaacctccgttaaaaaaccctccccagatgaaggcccgaatgaaatttcctaatagggcaccacaaattcggatccggccttagaaaaggaggggcgctgccaagaggattacaccccctgcctggaggatcccccccctttttctcacaaggtaatttttgccctaccaccctttgtggctggcgagagaccccctccgagaggacaggcacactccgtgggagcgtcagcacccacgcccttaaggggcgacaaaaaagggcgcgggcgcctctcgccgccag

SEQ ID NO: 545792 - DNA, 796 bp, Homo sapiens
  misc_feature (32)..(32): n is a, c, g, or t
  misc_feature (73)..(73): n is a, c, g, or t
  misc_feature (103)..(103): n is a, c, g, or t
  misc_feature (112)..(112): n is a, c, g, or t
  misc_feature (217)..(217): n is a, c, g, or t
  misc_feature (220)..(220): n is a, c, g, or t
  misc_feature (239)..(239): n is a, c, g, or t
  misc_feature (468)..(468): n is a, c, g, or t
  misc_feature (490)..(490): n is a, c, g, or t
  misc_feature (655)..(655): n is a, c, g, or t
  misc_feature (694)..(694): n is a, c, g, or t
  misc_feature (701)..(701): n is a, c, g, or t
  misc_feature (727)..(727): n is a, c, g, or t
  misc_feature (731)..(731): n is a, c, g, or t
  misc_feature (761)..(761): n is a, c, g, or t
cgacaggcaatcctttctcatttaagagtagnaatggcgctctagtagtcagaacgcccctcaagttaaaagngtgccttaattgttcagtatcggctactgngatttggtnacagcaaaccacatggtctttcctctggtatatgattagggcagggaccttcttgttgggccaatggctgcgcaggttttgatgacatgggggatacaataagtnggncgttgtatgggaggggggnagcggggcctgggcttgtgcccttgtcactttctgtttggggccaggggggtggagcttgatgacatctcctaacaatacccacatgcacatctctgtcatccttaaatcactgagtcttggacttcaggttctccttgtgccggtccacaagggaaccaacccactccaccgttttctgcttggcttcctcccagctgtagagtggcttatacgccaaatctcgctgngccttcttataagagcaggtgnatacgctatttgacaatgtgactatgtggcggttgggggcggtcgataggtgtgagttggcctgagtaggaagctcactatttccagcaggaagccaatccaatacatcagggataaaggaaagctccatctggaatcaaggcggaggccgaactctttgctcanggtgtgattaaggttatcatagctttggtgaggcgtgtnatctganatatagtagaactgtcctcggatgcntggngccttcttggggttctgcaaggccctcaangccagaatgtgggcccaggccacattgccaacata

SEQ ID NO: 545793 - DNA, 1747 bp, Homo sapiens
taatatattgtgtatgtttggtttgtattctatgtgtagtatatctcttctgtatagatctagtatctattttgtttcatttatttattatgatgtctgtacatctgttataagtgtacattatagattgttcataagttcatgattgatttgttaattcgctggtataattatttaggtattggagctattggatagattgtttcaatgaaagtgtattgggttggtgttgtgtctgtgtgtgatgtgtatctgttgtggtgatggtttaataactgtttttaatcacttatttatattttagtgttttgaattatcttgtgtatttgttattgttgtagtgttcagtatttcctgctctctcatctcgattttgtgtgtctgttcttctctatatttttgctttctttcgttctcctcaatctcctcttgtgttcgtgtgttgtggtgaatacgtatcttccatttgcttgtaggttctatcaatgtctgttcggtcgttttgtcatcctgtttcgtagctgctcattgctcttcgtcgtgtgcatattttgtctatcttcgtcctctggtatctctgtttgtttgtccttttctggtgatagggtttttttggtatactaatggtatattctttattgttttttgtgtgtttgaatggtgtgtgtcttcttatgtgtagtgtttattttgtggtttcactgggttgtacttaggtctggttatctctagtcttctttgtgtgctcttatgatttggtggaatggataatttggacctatgattttttgcttctatgttataatgtgtctttttctatattaattgaatttgaattggtatttatttatttgtctcttatttttgtttcgctattctcattaggtatgtagattttttggtaatgtgtcttgctaatttattctatgttggggttcatgtgtaatttagggtggtatgggttttgacaagtttagtcgtaatagtcttattgttttgtgatatgtttctatgttatggtataatttctaagtatttgtgaatttgggtaattgtatgctaatttccatgtggtaattgtttctatattggtcttcattaatgttttttaaatatctaatgggtcccttatcttttgattctagtaatgtcttagttatcttatcccctttggtgtatttccctgggttcccctcttgtcttatatcgtcgtcctcaagcgtttcggcgtctttggcgtaaccttcgtctctgagtaaacgttggtaactttttccctactttttctctgtggtactctggctcgtctcaggcatagacgatcttcgtactgttttcgtcccagcgtaattctatcttatgctatatgtatggtaatctcttccttgccttgtagggatgggctttgtactttgtgtatatgaatctatttgtggtctctcggtcctagtataaagatttttctaggtagttcttgtattatttatatctcctattctgtatctaggtagtagtgtgtaatgtttgtgtctgtccctgttgttatctcgtgctactattgttctctgtgtctcaatggatcttcgtagaatagctatacttagactgtcatcatagaatgtatcgtagcaggtagcatgagtttttacaagtgacccttcccttccctcctaccactaccatcttatggggtctggggcttctctcgcaccccctagcacctctgtcatatacaacctggaggtcc

SEQ ID NO: 545794 - DNA, 299 bp, Homo sapiens
  misc_feature (27)..(27): n is a, c, g, or t
  misc_feature (63)..(63): n is a, c, g, or t
  misc_feature (65)..(65): n is a, c, g, or t
  misc_feature (68)..(68): n is a, c, g, or t
  misc_feature (79)..(79): n is a, c, g, or t
  misc_feature (86)..(86): n is a, c, g, or t
  misc_feature (93)..(93): n is a, c, g, or t
  misc_feature (96)..(96): n is a, c, g, or t
  misc_feature (106)..(106): n is a, c, g, or t
  misc_feature (115)..(115): n is a, c, g, or t
  misc_feature (156)..(156): n is a, c, g, or t
  misc_feature (165)..(165): n is a, c, g, or t
  misc_feature (167)..(167): n is a, c, g, or t
  misc_feature (173)..(173): n is a, c, g, or t
  misc_feature (178)..(178): n is a, c, g, or t
  misc_feature (206)..(206): n is a, c, g, or t
  misc_feature (221)..(221): n is a, c, g, or t
  misc_feature (232)..(232): n is a, c, g, or t
  misc_feature (246)..(246): n is a, c, g, or t
  misc_feature (252)..(252): n is a, c, g, or t
  misc_feature (274)..(275): n is a, c, g, or t
  misc_feature (278)..(278): n is a, c, g, or t
  misc_feature (286)..(287): n is a, c, g, or t
  misc_feature (295)..(295): n is a, c, g, or t
  misc_feature (298)..(298): n is a, c, g, or t
ttcacaccacaaaaagataatcacaanaaaatatacactaacttaaaaaaaaaaaaattatantntanataaaatgttntattctntttttangtnggtaaaattnttttttttncttctacataaatttctattcatgaaaaaataacaaatatnaaaatacantnatagtntgcanttcttctatagaatgaacatagacatanccctgaagcttttantttacagggantttccatgaagccncaaacnaaactaattatcaaacacattnnttntttccagnntcaaatanatnc

SEQ ID NO: 545795 - DNA, 816 bp, Homo sapiens
aaaagcaggctggtcggtcgggatttaggataaggtcctggctgcggaggagtgatggcttaaggcccaggagggcgccctgcaagtgactgctgcagagatgagggctgcttagctcctgagtgccacaggctgagaaagcaacctgacatgtccttctgataagcgcactggtagaaactctaaacgatggttggcttcgctttcatgactgggtgggtgatcagctagagaccgtggtaggtgagggaggagaggcacgagactagacaccggatggagaacgctgccgatgaacagctcgtacatgacaaactgtgcatggttcttcttgcgatgagagggttggaagcaaggacacatcagccatttacgcagcataccaaggtgcaggcgtccggtatcctcgggcaatcgcgtcatgaccgctgctctcatatcatgaggtatagggagactgaggccaggtaggaggaggtaacttcaatgcactgcatggaacccttttgatacacgctaatcctatgagaccagagagacagctacctggctccactcctgcacggcctggcgagggcagcagccagcctcctgcgtgggtgtgaggacgttccccggacgagcccgggacacggagggcacggtggagctagcacccaggggcagctccaggtcaggcgacggaccctccctctagctgctccccccatggcaccggcaaaccagcaaacccagcgacgccagcaacgtcacagacagtaaacctagattttaaccaagaaatcacacagccccgtttctcatgcccacttatgg

SEQ ID NO: 545796 - DNA, 139 bp, Homo sapiens
gtagttgggacggttgggccgtcctgctggtaccggcatccgaccctggtactgtagtagctggacttcacttggtggcacagaccgtgacgggacctggtttaccatgtggtggccctacaccggtactgtatggtac

SEQ ID NO: 545797 - DNA, 471 bp, Homo sapiens
  misc_feature (79)..(80): n is a, c, g, or t
  misc_feature (82)..(82): n is a, c, g, or t
  misc_feature (91)..(91): n is a, c, g, or t
  misc_feature (101)..(101): n is a, c, g, or t
  misc_feature (109)..(109): n is a, c, g, or t
  misc_feature (115)..(116): n is a, c, g, or t
  misc_feature (121)..(121): n is a, c, g, or t
  misc_feature (135)..(135): n is a, c, g, or t
  misc_feature (139)..(139): n is a, c, g, or t
  misc_feature (143)..(143): n is a, c, g, or t
  misc_feature (153)..(154): n is a, c, g, or t
  misc_feature (159)..(160): n is a, c, g, or t
gggggattgggtttctctggctttgggagccagtaacttgagatcaggaggctccatcaactgagttttacatttgctnngnactgcatgngtcctctccnggcaaggntgtttnngggtncgtgatggtcacgngggnttcnggggtcctcnntggcnnagattgctggggtcctcctgttcttcttattctctgcagtgggaactcatagccaaggagattcctcttggaactaagcttttccagccagaggtaaaatatttcctacctttttctatgcagccatccttgatttttgtgctccactcggctactgttcctttttagttgtagcccagaactgtcccagagctattttcatccatgaatagttgttaaattgttgtttttgtgagaggatgaaggttagcaccgcctagcttgctgtcttcctgatatcatctctccttttttatttaaactatttatac

SEQ ID NO: 545798 - DNA, 635 bp, Homo sapiens
cgggcagtaggcagttagcgggacggtgatgtagtaagtttgggggagataccactgtgcccggggataggggaaagaccccagatgttgtcattgttcctgggaggtggagatcctgtgccattggtggttggtagtgcatcctaagagggggcggcaccattggatgattaagggtgatcccattaggcctggggtgaagaaggccatgaatgggtaataccattaatcccattaactggggggaggaccagaggggtaaaagattgataccttggactacaaggagggaagatcactgggcttaggggaggtacccccacttgattcttttggggggactctgagatgcaatgaaaggccatagcattgcactatgaatgggcccttgttgagagggttcctcactggggggggggtctgaacagggtcctgcatggggaggggaggaactctgagggaggacaggtaatccaatgggtccttgaatgagggaaaccagctgtccctgtgtgagggacactgagaatggacagggcgagttgattaacccatgattggggcagaccactgtcatctgaaagggattctacgtgagtaagagtcatccaactggactacccagggcttgtaca

SEQ ID NO: 545799 - DNA, 812 bp, Homo sapiens
gactaccgccatgagtctctggcccagtacagagggccagagctggacacacggctcctctaacctgtagttcaatatacgcacgcaggacctagtattgtcgaaggaggaccaggtgtgtgaggcgagatgtggcgccgcagccttgaaggtgctatcgaccacgtcgagtaccaggacgaagagccgcgagatagtgaccagcgttgtatgaaagagtacacacggacctcccaggagctgcagactgaagcgtactgcaattgaggcctgtcaatgagacgtatcaagatctttgaagagcagggtcagagtcaagaagaaatgcagtaaggaatacctgtgagcgcttccggcgtgagggcatactgagaactgagatgcaaaggatcgctgctgaacctccgagtcggcgtcagagttccctgcagttgcctgacgtatccataggagagccgcatgaagctggcagcagctagctgcgggcccagggctgcggacgaagctagagtagatcgacaagcgcatgaagcagcctcaagccggagctcatgcagactgcgctaagatccgagagcagtacctcgtgtggctcacccagaaaggcgcccgggagaagaaaatcaacgagtggctggggattgacaggtgagactgaggaccaggtacgcaactctatggaggacgagggactgatctccctgaaccatcggaggaactgcggcttgttaacgctgggctaaagatcaaccggacgcagggctgaggatatgctgagcggcaagtgggatggaccttcctcatccgcgaga

SEQ ID NO: 545800 - DNA, 386 bp, Homo sapiens
atcccagcacgggtagataggtaatgtgataaggaagtagggtaaggatgagtggggaagaagaaagagaggaagtaaagtttaataatgccttttggggtggaggtgatgatggaggtggagattagctgctgagaaattcaaagttcaaggtgaagctgtctcaaacattcaagaaaacacacagactccaactgtacaagaggagagtgaagaggaagaggtcgatgaaacaggtgtagaagttaaggacatagaattggtcatgtcacaagcaaatgtgtcgagagcaaaggcagtccgagccctgaagaacaccagtattgatatggtaaatgcgataatggaataccatggtacccattcgagatatacccattcgagag

SEQ ID NO: 545801 - DNA, 1282 bp, Homo sapiens
  misc_feature (206)..(206): n is a, c, g, or t
  misc_feature (449)..(449): n is a, c, g, or t
taattcatagttcgctttttgttcttcgacttccctatctatcttcttcttgctatcttataattgcaagactttttctaatctctacttttctggacatacactctttatttcctccttacatgtttcccagcgattctctcttgtggtttttcactatttaacccactatatcaccttgtttaaattctctcaatgtcttgctncttccttgagatatctaccgggtatttattattaggcctaaccacatcgttatcctcctaactatttctgtaaatctcactctttcgacacccgattttgttcacactctttgaaacagatgtggtttctcctatcgggcatggtgttcaacagagtgtagataataaatatgttttgttcatgcatgtcaccgcggctcttgtacaaaatcgtgccccttttttgggcacatgtgttcactntaaggcatacttggcacatatgtcacaaaaggccttggttctcattcttcaagaaaggggtatacccaactctgtctgtggctgacagttaactgtaccccactagaactaattaataccaatcccctagatccccattggaaaaaggggagatatgtgtaaccctggggcatcgaagggacagggttaaacccccaagttgccattttagttcaaggggaggtccacaagcactctcccaaaccagtgtttcaaaccttttatgaggagttaaatctgccagcatccagaacttctgctaaagatgaataatttgtttctccaattagctagcaaaatgtagctcattccctttaatgttacttcttgtgtatatatgcgggggaaccatctatcagagaccgatggccttgggaagcctgagagttgctgcccactgatccagctcctgagtataatgggggcttgtccaaggatctcattcaaggacatgggatggctctcgtctggacttattactggatatgtgggcagagagcctacattcagtttacctaatgaatgggcagacagttgtgttacttggcacatattaagccatcctgttcttcgttattacccgattcaaaactactggtactatctgtatattccagacttttgtatcgagaaagcactgtataactttttgttctgttagctgatagtatgtagcctccagtcacattcgctcatgcttacttgatctatcatgaccctttcacgtggaccccttagagttgtaagcccattaaaagggctaggaatttcttaccgccgggcttgctcataaa

SEQ ID NO: 545802 - DNA, 110 bp, Homo sapiens
tcaacagtggtaggcccagccacggcctccctgctctgatggtgttggacatccctggtaaacttggctgttgagtatttccattttgatactttagagcatcaaatttt

SEQ ID NO: 545803 - DNA, 845 bp, Homo sapiens
cccctccgctccaggcttccttctgcaacaggcgtgggtcacgctctcgctcggtctttctgccgccatcttggttccgcgttccctgcacaaaatgcccggcgaagccacagaaaccgtccctgctacagagcaggagttgccgcagccccaggctgagacagggtctggaacagaatctgacagtgatgaatcagtaccagagcttgaagaacaggattccacccaggcaaccacacaacaagcccagctggcggcagcagctgaaatcgatgaagaaccagtcagtaaagcaaaacagagtcggagtgaaaagaaggcacggaaggctatgtccaaactgggtcttcggcaggttacaggagttactagagtcactatccggaaatctaagaatatcctctttgtcatcacaaaaccagatgtctacaagagccctgcttcagatacttacatagtttttggggaagccaagatcgaagatttatcccagcaagcacaactagcagctgctgagaaattcaaagttcaaggtgaagctgtctcaaacattcaagaaaacacacagactccaactgtacaagaggagagtgaagaggaagaggtcgatgaaacaggtgtagaagttaaggacatagaattggtcatgtcacaagcaaatgtgtcgagagcaaaggcagtccgagccctgaagaacaacagtaatgatattgtaaatgcgattatggaattaacaatgtaaccatatggaagcaactttttttggtgtctcaaaggagtaactgcagcttggtttgaaatttgtactgtttctatcataaataaagttatggcttcttgttgga

SEQ ID NO: 545804 - DNA, 129 bp, Homo sapiens
tagacagtgtgcggcatgatccagacatgcgagctagtacagtttgtgcagcgcgtcatgagcctcgacgaaaagcagctgtcccaccagttccccatgcctgactgcgcattctcgctacaacggttc

SEQ ID NO: 545805 - DNA, 1103 bp, Homo sapiens
  misc_feature (74)..(74): n is a, c, g, or t
  misc_feature (84)..(84): n is a, c, g, or t
  misc_feature (89)..(89): n is a, c, g, or t
  misc_feature (91)..(91): n is a, c, g, or t
  misc_feature (320)..(320): n is a, c, g, or t
aagcagtggtatcatagcgcacagtgcccattacggcctgggtcacagtaagtactttctgtgccgctactgtntatccgcagnccatncncctttctttcgggctaagccgccccggggactgagagttaaggacgagttggaggctttactgggccacagggttcctactcgcccctgggcctccggacaaaatggggtctgcggttggtgtcctggcaaaagcagggtagaagggctgcggggcgggcccagaatccgagcctgcagagatgggagcagttgcagtgttgagggcggaagaggagtgcgtcttgttntgggaactgcttcacaggatccagaaaaggaaatgcccggcgaagccacagaaaccgtccctgctacagagcaggagttgccgcagccccaggctgagacagggtctggaacagaatctgacagtgatgaatcagtaccagagcttgaagaacaggattccacccaggcaaccacacaacaagcccagctggcggcagcagctgaaatcgatgaagaaccagtcagtaaagcaaaacagagtcggagtgaaaagaaggcacggaaggctatgtccaaactgggtcttcggcaggttacaggagttactagagtcactatccggaaatctaagaatatcctctttgtcatcacaaaaccagatgtctacaagagccctgcttcagatacttacatagtttttggggaagccaagatcgaagatttatcccagcaagcacaactagcagctgctgagaaattcaaagttcaaggtgaagctgtctcaaacattcaagaaaacacacagactccaactgtacaagaggagagtgaagaggaagaggtcgatgaaacaggtgtagaagttaaggacatagaattggtcatgtcacaagcaaatgtgtcgagagcaaaggcagtccgagccctgaagaacaacagtaatgatattgtaaatgcgattatggaattaacaatgtaaccatatggaagcaactttttttggtgtctcaaaggagtaactgcagcttggtttgaaatttgtactgtttctatcataaataaagttatggcttcttgttgga

SEQ ID NO: 545806 - DNA, 1749 bp, Homo sapiens
cccctccgctccaggcttccttctgcaacaggcgtgggtcacgctctcgctcggtctttctgccgccatcttggttccgcgttccctgcacaaaatgcccggcgaagccacagaaaccgtccctgctacagagcaggagttgccgcagccccaggctgagacagggtctggaacagaatctgacagtgatgaatcagtaccagagcttgaagaacaggattccacccaggcaaccacacaacaagcccagctggcggcagcagctgaaatcgatgaagaaccagtcagtaaagcaaaacagagtcggagtgaaaagaaggcacggaaggctatgtccaaactgggtcttcggcaggttacaggagttactagagtcactatccggaaatctaagaatatcctctttgtcatcacaaaaccagatgtctacaagagccctgcttcagatacttacatagtttttggggaagccaagatcgaagatttatcccagcaagcacaactagcagctgctgagaaattcaaagttcaaggtgaagctgtctcaaacattcaagaaaacacacagactccaactgtacaagaggagagtgaagaggaagaggtcgatgaaacaggtgtagaagttaaggacatagaattggtcatgtcacaagcaaatgtgtcgagagcaaaggcagtccgagccctgaagaacaacagtaatgatattgtaaatgcgattatggaattaacaatgtaaccatatggaagcaactttttttggtgtctcaaaggagtaactgcagcttggtttgaaatttgtactgtttctatcataaataaagttatggcttcttgttggaaaaaaaaaaaaaaaaaaaaaaaaaaaaaaaaaaaaaaaaaaaaaaaaaaaaaaaaaaaaaaaaaaaaaaaaaaaaaacaaaaacacaaaaaaaaaaaaaaaaaaaaaaaaacacaaaaacaaacaataagaaaacaaaacaacaaaaaaaaaaagacagggaggggcacctcaatgatcgcacaatcacagagaaacagagaacacaaaaacaacaacacaagaaaacgaaagaaagcgagaagcaggagagagagcgaccatccaataaagaagagagacacaagacaaacacactacaacaaacacgacacgtaccaaccgcgcgagcgacgagggcacgcaggggcgggagaaaaagacggcgaggacaggagaggcgcagacgagcgggagagacacaaaaaaagaaagcccagaaagggggcgcgaggcggcggacgaaaagcaggagagccaaacaaccgaacggcagacccagaggcaaggaaggacgagggggagtggatgagcattcctatcaacagtaaagtaatatagacaggagagataagagaggcaacagcgagagagaagagcggcaagacaggaaggagaagaaggaaacagagaggacggagcaaaacagaaaagagaagagactcgcccacgctaaccggaacagaaatataaaaaaagacaagagcaacggcaagcaaggcgaacagcagggggagaggaggaaaggacgaaaacagacgacaacaggcaagaacagacggcactcaaacagatataaaccgagaaagagcaagacgaaggcaacacaaaggacggcagagcaacacgagagaacgcgagagcgggaggcaaagagaggacaatgcagaaagcgacggacaacaaagaacgcaagcagcagaaaa

SEQ ID NO: 545807 - DNA, 871 bp, Homo sapiens
cccctccgctccaggcttccttctgcaacaggcgtgggtcacgctctcgctcggtctttctgccgccatcttggttccgcgttccctgcacagcctcctttttattcccttccttcagaaatgcccggcgaagccacagaaaccgtccctgctacagagcaggagttgccgcagccccaggctgagacagggtctggaacagaatctgacagtgatgaatcagtaccagagcttgaagaacaggattccacccaggcaaccacacaacaagcccagctggcggcagcagctgaaatcgatgaagaaccagtcagtaaagcaaaacagagtcggagtgaaaagaaggcacggaaggctatgtccaaactgggtcttcggcaggttacaggagttactagagtcactatccggaaatctaagaatatcctctttgtcatcacaaaaccagatgtctacaagagccctgcttcagatacttacatagtttttggggaagccaagatcgaagatttatcccagcaagcacaactagcagctgctgagaaattcaaagttcaaggtgaagctgtctcaaacattcaagaaaacacacagactccaactgtacaagaggagagtgaagaggaagaggtcgatgaaacaggtgtagaagttaaggacatagaattggtcatgtcacaagcaaatgtgtcgagagcaaaggcagtccgagccctgaagaacaacagtaatgatattgtaaatgcgattatggaattaacaatgtaaccatatggaagcaactttttttggtgtctcaaaggagtaactgcagcttggtttgaaatttgtactgtttctatcataaataaagttatggcttcttgttgga

SEQ ID NO: 545808 - DNA, 703 bp, Homo sapiens
  misc_feature (7)..(7): n is a, c, g, or t
  misc_feature (13)..(13): n is a, c, g, or t
tgtgctncggtgntctagaggatcccagatattccgggatctgatagttgatcagtaccagagcttgaagaacaggattccacccaggcaaccacacaacaagcccagctggcggcagcagctgaaatcgatgaagaaccagtcagtaaagcaaaacagagtcggagtgaaaagaaggcacggaaggctatgtccaaactgggtcttcggcaggttacaggagttactagagtcactatccggaaatctaagaatatcctctttgtcatcacaaaaccagatgtctacaagagccctgcttcagatacttacatagtttttggggaagccaagatcgaagatttatcccagcaagcacaactagcagctgctgagaaattcaaagttcaaggtgaagctgtctcaaacattcaagaaaacacacagactccaactgtacaagaggagagtgaagaggaagaggtcgatgaaacaggtgtagaagttaaggacatagaattggtcatgtcacaagcaaatgtgtcgagagcaaaggcagtccgagccctgaagaacaacagtaatgatattgtaaatgcgattatggaattaacaatgtaaccatatggaagcaactttttttggtgtctcaaaggagtaactgcagcttggtttgaaatttgtactgtttctatcataaataaagttatggcttcttgttgga

SEQ ID NO: 545809 - DNA, 1847 bp, Homo sapiens
  misc_feature (397)..(397): n is a, c, g, or t
  misc_feature (527)..(527): n is a, c, g, or t
  misc_feature (564)..(564): n is a, c, g, or t
  misc_feature (574)..(574): n is a, c, g, or t
ggaggttttgactctcgtggcgccccagggccgacgggagtggcggccgcgcggaggaggccaagatggcggcagctgcggcttcgcttcgcggggtagtgttgggcccgcggggcgcggggctcccgggcgcgcgtgcccggggtctgctgtgcagcgcgcggcccgggcagctcccgctacggacacctcaggcagtggcccaggtgagcgctgggccgggccccggcctccgcgcggccccgcatctccgtgaaggtcacggcggggaggctgcgggcgcgggcctgggcagcgcggaagcggtaccggccacccagcgtccccggtcccagctgcctgccgaccttgagcgtgtgggatcagggctgggcgcccacctctccgaacggcaganagcccgtccccagcgtgggggttggcgggacgggctagctgccgtggcggggctggggctttcccgaatggcgcgcccaggacggctcttgcggctggctgtccaaactgggcccgcgtcctgaagtgancccagcctgatctcggccagctgcttgtgaccttggnctgtcccagnacccttggtcacttcggtctgatccccggctcaggatccaggaacaccctctcctgagagcgaatcacggtctaggggtcagcggcggagagggatggggtgggtagtgggacagggtgtgcgtctggtgccctgcaggaggaggccattgctgggtggagaggtgggcgctgagagtcagatccccaggtagggctgggtggtgtcctggcaggcgctgagcggagatcttgcaggcagtggccttgtcgtcgaagtctggcctttcccgaggccggaaagtgatgctgtcagcgctgggcatgctggcggcagggggtgcggggctggccgtggctctgcattcggctgtgagtgccagtgacctggagctgcacccccccagctatccgtggtctcaccgtggcctcctctcttccttggaccacaccagcatccggaggggtttccaggtatataagcaggtgtgcgcctcctgccacagcatggacttcgtggcctaccgccacctggtgggcgtgtgctacacggaggatgaagctaaggagctggctgcggaggtggaggttcaagacggccccaatgaagatggggagatgttcatgcggccagggaagctgttcgactatttcccaaaaccataccccaacagtgaggctgctcgagctgccaacaacggagcattgccccctgacctcagctacatcgtgcgagctaggcatggtggtgaggactacgtcttctccctgctcacgggctactgcgagccacccaccggggtgtcactgcgggaaggtctctacttcaacccctactttcctggccaggccattgccatggcccctcccatctacacagatgtcttagagtttgacgatggcaccccagctaccatgtcccagatagccaaggatgtgtgcaccttcctgcgctgggcatctgagccagagcacgaccatcgaaaacgcatggggctcaagatgttgatgatgatggctctgctggtgcccctggtctacaccataaagcggcacaagtggtcagtcctgaagagtcggaagctggcatatcggccgcccaagtgaccctgtccagtgtctgcttgccatcctgccagaacaggccctcaagcccaagagccatcccaggcctgttcaggcctcagctaagcctctcttcatctggaagaagaggcaagggggcaggagaccaggctctagctctgggccctccttcagcccccatcatgggaataaattaattttctcaatgt

SEQ ID NO: 545810 - DNA, 767 bp, Homo sapiens
  misc_feature (42)..(42): n is a, c, g, or t
cgagctcaggtaccccagatatgtccggatctagacgtgaangtatagtaccggatgctactgtgtccacatgataggtaaaaagggtagctcccggagtctgataggtgatgaatcagtaccagagcttgaagaacaggattccacccaggcaaccacacaacaagcccagctggcggcagcagctgaaatcgatgaagaaccagtcagtaaagcaaaacagagtcggagtgaaaagaaggcacggaaggctatgtccaaactgggtcttcggcaggttacaggagttactagagtcactatccggaaatctaagaatatcctctttgtcatcacaaaaccagatgtctacaagagccctgcttcagatacttacatagtttttggggaagccaagatcgaagatttatcccagcaagcacaactagcagctgctgagaaattcaaagttcaaggtgaagctgtctcaaacattcaagaaaacacacagactccaactgtacaagaggagagtgaagaggaagaggtcgatgaaacaggtgtagaagttaaggacatagaattggtcatgtcacaagcaaatgtgtcgagagcaaaggcagtccgagccctgaagaacaacagtaatgatattgtaaatgcgattatggaattaacaatgtaaccatatggaagcaactttttttggtgtctcaaaggagtaactgcagcttggtttgaaatttgtactgtttctatcataaataaagttatggcttcttgttgga

SEQ ID NO: 545811 - DNA, 1019 bp, Homo sapiens
tgcgtacccgggctcccgggaaagtgtaacggggaataaatcgtcgaccacaacgcagtacagagacattggccagtggggacatctgacatatcggtgttgatgcatgacctggagctgcacccccccagctatccgtggtctcaccgtggcctcctctcttccttggaccacaccagcatccggaggggtttccaggtatataagcaggtgtgcgcctcctgccacagcatggacttcgtggcctaccgccacctggtgggcgtgtgctacacggaggatgaagctaaggagctggctgcggaggtggaggttcaagacggccccaatgaagatggggagatgttcatgcggccagggaagctgttcgactatttcccaaaaccataccccaacagtgaggctgctcgagctgccaacaacggagcattgccccctgacctcagctacatcgtgcgagctaggcatggtggtgaggactacgtcttctccctgctcacgggctactgcgagccacccaccggggtgtcactgcgggaaggtctctacttcaacccctactttcctggccaggccattgccatggcccctcccatctacacagatgtcttagagtttgacgatggcaccccagctaccatgtcccagatagccaaggatgtgtgcaccttcctgcgctgggcatctgagccagagcacgaccatcgaaaacgcatggggctcaagatgttgatgatgatggctctgctggtgcccctggtctacaccataaagcggcacaagtggtcagtcctgaagagtcggaagctggcatatcggccgcccaagtgaccctgtccagtgtctgcttgccatcctgccagaacaggccctcaagcccaagagccatcccaggcctgttcaggcctcagctaagcctctcttcatctggaagaagaggcaagggggcaggagaccaggctctagctctgggccctccttcagcccccatcatgggaataaattaattttctcaatgt

SEQ ID NO: 545812 - DNA, 1123 bp, Homo sapiens
cccctccgctccaggcttccttctgcaacaggcgtgggtcacgctctcgctcggtctttctgccgccatcttggttccgcgttccctgcacaaaatgcccggcgaagccacagaaaccgtccctgctacagagcaggagttgccgcagccccaggctgagacagggtctggaacagaatctgacagtgatgaatcagtaccagagcttgaagaacaggattccacccaggcaaccacacaacaagcccagctggcggcagcagctgaaatcgatgaagaaccagtcagtaaagcaaaacagagtcggagtgaaaagaaggcacggaaggctatgtccaaactgggtcttcggcaggttacaggagttactagagtcactatccggaaatctaagaatatcctctttgtcatcacaaaaccagatgtctacaagagccctgcttcagatacttacatagtttttggggaagccaagatcgaagatttatcccagcaagcacaactagcagctgctgagaaattcaaagttcaaggtgaagctgtctcaaacattcaagaaaacacacagactccaactgtacaagaggagagtgaagaggaagaggtcgatgaaacaggtgtagaagttaaggacatagaattggtcatgtcacacagccacacactgctgctcgacgagcaaagcgcacgcctcccgacgcccctgcacacgaaaccaacagcctaactgactacttgctaacactgtcgacttactgcgacacttacaccacacctgctaacccactactgcgcaacgccacacctcttctctttctggctgctcatccaacagcgcagcctacactggcacccatctggcttcttgcacaacttctgctaacctgctctctcctactccactaccaactaaacaccttactgcgcctttcctccgctctgccaaccacaccacacacacaacacaaaacaacacaaccacacacacaaaacaaacacacaaacacaatacaacaaaacacacacacacccctccacccaatctctccctccacacccaaccccacaaaaccctaccccacccccccactcgacacaccacccacaccaaaacccccactct

SEQ ID NO: 545813 - DNA, 1075 bp, Homo sapiens
ggaggttttgactctcgtggcgccccagggccgacgggagtggcggccgcgcggaggaggccaagatggcggcagctgcggcttcgcttcgcggggtagtgttgggcccgcggggcgcggggctcccgggcgcgcgtgcccggggtctgctgtgcagcgcgcggcccgggcagctcccgctacggacacctcaggcagtggcccgtggcctcctctcttccttggaccacaccagcatccggaggggtttccaggtatataagcaggtgtgcgcctcctgccacagcatggacttcgtggcctaccgccacctggtgggcgtgtgctacacggaggatgaagctaaggagctggctgcggaggtggaggttcaagacggccccaatgaagatggggagatgttcatgcggccagggaagctgttcgactatttcccaaaaccataccccaacagtgaggctgctcgagctgccaacaacggagcattgccccctgacctcagctacatcgtgcgagctaggcatggtggtgaggactacgtcttctccctgctcacgggctactgcgagccacccaccggggtgtcactgcgggaaggtctctacttcaacccctactttcctggccaggccattgccatggcccctcccatctacacagatgtcttagagtttgacgatggcaccccagctaccatgtcccagatagccaaggatgtgtgcaccttcctgcgctgggcatctgagccagagcacgaccatcgaaaacgcatggggctcaagatgttgatgatgatggctctgctggtgcccctggtctacaccataaagcggcacaagtggtcagtcctgaagagtcggaagctggcatatcggccgcccaagtgaccctgtccagtgtctgcttgccatcctgccagaacaggccctcaagcccaagagccatcccaggcctgttcaggcctcagctaagcctctcttcatctggaagaagaggcaagggggcaggagaccaggctctagctctgggccctccttcagcccccatcatgggaataaattaattttctcaatgt

SEQ ID NO: 545814 - DNA, 403 bp, Homo sapiens
cccctccgctccaggcttccttctgcaacaggcgtgggtcacgctctcgctcggtctttctgccgccatcttggttccgcgttccctgcacaaaatgcccggcgaagccacagaaaccgtccctgctacagagcaggagttgccgcagccccaggctgagacagggtctggaacagaatctgacagtgatgaatcagtaccagagcttgaagaacaggattccacccaggcaaccacacaacaagcccagctggcggcagcagctgaaatcgatgaagaaccagtcagtaaagcaaaacagagtcggagtgaaaagaaggcacggaaggctatgtccaaactgggtcttcggcaggttacaggagttactagagtcactatcagatcccgatatctgggtcct

SEQ ID NO: 545815 - DNA, 1115 bp, Homo sapiens
ggaggttttgactctcgtggcgccccagggccgacgggagtggcggccgcgcggaggaggccaagatggcggcagctgcggcttcgcttcgcggggtagtgttgggcccgcggggcgcggggctcccgggcgcgcgtgcccggggtctgctgtgcagcgcgcggcccgggcagctcccgctacggacacctcaggcagtggccttgtcgtcgaagtctggcctttcccgaggccggaaagtgatgctgtcagcgctgggcatgctggcggcagggggtgcggggctggccgtggctctgcattcggctgtgagtgccagtgacctggagctgcacccccccagctatccgtggtctcaccgtgtgctacacggaggatgaagctaaggagctggctgcggaggtggaggttcaagacggccccaatgaagatggggagatgttcatgcggccagggaagctgttcgactatttcccaaaaccataccccaacagtgaggctgctcgagctgccaacaacggagcattgccccctgacctcagctacatcgtgcgagctaggcatggtggtgaggactacgtcttctccctgctcacgggctactgcgagccacccaccggggtgtcactgcgggaaggtctctacttcaacccctactttcctggccaggccattgccatggcccctcccatctacacagatgtcttagagtttgacgatggcaccccagctaccatgtcccagatagccaaggatgtgtgcaccttcctgcgctgggcatctgagccagagcacgaccatcgaaaacgcatggggctcaagatgttgatgatgatggctctgctggtgcccctggtctacaccataaagcggcacaagtggtcagtcctgaagagtcggaagctggcatatcggccgcccaagtgaccctgtccagtgtctgcttgccatcctgccagaacaggccctcaagcccaagagccatcccaggcctgttcaggcctcagctaagcctctcttcatctggaagaagaggcaagggggcaggagaccaggctctagctctgggccctccttcagcccccatcatgggaataaattaattttctcaatgt

SEQ ID NO: 545816 - DNA, 906 bp, Homo sapiens
gtcttcctgccgccattcttgtttcacgcgtatccactgcaccaatacatgcctcggtagaaaactactaaaaatcgttgccttgactcactgatcatgcgacttgtcacgtcaatgccctcaagagcgtgaagtacaatgaggttactcggcatagctagcaaattcttgagccatgtcgtactatgcaatcaacgctcatccaagcagcctctgcatcgcacatccaggtattccaactcactatggcgaactcatctgcacactaagtcacctacgttttggccggccatgcagctgcaaattggatgaacgaaccagtcaagtatagtcaaatacctacgcagtcggatatgagacctgaaaggtacggtacggctatgtccaacatatggcgtcttcgtgcaggttactacgggacgcttactagtagatcatctatccggaaatctaagaatatcctctttgtcatcacaaaaccagatgtctacaagagccctgcttcagatacttacatagtttttggggaagccaagatcgaagatttatcccagcaagcacaactagcagctgctgagaaattcaaagttcaaggtgaagctgtctcaaacattcaagaaaacacacagactccaactgtacaagaggagagtgaagaggaagaggtcgatgaaacaggtgtagaagttaaggacatagaattggtcatgtcacaagcaaatgtgtcgagagcaaaggcagtccgagccctgaagaacaacagtaatgatattgtaaatgcgattatggaattaacaatgtaaccatatggaagcaactttttttggtgtctcaaaggagtaactgcagcttggtttgaaatttgtactgtttctatcataaataaagttatggcttcttgttgga

SEQ ID NO: 545817 - DNA, 1186 bp, Homo sapiens
ggaggttttgactctcgtggcgccccagggccgacgggagtggcggccgcgcggaggaggccaagatggcggcagctgcggcttcgcttcgcggggtagtgttgggcccgcggggcgcggggctcccgggcgcgcgtgcccggggtctgctgtgcagcgcgcggcccgggcagctcccgctacggacacctcaggcagtggccttgtcgtcgaagtctggcctttcccgaggccggaaagtgatgctgtcagcgctgggcatgctggcggcagggggtgcggggctggccgtggctctgcattcggctgtgagtgccagtgacctggagctgcacccccccagctatccgtggtctcaccgtggcctcctctcttccttggaccacaccagcatccggaggggtttccaggtatataagcaggtgtgcgcctcctgccacagcatggacttcgtggcctaccgccacctggtgggcgtgtgctacacggaggatgaagctgatggggagatgttcatgcggccagggaagctgttcgactatttcccaaaaccataccccaacagtgaggctgctcgagctgccaacaacggagcattgccccctgacctcagctacatcgtgcgagctaggcatggtggtgaggactacgtcttctccctgctcacgggctactgcgagccacccaccggggtgtcactgcgggaaggtctctacttcaacccctactttcctggccaggccattgccatggcccctcccatctacacagatgtcttagagtttgacgatggcaccccagctaccatgtcccagatagccaaggatgtgtgcaccttcctgcgctgggcatctgagccagagcacgaccatcgaaaacgcatggggctcaagatgttgatgatgatggctctgctggtgcccctggtctacaccataaagcggcacaagtggtcagtcctgaagagtcggaagctggcatatcggccgcccaagtgaccctgtccagtgtctgcttgccatcctgccagaacaggccctcaagcccaagagccatcccaggcctgttcaggcctcagctaagcctctcttcatctggaagaagaggcaagggggcaggagaccaggctctagctctgggccctccttcagcccccatcatgggaataaattaattttctcaatgt

SEQ ID NO: 545818 - DNA, 193 bp, Homo sapiens
agacctaactcttggtataattcagttttcttcctttcaaaagaagtaacgtttccctgtttgtcaaattttgtcacagtaaatactggggctacactggctaaagtggcttgagagacgtcagaggttctaaaccggtgcacttcacctgccacgcggagccggtcgggcaccgcaaacgtgcgcgctcggc

SEQ ID NO: 545819 - DNA, 1154 bp, Homo sapiens
ggaggttttgactctcgtggcgccccagggccgacgggagtggcggccgcgcggaggaggccaagatggcggcagctgcggcttcgcttcgcggggtagtgttgggcccgcggggcgcggggctcccgggcgcgcgtgcccggggtctgctgtgcagcgcgcggcccgggcagctcccgctacggacacctcaggcagtggccttgtcgtcgaagtctggcctttcccgaggccggaaagtgatgctgtcagcgctgggcatgctggcggcagggggtgcggggctggccgtggctctgcattcggctgtgagtgccagtgacctggagctgcacccccccagctatccgtggtctcaccgtggcctcctctcttccttggaccacaccagcatccggaggggtttccaggtatataagcaggtgtgcgcctcctgccacagcatggacttcgtggcctaccgccacctggtgggcgtgtgctacacggaggatgaagctgttcgactatttcccaaaaccataccccaacagtgaggctgctcgagctgccaacaacggagcattgccccctgacctcagctacatcgtgcgagctaggcatggtggtgaggactacgtcttctccctgctcacgggctactgcgagccacccaccggggtgtcactgcgggaaggtctctacttcaacccctactttcctggccaggccattgccatggcccctcccatctacacagatgtcttagagtttgacgatggcaccccagctaccatgtcccagatagccaaggatgtgtgcaccttcctgcgctgggcatctgagccagagcacgaccatcgaaaacgcatggggctcaagatgttgatgatgatggctctgctggtgcccctggtctacaccataaagcggcacaagtggtcagtcctgaagagtcggaagctggcatatcggccgcccaagtgaccctgtccagtgtctgcttgccatcctgccagaacaggccctcaagcccaagagccatcccaggcctgttcaggcctcagctaagcctctcttcatctggaagaagaggcaagggggcaggagaccaggctctagctctgggccctccttcagcccccatcatgggaataaattaattttctcaatgt

SEQ ID NO: 545820 - DNA, 1320 bp, Homo sapiens
ggaggttttgactctcgtggcgccccagggccgacgggagtggcggccgcgcggaggaggccaagatggcggcagctgcggcttcgcttcgcggggtagtgttgggcccgcggggcgcggggctcccgggcgcgcgtgcccggggtctgctgtgcagcgcgcggcccgggcagctcccgctacggacacctcaggcagtggccttgtcgtcgaagtctggcctttcccgaggccggaaagtgatgctgtcagcgctgggcatgctggcggcagggggtgcggggctggccgtggctctgcattcggctgtgagtgccagtgacctggagctgcacccccccagctatccgtggtctcaccgtggcctcctctcttccttggaccacaccagcatccggaggggtttccaggtatataagcaggtgtgcgcctcctgccacagcatggacttcgtggcctaccgccacctggtgggcgtgtgctacacggaggatgaagctaaggagctggctgcggaggtggaggttcaagacggccccaatgaagatggggagatgttcatgcggccagggaagctgttcgactatttcccaaaaccataccccaacagtgaggctgctcgagctgccaacaacggagcattgccccctgacctcagctacatcgtgcgagctaggtacacgggctgcccatggggtggtgctggagagatgggggaagggctgacttgtgcttggaactaaggagccatggatctggtcctaggcatggtggtgaggactacgtcttctccctgctcacgggctactgcgagccacccaccggggtgtcactgcgggaaggtctctacttcaacccctactttcctggccaggccattgccatggcccctcccatctacacagatgtcttagagtttgacgatggcaccccagctaccatgtcccagatagccaaggatgtgtgcaccttcctgcgctgggcatctgagccagagcacgaccatcgaaaacgcatggggctcaagatgttgatgatgatggctctgctggtgcccctggtctacaccataaagcggcacaagtggtcagtcctgaagagtcggaagctggcatatcggccgcccaagtgaccctgtccagtgtctgcttgccatcctgccagaacaggccctcaagcccaagagccatcccaggcctgttcaggcctcagctaagcctctcttcatctggaagaagaggcaagggggcaggagaccaggctctagctctgggccctccttcagcccccatcatgggaataaattaattttctcaatgt

SEQ ID NO: 545821 - DNA, 230 bp, Homo sapiens
  misc_feature (109)..(109): n is a, c, g, or t
  misc_feature (171)..(171): n is a, c, g, or t
tctagagcgatccgccagtaatagactccttcgtgatctggggatgtgccacccgccttttccctgtacttcttcacgcgtggtagccctctacgttggactggatccngttccacgcttgcgccgatgtggaggccaatgtgccgccccttcaacctgcccctcccacangcgctggcgcgggtaccccgatgcctggactccaaaaccctcgtaggcggactcctcta

SEQ ID NO: 545822 - DNA, 489 bp, Homo sapiens
  misc_feature (481)..(481): n is a, c, g, or t
gtagcaggtggttaagggaagaggaggcctcaactgcataaccacattgtatgtgtccttggcatcactgcagtggggagcctggggctgggtgtcactggaattacagtcacaaagggtgttccaattccacaatcagctcctctgagaagccaagggcccggagcctcaggagatggggctctgggaagcagtgggtggcttggagagaaacccagaaagtcaccgtctggttgattcggacgtggttgcactgtcctcgatcctcagtcttaacctccctcttctcaggaccctcacactgggattcgtaagaaatgtggaccccaggagggagtgaagagtgttcaagggtcacggtggaagacaggctctatgggaagagagcgagtggataaccacgtgaaggcagaaaaggactccaaccccaccttatgtcctctccaggtgttcccaattctgccagcaccctatccacaancacctgcg

SEQ ID NO: 545823 - DNA, 714 bp, Homo sapiens
cttctttaggccagtcaccctttcccttcccatagcccttccactctgggacgaacccatttcccgcacaggattttctttccacaagggcccccgctacatagtgcgcctctcgcctctcgcgggataattaacatctatcatggggggggatacatatgggggtgagaccgcgaggactgctgccccactcacaactcacgttgtaggatggtatccttgggggaagtatgacacgtctctcaaactcatcatcacaaagccaggggtgagacacatcactctacaatgtcccactcttctctcccagaaccgaggggaagactacgactcttcctacacacgtgttcgcgcgcccacgattttctgtgcgctgaactccacacacagatagtaataaggtggcgtacctgtcagtgtgttgtctcttccttcacacacggcgtggcgggtgacacacccaatacaccatgatggattctcttgattaagaatagatggtcccgcactttagtcaaatcctttcgtagtcagtgcgtggcgcaccacgtggagtgcacaagcgcgcggagagtctcccgcccactcactgggagacgttgggtatgacgaggccatccttgggagacgctcctgaggatgcaaagggcctcgcctgcgcgccacaaagagggtagccccgggcgcgcctgcacaaacaaaagcaagaaaaga

SEQ ID NO: 545824 - DNA, 415 bp, Homo sapiens
ctccttcatcatcacctcacgtccttcatcatacctactcttccttcatacatacctacccatccttacatcatacctacacttactatatcatacctacccgtcctttatcatacctgccttcttatactttcttttctttcttccgcgtgctactatgcttcttacctttaaaacttccttatactgcttcttaccttctaagcttaatcttcttcctcttcttattctggcttctccattcttgatgcttattcttctttcttctgacctcctcttatctaactacttagttcttcctcttactttccttcttccttctttctgcttcttttacttttgactttcttctttccttcttattcttcctctccttcttcttaggacttctttcttctggtaggtatcatggagg

SEQ ID NO: 545825 - DNA, 747 bp, Homo sapiens
gggtgctctgaggatccccccgtccgatggctatgcccgtcccgtccgaatgcccaatgaagatggggagatgttcatgcggccagggaagctgttcgactatttcccaaaaccataccccaacagtgaggctgctcgagctgccaacaacggagcattgccccctgacctcagctacatcgtgcgagctaggcatggtggtgaggactacgtcttctccctgctcacgggctactgcgagccacccaccggggtgtcactgcgggaaggtctctacttcaacccctactttcctggccaggccattgccatggcccctcccatctacacagatgtcttagagtttgacgatggcaccccagctaccatgtcccagatagccaaggatgtgtgcaccttcctgcgctgggcatctgagccagagcacgaccatcgaaaacgcatggggctcaagatgttgatgatgatggctctgctggtgcccctggtctacaccataaagcggcacaagtggtcagtcctgaagagtcggaagctggcatatcggccgcccaagtgaccctgtccagtgtctgcttgccatcctgccagaacaggccctcaagcccaagagccatcccaggcctgttcaggcctcagctaagcctctcttcatctggaagaagaggcaagggggcaggagaccaggctctagctctgggccctccttcagcccccatcatgggaataaattaattttctcaatgt

SEQ ID NO: 545826 - DNA, 705 bp, Homo sapiens
cttagagtttgacgatgggaggggccatggcaatggcctggccaggaagctgttcgactatttcccaaaaccataccccaacagtgaggctgctcgagctgccaacaacggagcattgccccctgacctcagctacatcgtgcgagctaggcatggtggtgaggactacgtcttctccctgctcacgggctactgcgagccacccaccggggtgtcactgcgggaaggtctctacttcaacccctactttcctggccaggccattgccatggcccctcccatctacacagatgtcttagagtttgacgatggcaccccagctaccatgtcccagatagccaaggatgtgtgcaccttcctgcgctgggcatctgagccagagcacgaccatcgaaaacgcatggggctcaagatgttgatgatgatggctctgctggtgcccctggtctacaccataaagcggcacaagtggtcagtcctgaagagtcggaagctggcatatcggccgcccaagtgaccctgtccagtgtctgcttgccatcctgccagaacaggccctcaagcccaagagccatcccaggcctgttcaggcctcagctaagcctctcttcatctggaagaagaggcaagggggcaggagaccaggctctagctctgggccctccttcagcccccatcatgggaataaattaattttctcaatgt

SEQ ID NO: 545827 - DNA, 410 bp, Homo sapiens
tcgattctttatctgcatagaccatccattttttatgtctcccgggagataacacatgtgatatttgtcaaacagtgcctggcttatctcacataacataatggcccccagttccatccatgtggctagcaaatgacaggggtatgataaaagtaaagggcctaataatgttacactagatgataataatataccacattttctttatccattcatctgttgtggacacttaggttgattccatattttggctatggctattgtgaatagtgctgagataaacatgagagtgtagatatctattcaatatattgatttcctgtcttatagatatatatccagtactggaattgcagggtcataagaaagttctattttctattttttaaggaacctccatactcttcttc

SEQ ID NO: 545828 - DNA, 516 bp, Homo sapiens
tctccggtggatcgattatagccacgtactctggtgatataggtcggaaaggtatagcaagcggtgttcagttgtcggcgaaccgaggagtacacggatcgaggacaccaactctcccgcatgcactgggatcctcaagacagtgctcgaaactcatgggcggagtgcgcacactgaggcatacgcatgatgactgtgcgagaataagagacaatgcctcacgcatcagcagccttccctcttggagaccataactttctgagtggtagtgtagtgaactgaactccatggttccctattgcatgcagaccaccgacactctgtatggaatctgctggaaagaccactcggtgaaagaggccatgtcataacattgcattaatctactaagtcaacgaagacattggtaagcatgccgcagagaacttcagatgacactcaagctaaggctgtgggagaggactaggcttatgtggtctagtgagcattcgtacctgagtgattgggcttcgggcc

SEQ ID NO: 545829 - DNA, 1234 bp, Homo sapiens
  misc_feature (742)..(742): n is a, c, g, or t
  misc_feature (786)..(786): n is a, c, g, or t
  misc_feature (792)..(792): n is a, c, g, or t
  misc_feature (796)..(796): n is a, c, g, or t
ggaggttttgactctcgtggcgccccagggccgacgggagtggcggccgcgcggaggaggccaagatggcggcagctgcggcttcgcttcgcggggtagtgttgggcccgcggggcgcggggctcccgggcgcgcgtgcccggggtctgctgtgcagcgcgcggcccgggcagctcccgctacggacacctcaggcagtggccttgtcgtcgaagtctggcctttcccgaggccggaaagtgatgctgtcagcgctgggcatgctggcggcagggggtgcggggctggccgtggctctgcattcggctgtgagtgccagtgacctggagctgcacccccccagctatccgtggtctcaccgtggcctcctctcttccttggaccacaccagcatccggaggggtttccaggtatataagcaggtgtgcgcctcctgccacagcatggacttcgtggcctaccgccacctggtgggcgtgtgctacacggaggatgaagctaaggagctggctgcggaggtggaggttcaagacggccccaatgaagatggggagatgttcatgcggccagggaagctgttcgactatttcccaaaaccataccccaacagtgaggctgctcgagctgccaacaacggagcattgccccctgacctcagctacatcgtgcgagctaggcatggtggtgaggactacgtcttctccctgctcacgggctactgcgagccacccacctttttttnatttctttaatttttttactttaacccttacttttttttttttntttttntttncatggcccctcccatctacacagatgtcttagagtttgacgatggcaccccagctaccatgtcccagatagccaaggatgtgtgcaccttcctgcgctgggcatctgagccagagcacgaccatcgaaaacgcatggggctcaagatgttgatgatgatggctctgctggtgcccctggtctacaccataaagcggcacaagtggtcagtcctgaagagtcggaagctggcatatcggccgcccaagtgaccctgtccagtgtctgcttgccatcctgccagaacaggccctcaagcccaagagccatcccaggcctgttcaggcctcagctaagcctctcttcatctggaagaagaggcaagggggcaggagaccaggctctagctctgggccctccttcagcccccatcatgggaataaattaattttctcaatgt

SEQ ID NO: 545830 - DNA, 491 bp, Homo sapiens
gatctcgctgggaaacgtagcctattttttcaccggctgccagccatctggcccaccccaccctgttcaatttcccttctgctctttatcttttcagctatgactgactatatcagttaatttacttgtacgtgtcctctctgctgtctccttaccctgctcccctacaccatgtatttccttcctttaccatttcctccttggaattgtgctgtgtttcgttgtcctggaggacagaagagcaggttaaggcatgagcatgtgtgtatcactttgaagaaagagaaaccaggtattctgctacagtttggagaaaaacccaatgaaggaagaaatgaaagctggctctgcagagtgccttaaaaatgactttaattaggaaattctgagttgtcagtcttcagatgttacataaactcaaacagatgttgcatttcacttctctgggattaaaaaaagttaaatacagtgtgtattcaacaacaacaaca

SEQ ID NO: 545831 - DNA, 941 bp, Homo sapiens
ggagtaatctattactcgatctttccagagaaaaacattcgtggtcttcaagctcccagtacatcacctcaaggccgtcctgggggaggcccggatgctcaatgccagcattgtggcatccgttcgtggagctacgcgctggtgcagcgatagtctcaccttcgaatgcgctctcagactgcggtggtaggcgtgcagacctcacgcgcgcaccgagtccatgacactcctcccaaggacacgtgtgatagcccggagcgtgctctatggtgtccttgagtccatgaggcaaagttgtgcctgaccgacgcctagtgactccgtggtactagagggaaacgagcttgatagcgcaatggagaaggtgcaccagtcacgagagcctgaccatttctggggaccccatggctgtgagggcacgagggaccacggggtcgaccgaaggttttgatactttgcggcagtagctgtgagcgtccagtctagtgggggcgataggcaggtgtccaagaagagtatggatcacgcacactgaggcggcggtgcgagatatccgtgtcgagctcatcgacccacaggcggaagaacaggtgcagctggcctcaagattggaccagtctctctttccagctggggcctctaactcaaggccaaaattcctcccgggcgtctcggaaacgcagcagtaggaaccagaggatcgggagcacccagagaaccccatgggtccccaagcagaaatggcataagccccggacccccgtgttggcgagcccgggagatgcacagcggcaatggaggcctggtgtgaactaacctgagaaccaggccatcaatgaaccagatgagcctgactcgagctaaccttcgatacggcagaagtcttggcatccgcaggcggggaacgtgggccctgcccaaattggcccgggctgatgttg

SEQ ID NO: 545832 - DNA, 260 bp, Homo sapiens
gcaatccataagtgtccttatctacaaagtgaaaagttggacaagatattcttcatgatctttttcgattttaaaatgtcatgcaattttagagaaaagctgaagggtcacccaatatggcgcgacaccaaaagacaaatacgaggacaatcactttttcactttccgcaaactatgcctggacacttccttggcgagacttaatacaccagacaagaacacactatgaatgcgagacagagggagacagaggcgaaata

SEQ ID NO: 545833 - DNA, 460 bp, Homo sapiens
cggtgatctagcaggatcccgggagccttacctgggctgctgacagacgtcggcagggctggagcacctcgcgttggtgggaagggagggcctgtggcctggccgagttgctggccaatgtggccagttccatcctgagcacatacgggctctctggcagcagtgcaccttttcaccgccaaagaggtgtccttctccaacaagccctacttccggggtgagttctgcagtcagggtgtccggtgagggcctcatcgggggctccgtccactctatgtgccagagggctcagagcttctgcgacagccctggggagaaggggggtgccaaacgactggccctgctcgtgcttgctctcccggcctctggcctgggagtaggagagggccaccatctcctacatcctcactctcactgatgaacagtttcgggtgcaggatcagttcccagtgacgcccgt

SEQ ID NO: 545834 - DNA, 626 bp, Homo sapiens
agcggggggggtgaggggaaggaggagggaagtaggacttcaacatggcggactgcggcactggcggttggctacggtgacggcactggcccggagcgggcacgagcttggaggctgggtggcgttcgctctccctaggggcgtgtcgggagctcagcggggaccgaggcctgggaggccggccggtgccagcgagcctttcggcgttctgagacggcggcagcgagcgggattcaggttctaaagtggcttctaagaagttgggtgcacgattttcatgggcactttcagttaccttgatgatgtcccatgttaacgacaggagacgacaattcgaaaacaccgagctgaaagttggtctgagcctatggcttcgtccttgcctgattgtttgcaggttagtcagagaagtacagtatgacttctctttggaaaagaaaagcattgagtgggctgacagagatttaaggaaagatcgaagaagccgagcgggaagcagagtgccaaatagcggaaggccgaagctcgagtgaacttctaagagtggcccagagggcgattgcagaatgagctgctccaaggactcacgagtacagccacggatgccacctccgtattaacgccca

SEQ ID NO: 545835 - DNA, 1019 bp, Homo sapiens
atttatttacagtgaaaggcaagattccgcaatgcaaaggcaacacgagagactttttcctaccaattttctaatgaaagccagtgacagtttttttttatttggttctaagtttcatttgcttaaaatgaaaatgtattcttaaaactaaataaaaaaatatcatattatcagtatttctggctgcaagtgaatgaatacttattctgaaaagacccgtctgaatggccactctataactaccgtgttttgttagaaaagtatattaaaaagtagaaacagcatcatgaatgaagaaaagggatagaaacaaagtataaaatatgtaatcttttaaaaggaccttatcaaggagaatcttagtgaaactttaaatgggagattcatacaatcccaaagctttcttatttcctattcaatgaataatttactttttagatgagattcactaacattattgcagaataactgtaattgaaaattattaaagctctatctttattgcattttaaaactcgtgcattaggtgtttgaccaggtctgcctcatcattaagagtttgaagaaacgcaaaatctctgtctcccaaagaataaagagcaaaaacttaatagctttcttgtttcccagaaagatgctaatatgatgaactgaatgtcaggaataatagattaaatgaggtgtaacctgggaagagaaaataagaatattttatgtaaatgtcacagaacctcaggaactctttgatattatctgctggatttgactgttcattaaagtaattagggttaagaaggataaagcaaatattctttaaatttagagaaatttcataaaagatagtggcggaagattccaatacggagcaaggacaggacattccaacgaaggaacaacacacagaaacacaacaaggggaaagcagaggaaaataaacgaagaatcggaaacagagaagaacgacgaggatcacacaacgcagaacgaaacgacccacaaaaaaagtgagcacacaacac

SEQ ID NO: 545836 - DNA, 454 bp, Homo sapiens
gacgccgcatttctaaacatacatttacggatcgcatccaatccgttgcttcggccgcgcggtcgaggctagacaacggccatccggcaagcctcccgcccccggctggggagtggccgtagcccacgatcagcgaagcgggacagagctgtccgaacccccatgggcctcatcaagaccatcggccgcaagccgggcgtccagcggatcctcggcgttgccgccgcgggctatctccggctcgtgcggcgcaccaaccgcttcaccgtggagccggagggcgcctatgggcgcctcgacgcgacgggtccgttcatcgcggcgatgtggcacggccagcacatcatgatctcgttcatgcgccgcccgcaggacagggtggccacgatcatctcccgttcccccgacggcaacatcaataccctggccctgacccggctcggcgttcgggtga

SEQ ID NO: 545837 - DNA, 256 bp, Homo sapiens
  misc_feature (39)..(39): n is a, c, g, or t
  misc_feature (238)..(238): n is a, c, g, or t
gaattcggcacgagccacagaggggtccatacggcgttnttctggatcccgttgtaacttaaagggaaactttcacaatgtccagagcccttgatgtcctgcaaatgaaggaggatgtccttaagttccttgcagcaggaacccacttaggtggcaccagtcttgacttccagatggaatagtacatctctaaaaggaaaagtgatggcatctacattataaatctgaagaggacctnggagaagcttcttctggc

SEQ ID NO: 545838 - DNA, 232 bp, Homo sapiens
gcacacctcctacttctcatatacccatttcgtaccagaaaatttgaggctgggcacggtggctcacgcctgtaatcccaacactttgcggggccgagaaaggcggatcacaaggtcaggagttcgaggccagtctggcacacatagtgaaaccccatttctactaaaaatacgaaaaattagccaggtacaggccgggcgtggtggccacctgctcaatcccaggtcgacg

SEQ ID NO: 545839 - DNA, 256 bp, Homo sapiens
aattttgaggattcctttacccctttttgatttcctggaaacagctgcctgcctgcattgcacttctttttcccaggagtggggttaattttaaagtccagttatagtttggatgttagtatagaatttttaaattgggaatttaaaatcagggctgggggctgggaggcccaaaatttttgatccccttttttatggatgtgtccccccttttttgtccaaataaaatgttttggaggttttgactccttggtta

SEQ ID NO: 545840 - DNA, 547 bp, Homo sapiens
  misc_feature (185)..(185): n is a, c, g, or t
  misc_feature (208)..(208): n is a, c, g, or t
  misc_feature (251)..(251): n is a, c, g, or t
  misc_feature (298)..(300): n is a, c, g, or t
  misc_feature (302)..(302): n is a, c, g, or t
  misc_feature (320)..(320): n is a, c, g, or t
  misc_feature (418)..(418): n is a, c, g, or t
  misc_feature (461)..(461): n is a, c, g, or t
  misc_feature (470)..(470): n is a, c, g, or t
  misc_feature (486)..(486): n is a, c, g, or t
  misc_feature (528)..(528): n is a, c, g, or t
  misc_feature (533)..(533): n is a, c, g, or t
aagaaccataaggaggcttgtttgcccaggggggaacggagagaggcgggcgagacagaacagaacaccgcccacagccgaaacccaccgggggaccaaatacaggggagagaaccacacaacggaagaaccgcccccaggacaaggggaaggggccaaaacggcaacaccaaccagaggggagncaaggcagaggacccgagagccngggtctcccagactggaaccgcgcacccaggggagggcatccnaacggggacccccccaggaggcggggaagacaggaaacctcctgtcnnncncaagaagggggatgaagnccagcgtgagagtgaagaactaggggccagcagcaacaaggtggtgggaaggcaccggcacaggcccagcacataggatgagggcaacagctcccacncagcccagcccaaaaaaaggcccagtgacaggtgtggacaggngccagcccngcaagccgcctcttcncggtagaagggagaaggacagagctctcttcaagaaattcgncaggncaaagcagcaaaaa

SEQ ID NO: 545841 - DNA, 175 bp, Homo sapiens
attcatcaaatgggtcagcagtttttccctcatttcacagcgtaggctgtggcgggggctcacgcctgtaatcccagcacttcgggaggctgaggcgggcagatcacctaaggtcaggagtttgagaccagcctggttgacatggtgaaaccctgtctctactagcaatacaaca

SEQ ID NO: 545842 - DNA, 294 bp, Homo sapiens
agtgcttggggacagtcctgtgcgagctgaaaccgtcactggggaggtgccggcaacacctgtgaagagagaacgcagtggcacagagtagcagtgatgacttgatttgaagagctctaagagcactgaaaacttatatgaagtagccttgggaactacttttactactactttactacaggtttctactcactggacgtcagtaggcacgtggactacccctacaaagggacatactattgctgtgccatataccagaattccgtttgctattgacaacttctaaaactacgg

SEQ ID NO: 545843 - DNA, 758 bp, Homo sapiens
  misc_feature (640)..(640): n is a, c, g, or t
gactagttctagtcgcgagcgccgccctttttttttatttgtccatggctgattccttaatttttagtagttcggacctgtgggacaggagaccaagaacacgatgaactgaaagtaagagaaagaaggacacagccaaggagcaattaaaagaaacagcaagcggcaagaagagagacacgcggagaaaaaacccaaaagcgaccagcgaaaacaagacaccaaagacacagagaaaccgcacgagaacgcagccgcacacaccgagcaccacagcacaccagccgagacgagcaccgcagagcaaagaagcatccacaacaagacagcacacgcaccacaggaccaagcaagcgaaaacaaagcaagaagataaagcaaaagcacgacgcgagcgaacagggagacgaagaagagcgaaaagtagcagaacagaaataccagaagcagcgactcgaagcacaacaagcgagcgagctagacaagacgagagacaccagcacacagaacaacgtagacagagacacgagcgagcaaagcaaagaaaagagcagacgagcagagcagcaaatgagccagagacagaagagcaagagacaagaacacagacaagagagcaaaactaccggagcaccagcanatacaccacaagaagcacagacaagaatcaagcacacaagcacagacgagagacgacaaagacaggacgccagccacaaggagcgacggagcacagctacatatcgaactagcgaaac

SEQ ID NO: 545844 - DNA, 608 bp, Homo sapiens
ggggctcttctatttctaattgctccttccatggccgcttatcgcccttgttcgcggtgttatgtctgtgtatggaaattatctagggtcatcatttgtccttgcgcactgtgccctttgtgtttaattgtcttctcttgttgcctttgaagattattccagtaagagatcagcattccgtgactattgttcgcaccaggcatggtcctttgaactaattggcctcaagcagtcctctcgatcctcccgccttggcctccctatagtgctgagattacaggtgtgagccactgcatctggcttactgtacttattgtctacttgtcatgtctccactagataatgtaaagtcttagagagcaacgaatttttgtttaatttctgttctcttcctcctttcctttcttcctgctgtttacttcgttcagcctactgtattccacatataaatatattatggcatatagtaggtgttcaatatgttgaaggaatcgatagaatttatagacttgagttgcaatatacaatgtatttattatctctactgtgagttatggcaaaaaaagttttgcaagccgcttcataactaactgcggatgtccagtgct

SEQ ID NO: 545845 - DNA, 370 bp, Homo sapiens
gacctccatctcaagaaaaaaaagaaacataaaaaaagaaaaagaatgtaatatttaaagatgattttactgtgtaaaaagtggtgttccatttattatcttagcgctttgtgttatcatctcaatgaattactgttagttacaaatttgattagccctatagaaatcaaatgcacccacctgaccaacaccgtaaaaccccgtctctactacaaatacaaaaattagccgggcatggtggcaggcacctgtaatcccagctactcaggaggctgaggcaggagaatcacttgaacccaggagatggaggttgcggtgagcaagatcgtgccattgcatctagcctaggtgacagaacaagactcgtcga

SEQ ID NO: 545846 - DNA, 682 bp, Homo sapiens
taacatagttaagtaacagaactggattgagcaacaaatgagatgcactaaggtctgtaaacattataaccctaggtatgtaggtgagtagaagggtgacctaagagcatgctaaagtaagtgatatgtcatatttatggggctattcaagaccacagtcaaagaataagaacccaagccgtgagtaacatggcaaaatcccatctgtacagaaaacacaaaaattagccaggcgtggtggtgcacacctgtagtcccagctgctatggaagctgatgtgagaggattgtttcagctcaggaggcagaaggtacagtgagccgagatcatgccactgcactcgagcctggacagcagagtgagaccctggcttaaaaataaagacaagaaggagagagacccatatcgatgaaatcttagtactaaaccctgatatcaaatacctaggtgacaaggcaaaaaggtcaaatgtgctagctacttggcctagttattcccaaggtcccaggtgtcagaacacgatttgagatacagataagccataaaattgtccatagcaattatctctaggcacgcagagacttgcaaggacttggccacgatgaccgtaatcacggggacagggccttagcctactgtgctgcatgtgtgccgtgagctgagataatgtgtggtgatgcgg

SEQ ID NO: 545847 - DNA, 284 bp, Homo sapiens
  misc_feature (97)..(97): n is a, c, g, or t
aacgggcagtgaatcgagctcgtgtaccaggcgttgcttgtgttggcaggtgaaacagcgctcacacaccacagaacaaaacagcaaaagtgtagantaacgacatgtgtttccagagcaataaatagaaatgggggaaattacaactgttttggaacagtaaagatagtcagacaacataaccaagaagcaactaaggctcagagccagtagctgttgcccaagggtcataagagaactcagagccaggccgggcacagtggctcacgcctgtaatctcaaca

SEQ ID NO: 545848 - DNA, 458 bp, Homo sapiens
ctagctacaagctcaagtgtagacgtgccatcataagactcttaccacgaagaggcaattcatgaagatcaaaagaggaacaaaatacacagcagctagaaagtaaagacgtgtctgaatcaatggaatctgtgctgctgtcaaaagttatggaacaaggagtaccagaaaaggcagagacaccacctcctgttgaaccagaagacgaagacgatactgaggactgctggactaggaggacgggcagggaacacttcattgcacgaccttttaccacgctattaaaccacggatactactttcacaaacagtctttatattaaatactgagtacatattataccctgtcccggacacgagacttaggcagacagatagtaggtaatgtgggactcagaagcagcttatggtttacgataggagagagttgacagattctttcacgttgacaggaagga

SEQ ID NO: 545849 - DNA, 85 bp, Homo sapiens
tggtgtaaacatatagggtctgggtcttcgcagtcccactggatgcctgagccccgaagcatcactccactaaaaccatagttaa

SEQ ID NO: 545850 - DNA, 475 bp, Homo sapiens
ccgttgctgagaacatgatcagagtacagaccaactggatgtgttgaggaagagacgctaatgctatggtgtgagttccaatgtgccatcagactgtcatgagtaaatgttgcacgtcgatgtatactgtttcaggggcatttgattcactatgtgcatgaaatgttccatcctcccctggcttggactcacgcttctgttgtcggcagttttcatatccttcttggctctcttgccagaagctgcatacctactgacgctgttgtcttcaggtattgcggtgatttcattacgtggaaaagccatggcaataatctgtgatagctaggttatacactttttcaaaatgttctggtttctctcctctcttggctctgtttcagacaaacttaagctggtgattttccaacataatcagatttctccttgcacttccttttaatccaatcattaacaagccattcaagcccactga

SEQ ID NO: 545851 - DNA, 738 bp, Homo sapiens
cgcacggcgagccgcggggggttcggatgctgttgataagagtaatgaatggtgaataactaccaggaaagtaatagatccaacagacagtataacagctaattcacaagtaaaacaaatacagtcagagcctgaaagtatccgtaaatggagagaagaacaaatggaacgcttggaacccttaaaccaatacacaaaacaagaagcagagtggaaagaaaaggcaataaaggagctagaaagaatagaatatgaagacaggacagagcagcaacaagaaaacaaaagcaaacaacaagaagcacaaaaaaaaggccgaagaaaaaaaagcaatagacgaaacggccccaaactactaaagaagaacaaagaaaccgaagaaatagagaaaacctcgcaaggacaagcaattcgaatgcatagaatagaaacacccgtgaagcgcgactggaccacaaacagggcctagaaacgaaaccccgactaggaacagcgaaatgagaggcatgccaagtggaagacaggaagcagacgaacgggaaaactgaaagaccgaatgcatggaaaagcactaacacagacaatgaatgaaaatgtaaaagaatggaacaatgaaaacctgaaccataggaacaatagaggaaatatcattgtttgtgattgcatgtttccttccttcaactgtgttctccctggcattcagagaggagggagaggaggaagaggaaggggagggaa

SEQ ID NO: 545852 - DNA, 201 bp, Homo sapiens
ccggtttgagcggtctcattgaggcgcagtggttaacgaatccactgagaaccatgaggttgtgggtttgatccctgcccttgctcagtgggttaaggatccagcgttgccatgaactgtggtgtaggttgcagacacggctcggatctggcatggctgtggctctggcgtaggctggcagctacagctcctattagaccc

SEQ ID NO: 545853 - DNA, 153 bp, Homo sapiens
cacaaacttcaggaaaggattatgcactcgagcagaccgggcgagcagagcaagaagcagtctcactgtgtcgcccaggctggagtgcaagaggcatgaactgggctcacaactgcaacctccgtctagagtgctcaagcgacacatctgtcg

SEQ ID NO: 545854 - DNA, 187 bp, Homo sapiens
tttttagtcacaaccatgttctgaacagaaagttgatgtttccattctccctagaagtaaactttgccggctctgtggccggttttcttttttactcttgagtcaaatcatcaaggctggaaaagctggtgacagagttttatctacagcaggctcagctttggtttgagcagcaagtacaccaaga

SEQ ID NO: 545855 - DNA, 84 bp, Homo sapiens
agctgtacgattacttcatctaacggtcccgtggtggctacacatcctgggcaccctgacttctggggccttccctctgtcttc

SEQ ID NO: 545856 - DNA, 119 bp, Homo sapiens
agatctctccgactggcagagcgtggtctgtggaagggtctcccttctcgggctcggggatgtcaggaggggagcgtgctggagggcagcgcgagggcgcgctcatagcacttgcagag

SEQ ID NO: 545857 - DNA, 913 bp, Homo sapiens
ggaggttttgactctcgtggcgccccagggccgacgggagtggcggccgcgcggaggaggccaagatggcggcagctgcggcttcgcttcgcggggtagtgttgggcccgcggggcgcggggctcccgggcgcgcgtgcccggggtctgctgtgcagcgcgcggcccgggcagctcccgctacggacacctcaggcagtggccttgtcgtcgaagtctggcctttcccgaggccggaaagtgatgctgtcagcgctgggcatgctggcggcagggggtgcggggctggccgtggctctgcattcggctgtgagtgccagtgacctggagctgcacccccccagctatccgtggtctcaccatggtggtgaggactacgtcttctccctgctcacgggctactgcgagccacccaccggggtgtcactgcgggaaggtctctacttcaacccctactttcctggccaggccattgccatggcccctcccatctacacagatgtcttagagtttgacgatggcaccccagctaccatgtcccagatagccaaggatgtgtgcaccttcctgcgctgggcatctgagccagagcacgaccatcgaaaacgcatggggctcaagatgttgatgatgatggctctgctggtgcccctggtctacaccataaagcggcacaagtggtcagtcctgaagagtcggaagctggcatatcggccgcccaagtgaccctgtccagtgtctgcttgccatcctgccagaacaggccctcaagcccaagagccatcccaggcctgttcaggcctcagctaagcctctcttcatctggaagaagaggcaagggggcaggagaccaggctctagctctgggccctccttcagcccccatcatgggaataaattaattttctcaatgt

SEQ ID NO: 545858 - DNA, 476 bp, Homo sapiens
  misc_feature (417)..(417): n is a, c, g, or t
  misc_feature (449)..(449): n is a, c, g, or t
  misc_feature (473)..(473): n is a, c, g, or t
cattgtcaaaagtgaaaaggcatacatccttgtttctttaccttgagggtgcagccctgaagagtgaagacagtgacgagtgatagagcacaggaaacactctaatagtgaagtatggtccccattatgatgttaagaagaaggaagtaaacaatatggatttaaggagcataaaaaggggatggtaaatataaagtaataatgacaaaaactatctgtgaacaaaaatgaatgctacaattaatcttagaagggaagttcaggaaaagctaaaggaaattgatagtttaataaggaaaaatggggcagagatgtttggatgggtcagaagttctgggggttcccagagcttagtttaacacatccaggtttaggaggattccttaaaggtttaggatggagcctttttttaggaanttccttcctttaaaaaaggaaagttttttccncttgccccctttcctttccccccntgg

SEQ ID NO: 545859 - DNA, 1255 bp, Homo sapiens
  misc_feature (132)..(132): n is a, c, g, or t
  misc_feature (561)..(561): n is a, c, g, or t
cgctcgttgactgtagtgtgggggggggagtgttccagatcacggttggggccacctgtgtttttgtttttgagccgggagatatatatctctaaccgtttctctcttcgtgaacagcccctgttcgggggngttgatagtttcacataaatttttttggggtgtttttgccccgcccataatggggctccgtgtggctcctataagagcctcaccggggttcatccacctctgatgtgtggtcccccctcggggtggttgcccccgtaatatgctcggttaaaaatttggggtgcccccaattgtaagcaagccttacactcgttcaccttggggttttacacccacctttcgaggatgtttcacatgtcgctgtcgctgttcccctgggctctccgagacacacctctttcgggtgacacacacatttgccaaagggcacacttcacagagggtcaccaccgaggttctcgcgggcacagaatcggtcaccgcacacctctgcacattggggagagccccacaggggccccgggcacacacagacacacacaggggctnttcacacagtggagagggcacacccgcacaggggccccttgggggctcgagagccaccgcttcttccgtgttgtgttcacaggcacagctgatatcgcacacttgtgctgtcttgtcctcttgtgtgttatcgtgtgtgtggtgtttgtgggtgtcttttagtgtgtgttaaataattgtaatgtctgtgtgtgtatagagagacacacaggcgctctcttgctgtctctgtgtcgcctcggggtcttggagagaacacacactgggcgcacaccacttcactaggctgtcacactgcacgctctcccaagactctcctcggggctacaaaagacagagtcctctccccgcgctcacagcctctctctcgaggttaagctcgggagactacacacaggtggtggcacaccacaccaccacacccacagccacaaatcacgccacttccttcccctctgagagttcattcagagaaaatacacttaggagaaatgtgtttagaaatataaagcacacaaggcacgggcacgtggcttcaacgccctcgtgtcattcccacgcacacttttgggaggccgcagacgggaggatccgcttgaggtcacggagatttgagacccacctcggccacctggccaaattttgtctcttttttttggtattataaaaaatcataaaaattaaagaaataaat

SEQ ID NO: 545860 - DNA, 981 bp, Homo sapiens
ggaggttttgactctcgtggcgccccagggccgacgggagtggcggccgcgcggaggaggccaagatggcggcagctgcggcttcgcttcgcggggtagtgttgggcccgcggggcgcggggctcccgggcgcgcgtgcccggggtctgctgtgcagcgcgcggcccgggcagctcccgctacggacacctcaggcagtggccttgtcgtcgaagtctggcctttcccgaggccggaaagtgatgctgtcagcgctgggcatgctggcggcagggggtgcggggctggccgtggctctgcattcggctgtgagtgccagtgacctggagctgcacccccccagctatccgtggtctcaccgtggcctcctctcttccttggaccacaccagcatccggaggggtttccaggtatataagcaggtgtgcgcctcctgccacagcatggacttcgtggcctaccgccacctggtgggcgtgtgctacacggaggatgaagctaaggagctggctgcggaggtggaggttcaagacggccccaatgaatggcccctcccatctacacagatgtcttagagtttgacgatggcaccccagctaccatgtcccagatagccaaggatgtgtgcaccttcctgcgctgggcatctgagccagagcacgaccatcgaaaacgcatggggctcaagatgttgatgatgatggctctgctggtgcccctggtctacaccataaagcggcacaagtggtcagtcctgaagagtcggaagctggcatatcggccgcccaagtgaccctgtccagtgtctgcttgccatcctgccagaacaggccctcaagcccaagagccatcccaggcctgttcaggcctcagctaagcctctcttcatctggaagaagaggcaagggggcaggagaccaggctctagctctgggccctccttcagcccccatcatgggaataaattaattttctcaatgt

SEQ ID NO: 545861 - DNA, 133 bp, Homo sapiens
tatgagcagcagcaggatactgctgacattgccattgtggtcccagccaccatgcccattgtgagcccgttgcctctaggaggggggattggagcagggtacaccgttgcaggcatgccgttgggctgcagga

SEQ ID NO: 545862 - DNA, 223 bp, Homo sapiens
  misc_feature (91)..(91): n is a, c, g, or t
tctaaggatcctggcgcggatctcagagagacagcgatggggagagatgagacgagctgtcccagccaccatcacttgggagcggtgaccnagaagattcctctaaggataggtgcagggtgctgagagatgagctgacctggtacgtgggcagagagagtcagcacgagtcgacgcaggagaaggggggaggagagcgttgatgacaggaatccggcggcga

SEQ ID NO: 545863 - DNA, 1417 bp, Homo sapiens
ggaggttttgactctcgtggcgccccagggccgacgggagtggcggccgcgcggaggaggccaagatggcggcagctgcggcttcgcttcgcggggtagtgttgggcccgcggggcgcggggctcccgggcgcgcgtgcccggggtctgctgtgcagcgcgcggcccgggcagctcccgctacggacacctcaggcagtggccttgtcgtcgaagtctggcctttcccgaggccggaaagtgatgctgtcagcgctgggcatgctggcggcagggggtgcggggctggccgtggctctgcattcggctgtgagtgccagtgacctggagctgcacccccccagctatccgtggtctcaccgtggcctcctctcttccttggaccacaccagcatccggaggggtttccaggtatataagcaggtgtgcgcctcctgccacagcatggacttcgtggcctaccgccacctggtgggcgtgtgctacacggaggatgaagctaaggagctggctgcggaggtggaggttcaagacggccccaatgaagatggggagatgttcatgcggccagggaagctgttcgactatttcccaaaaccataccccaacagtgaggctgctcgagctgccaacaacggagcattgccccctgacctcagctacatcgtgcgagctaggtacacgggctgcccatggggtggtgctggagagatgggggaagggctgacttgtgcttggaactaaggagccatggatctggtcctaggcatggtggtgaggactacgtcttctccctgctcacgggctactgcgagccacccaccggggtgtcactgcgggaaggtctctacttcaacccctactttcctggccaggccattgccatggcccctcccatctacacagatgtcttagagtttgacgatggcaccccagctaccatgtcccagatagccaaggatgtgtgcaccttcctgcgctgggcatctgagccagagcacgaccatcgaaaacgcatggggctcaaggtaaaagggttgggaggccatggtgggtatcagagaagggctgggagctgggcagggctcctccccactcccttctctgagccttccttgtctgcagatgttgatgatgatggctctgctggtgcccctggtctacaccataaagcggcacaagtggtcagtcctgaagagtcggaagctggcatatcggccgcccaagtgaccctgtccagtgtctgcttgccatcctgccagaacaggccctcaagcccaagagccatcccaggcctgttcaggcctcagctaagcctctcttcatctggaagaagaggcaagggggcaggagaccaggctctagctctgggccctccttcagcccccatcatgggaataaattaattttctcaatgt

SEQ ID NO: 545864 - DNA, 280 bp, Homo sapiens
tggaaggataaaccataaaattaaaaaaaaaaaagatttcatctgaaagagtgagtagggtagaagagtcaggaatatgaacaagaatcctctgtagaatgacttcaaaattctacataattctgtcacacaattatagataaatttaaaaagcagtaattcttaaacaataaaattttttttaaaaaccaaatgagctgttggtgtaattacacacagaagtgagtgtaataatttaaaaacacagtaatttgactgtcatccctactatggtataacc

SEQ ID NO: 545865 - DNA, 179 bp, Homo sapiens
gtatgtaataccagaataagggccagatatacaggcactaggcggtggaggcatatacctgggcccaggtcacgtagccaaccatctacctgtacctagactatcacggacaaggcgaatactatgaagcccaggcagcaggggtacatagaacagggcgtagaaaacgggacccagac

SEQ ID NO: 545866 - DNA, 984 bp, Homo sapiens
cggacaccaatagggctaggtactgaggccctgggtttttgtgctggagtgagtgcaagatggcggcagctgcggcttcgcttcgcggggtagtgttgggcccgcggggcgcggggctcccgggcgcgcgtgcccggggtctgctgtgcagcgcgcggcccgggcagctcccgctacggacacctcaggcagtggccttgtcgtcgaagtctggcctttcccgaggccggaaagtgatgctgtcagcgctgggcatgctggcggcagggggtgcggggctggccgtggctctgcattcggctgtgagtgccagtgaccgtggatgcttgcacaccccgccagcatatcctgtggtctcacctcgtggcctcctctcttccttggaccacaccagcatccggaggggtttccaggtatataagcaggtgtgcgcctcctgccacagcatggacttcgtggcctaccgccacctggtgggcgtgtgctacacggaggatgaagctaaggagctggctgcggaggtggaggttcaagacggccccaatgaatggcccctcccatctacacagatgtcttagagtttgacgatggcaccccagctaccatgtcccagatagccaaggatgtgtgcaccttcctgcgctgggcatctgagccagagcacgaccatcgaaaacgcatggggctcaagatgttgatgatgatggctctgctggtgcccctggtctacaccataaagcggcacaagtggtcagtcctgaagagtcggaagctggcatatcggccgcccaagtgaccctgtccagtgtctgcttgccatcctgccagaacaggccctcaagcccaagagccatcccaggcctgttcaggcctcagctaagcctctcttcatctggaagaagaggcaagggggcaggagaccaggctctagctctgggccctccttcagcccccatcatgggaataaattaattttctcaatgt

SEQ ID NO: 545867 - DNA, 257 bp, Homo sapiens
  misc_feature (49)..(49): n is a, c, g, or t
gccgtataaatagccgacgcaaatggtatgttgaattcttaaatagtangacttgaaagtcaaattactccttgatgcatgggcttcagaatggattatgtgttagcagacataaaaacaacactaatttcattgcacatctccatcagagctctttgggtgaccaggtagattgtcaatgagcaataatcccaggctaggggtcaaattagagctacagctgccggcttataccacagccacagtaactcgggatc

SEQ ID NO: 545868 - DNA, 1117 bp, Homo sapiens
  misc_feature (1057)..(1057): n is a, c, g, or t
ggaggttttgactctcgtggcgccccagggccgacgggagtggcggccgcgcggaggaggccaagatggcggcagctgcggcttcgcttcgcggggtagtgttgggcccgcggggcgcggggctcccgggcgcgcgtgcccggggtctgctgtgcagcgcgcggcccgggcagctcccgctacggacacctcaggcagtggccttgtcgtcgaagtctggcctttcccgaggccggaaagtgatgctgtcagcgctgggcatgctggcggcagggggtgcggggctggccgtggctctgcattcggctgtgagtgccagtgacctggagctgcacccccccagctatccgtggtctcaccgtggcctcctctcttccttggaccacaccagcatccggaggggtttccaggtatataagcaggtgtgcgcctcctgccacagcatggacttcgtggcctaccgccacctggtgggcgtgtgctacacggaggatgaagctaaggagctggctgcggaggtggaggttcaagacggccccaatgaagatggggagatgttcatgcggccagggaagctgttcgactatttcccaaaaccataccccaacagtgaggctgctcgagctgccaacaacggagcattgccccctgacctcagctacatcgtgcgagctaggtacacgggctgcccatggggtggtgctggagagatgggggaagggctgacttgtgcttggaactaaggagccatggatctggtcctaggcatggtggtgaggactacgtcttctccctgctcacgggctactgcgagccacccaccggggtgtcactgcgggaaggtctctacttcaacccctactttcctggccaggccattgccatggcccctcccatctacacagatgtcttagagtttgacgatggcaccccagctaccatgtcccagatagccaaggatgtgtgcaccttcctgcgctgggcatctgagccagagcacgaccatcgaaaacgcatggggctcaggtaaaaggataggaggacatggtggtatcanaaatggctggagctggcaggctctcccactctttttgagcttcttgttgagagtgatata

SEQ ID NO: 545869 - DNA, 687 bp, Homo sapiens
ggaggttttgactctcgtggcgccccagggccgacgggagtggcggccgcgcggaggaggccaagatggcggcagctgcggcttcgcttcgcggggtagtgttgggcccgcggggcgcggggctcccgggcgcgcgtgcccggggtctgctgtgcagcgcgcggcccgggcagctcccgctacggacacctcaggcagtggccttgtcgtcgaagtctggcctttcccgaggccggaaagtgatgctgtcagcgctgggcatgctggcggcagggggtgcggggctggccgtggctctgcattcggctgtgagtgccagtgacctggagctgcacccccccagctatccgtggtctcaccgtggcctcctctcttccttggaccacaccagcatccggaggggtttccaggtatataagcaggtgtgcgcctcctgccacagcatggacttcgtggcctaccgccacctggtgggcgtgtgctacacggaggatgaagctaaggagctggctgcggaggtggaggttcaagacggccccaatgaagatggggagatgttcatgcggccagggaagctgttcgactatttcccaaaaccataccaaaaattagccgggcgcggtggcgggtgcctgtagtcccatctactcgggaggctgaggtaggagaatggcttgaacccaggag

SEQ ID NO: 545870 - DNA, 315 bp, Homo sapiens
  misc_feature (15)..(15): n is a, c, g, or t
  misc_feature (98)..(98): n is a, c, g, or t
  misc_feature (150)..(150): n is a, c, g, or t
aaaaccccccccggnggtggtttttttccccccaaattgggggggggggtttttccccttcttccccccccaaggcctttaaaaaaagggccctctcnccccacaaaagttatgtgggtcccccccccccccccctttttaattcacggnccggtcaacaggaattaaaattttggaaatttttcccccccccccaagaatgtaaactccatgaaggcccagacttttttttgttttttttttctatcccaaaagtaagaccacacttgaacctggcaaaaaggagctgcttaataaaaacttgtttgtcaatga

SEQ ID NO: 545871 - DNA, 597 bp, Homo sapiens
ggaggttttgactctcgtggcgccccagggccgacgggagtggcggccgcgcggaggaggccaagatggcggcagctgcggcttcgcttcgcggggtagtgttgggcccgcggggcgcggggctcccgggcgcgcgtgcccggggtctgctgtgcagcgcgcggcccgggcagctcccgctacggacacctcaggcagtggccttgtcgtcgaagtctggcctttcccgaggccggaaagtgatgctgtcagcgctgggcatgctggcggcagggggtgcggggctggccgtggctctgcattcggctgtgagtgccagtgacctggagctgcacccccccagctatccgtggtctcaccgtggcctcctctcttccttggaccacaccagcatccggaggggtttccaggtatataagcaggtgtgcgcctcctgccacagcatggacttcgtggcctaccgccacctggtgggcgtgtgctacacggaggatgaagcttaaggaagcttggcttccggaaggttggaggtaaaaagccggcccccaattgaggttgggggaaattttaatccgcccagggagcgttgttgggatt

SEQ ID NO: 545872 - DNA, 159 bp, Homo sapiens
tgcggacccctatcccttcttatatagttttaagcggggagaagacagaaaaagactcgattttcttcccttccactaccataacaggctaaacacaccgcaacacttagcttagcatttcttttcttttcttttttttttgagaaagagtctccctct

SEQ ID NO: 545873 - DNA, 332 bp, Homo sapiens
cacatatataggtaaagctctaagactcctgagacaacttttatgtaactggcttacctaggggggggcttgaactaagtaaagaagccaaggagtccagatctagatagcagagaagtacgtctcatactaaaacattgcaactactgttagagtccaccccttgaagctgtaacagatggtgtatcttagactgaattctataagtatatatggtaccagcactaaaacaaatgttgctcagctaaggtgggctgtcgcttgctcagtaggaaatagacagactccagcttacaccctctgggaagcacttggacctacagtgccaaatg

SEQ ID NO: 545874 - DNA, 957 bp, Homo sapiens
gctaggccgtgttggggaaatgtaattccgttgttgaccatgggtccatgagtgccgtcggccttcgatcattatgaacgcccttgcgtcatcatcaaggatcatggaccgcaagtgcagtatggcactgtgaggcgccatcaagtctcttattcagtgggtgcacttagggtggtactgcaaataccttgtgcggatccaatcagcgttggcccaaaatgagcttgatacagatgtgagttggaaaagaagctggcgcaattgtagactggtaagctagttgatgggctggccaccgatcattagtgcattgatggatgtagttcattcagattgccaggctagatggtggaacttgtcgaagtcctccagcagattcgtggcatcgttcccgggccatgggaaaccaaccagggagggtgggtttgtcgatgataaaagatcgcttagcttgagcaatgaagggggaaccagtgtgttaacagcggaggagattgcatctcaaattcgagaaataacgcctgatggctttattaaggcaggagtggtccggagtccgtttttaggtagcaacctggagccagaggatcgagaagaatacgttgacgttttttcgacgataaaaagagcgaacaacgcgaacctgcttgtttttcaagaacaacggtaaacaccagagctggggttcacaaactgtgcttccacgccgtgcttgtctgccgtcacgggatggttgagagatcggcgcggtgaaaatggccagccattcagtggtgaccaaattatggagcgggaagaaacacatgtctctgtgaagcttttccaatgtagacaaggccaatgtggggagacgcctgtgggaaacagtacaaagtggttaagggggctgtgtggtgagaccacggattcactttccccacgcgatgttcgaaagacgtgggatcctcagaatggcgc

SEQ ID NO: 545875 - DNA, 909 bp, Homo sapiens
  misc_feature (909)..(909): n is a, c, g, or t
gcaaaggtcgtgcgtgagattggaggccgcgcggggtcccatggatctggagccatgtctggctgtgatgctcgggagggagactgtgttcccggagatgcggggcgcaagacaaggagcatcgaggatacctgatccgagaactgtgcaaagagttatagctcatttaggctgggtcactggggactggaggaggaatgaagtcttgagagcatgtgagatgaaatactacatttgtgctttgtcaggagtgcaaatggaatgaattcatgcggaagacatgtagtgagtgatgtatatgggaaggacataagtggagcttcgccatcgaagaagctactaaacatgccaggagtgactcctctgttcatgaactgctttagctcaggtgagaggtagcaggttgcagtgaattcataaccattgtaaagtctgtgtgatggccaaattctctttccaggaacgggagttagaaaattacacagtcaggagatgattgccggatttaagaactgtcgtgcggagggggattggtagagtatgagtgatatgttagtggttacgccattttgagaatcttgaggagaaggagctggaagatagaatggctcatgcaggaatgacgaccaggactcctgtggcggactgaccagacgtctgcagtatatgtgggggggaacatggagaaggcacaccatgtggtgaggtctgccaccatgacacgccgatcacgaaccgcggatgacctccagcccatgaaaggatgcacccaaaagctaaattacgggaaggacgaaaatcacgacagctagcgaagtgagggccaaggcaagaggccgacacaccgagggaacacaaggcggaaaactcgaacgaagggttagaaagggtaaaaacgcggcacggacn

SEQ ID NO: 545876 - DNA, 501 bp, Homo sapiens
tgagacagagtcttgctctgtcacccaggctggagtacagtggcatgatctcaactcaccacaacctctgcctcctggttctcctaaatcgctgaagcgattctcctgcttcagtctcccgagtagctggggttacaggcacaagctaccacgcctggctagttttttgcatttttagtagagttggggtttcaccatgttggccaggctggtctcaaactcctgacctcaagtgatccgcccacctcagcctcccaaagtgctgggattacaggtgtgagccactgcgctcagcctagaaatctttaaggtgcaataaggtttttttgtttgtttgtttgttttaacttcttgaaaaaaaatagagacagtgtctcactatgttgcccaggctggtctcaaactcctggcttcaagagatcctcctgcctcagccttccaaagcgctgggattacaggcgtgagccaccatgcctggccatgctgtcgacgcggccgcga

SEQ ID NO: 545877 - DNA, 560 bp, Homo sapiens
ggggctccttccgcgagttagtgtatcaaagagtgggtggggccagggccttttggactggcccggggggggtgtgggggcccattggggttggaagccaatggcttggcccctttactggggggcgggttgtgttccaggtttcccgaatttgttcagggggttaacccgttccgctccagccctttttgttcgggggtgtcagctgttcttttgcttttttaagggaaggcttggccccggcctgaagctttgggcttttgccctttttcatccgggccttgccatagtcagccacggtttggaggcttcttgaaacccggcttttcaccacgggtttttttgtcttgtttccccccaagttctttctaggtttgaaactgttgggtgcctcccatttgttgtcgcgtcgttttttgtttcccctccgggtggcggcgcctcttccccgcgtttttgtctttgttgctctcgcccccccccgcttattcggcccactctccgggcccccaccactggtcggtcttcctcgaacaaaacaacagcctctccccgtcccg

SEQ ID NO: 545878 - DNA, 148 bp, Homo sapiens
ccctggatctcgctgttgctgctgtcgctgccattgccattctctgaacagcccctgggctggtgcactgtgagtgtccgaccctcggaccccgctttcagcggagtgaggggtgctgagtcggtcacttggtgatgcgtgggacgaa

SEQ ID NO: 545879 - DNA, 156 bp, Homo sapiens
aaaaggcataactgaccaagctgtgcttcctcgagagctctttgccctgctgcaggtctgcgtgggcaggagggcaaatcacagtgtgcgaaggaacgcgcggggtaggggattaattcgccccacatgaggaaccccattctcctgttgttgccc

SEQ ID NO: 545880 - DNA, 127 bp, Homo sapiens
caatagcgtttgtggtcatgtcctttcgatgtttctccaagtgttcttcataactgcggatcttgacagacaaggcaataattcgagcctccaggatctggtgtcctctgggtttgcaacaatcttc

SEQ ID NO: 545881 - DNA, 721 bp, Homo sapiens
cagtcatggcggcggcagagctactacgccggcctgatggctgaggagcccgccccggagtgctgagtgctctggccgcagcccgggagcggagcagctgcttcttgagctggctggagctggtgaagcagtggtgccgaggcgcgcgtgttccgtggcctgcttccagtggccgctgcggcggtgatcaatgcacctgcttccccaaggtgctacctggcaccctggctgcttgtggaggcgctggttggcagactggctggacgtgtgcaagtgatggccctgggctgctcctccgctgtcgccgcgctggtaaggaatatcttgccccagtttgtcttttttgtggactatgcttccaactgcttatatatggaagaacaattgaaggctcagtgactgttcgagattatattcagtccactatggagactgaaaaaactccccaggtctctccaacttagccaagacaaattgggcaggttttggctcgaatgcacgatgaagaacctcattcatggtgatctcaccagctccaacatgctcctgaagacccccctggaacaagctgaaacatttgtgctcataggactttgggctgagttacatttcagcacttccagaggaatacgggagtagacctctatgtcctggaggaaggcttcctcaggtacccaatcccaaaactgaaacctggtgtttgaaggcctttctgaagaag

SEQ ID NO: 545882 - DNA, 509 bp, Homo sapiens
ctgctgatcttgagatcccataaatctggaaatcgcagtcgtcattgcttaaaggtgtctaggacatgaagtccttgccccgcctatctcctgaatagggaatgcctaggtttgcttactagggtttccatggttttaggtttaacgtttaaatctttaatccatcttgaattgatttttgtataaggggtaaggaagggatccagtgtcagctttctacatatggctagccagttttcccagcaccatttattaaatagggaatcctttccccattgcttgtgtatctcaggtttgtcaaagatcagatagttgtagatatgcggcattatttctgagaggctctgttctgttccattgatctatatctctgttttggtaccagtaccatgctgtgttggttactatagccttgtagtatagtttgaagtcaggtagtgtgatgcctccagctttgttcttttggcttaggattgacttggcaatgcgggcactcttttggtgccata

SEQ ID NO: 545883 - DNA, 464 bp, Homo sapiens
  misc_feature (42)..(42): n is a, c, g, or t
  misc_feature (53)..(53): n is a, c, g, or t
  misc_feature (71)..(71): n is a, c, g, or t
tttttgtatgttaattttggtcacccttattgaaaccttatnttaattatganagtttttcaattgattcntctttggttttccttctctatccattggcaaatagtgatggtttacccttacccttctgatatagtttggctgtgtccccacccaaatctcatcttgaactgtagttcccataatccccacgagtcatggaagggacctggtgggaggtaattgaatcacggggtagttacctccatgctgttcttgtgatggtgagtgagttctcatgagatctgatggttttataaggggcattcctccttttaattggcacttctccttcctgccgtcatgtgaaaacggacgtgtttccttccccttccgccatgactgtaagtttcctgaggcctccccagccatgctaaactgtgagtcaattaaacctctttcctttataaactaaaaaaaaaaaa

SEQ ID NO: 545884 - DNA, 114 bp, Homo sapiens
  misc_feature (77)..(77): n is a, c, g, or t
gggatcccctagagacgtgtgcaatgagacgagatcacgccacttgaatccagcctgggcacagagagaggctccantctcaggaaaaaaaagaaagcgagagacgacagcacg

SEQ ID NO: 545885 - DNA, 603 bp, Homo sapiens
  misc_feature (16)..(16): n is a, c, g, or t
  misc_feature (24)..(24): n is a, c, g, or t
  misc_feature (150)..(150): n is a, c, g, or t
aacagagggtgccatnaaagattngttcaccggtggaaatgcttccgctgaaggtccggagggcgaaggtaccgaaagcacagtagtcaccggtgttgacattgtcatgaaccatcacttacaagaaaccagcttcacaaaagaggcttncaaaaagtacatcaaagactacatgaaatcactcaaaggcaaacttgaagagcagaaaccagaaagagtaaagccttttatgactggagctgcagagcagattaagcacatccttgctaatttcaataactaccagttttttattggtgaaaacatgaatccagatggtatggttgctctcctggactaccgtgaagatggtgtgactccattcatgattttctttaaggatggcttagagatggagaaatgttaacaaattggatctatcacctgtcaccataattggctgctgcttaccatccatacaacaccaggacttaggacaaatgggactgatgtcatcttgagcttttattttgaccgtgatttatttggagtggtggcattgtttttttaaggaaaaaaaacatgtcatgtgggttgtctaaaaataaagtgcatttaaatcca

SEQ ID NO: 545886 - DNA, 408 bp, Homo sapiens
taatccataatgtgtgccagtgaagactataagtcaggaggacattctagtctgcacatgataacaaaaagatgggcgttcctgcagatcatatgggggtaaaaagaaaaaaaaaaaagggtgggcccggaccaattggtgtgaggaatgcaaaatgaacgcagttgaccagtaagtgtacaaggtgaaagcctagccacaaaggagaagaaggttcatttaggtgagagccagggagaagacccaggatttctgataaaacaccattgggatccctagtctaatcgcctgagtgccatctctaagtgaaccttatgcacagcagggaacagtgacgaaagaaactacagccaagttggttccccaaaggtcagagaggttaagcagaaaggggcacactttatggag

SEQ ID NO: 545887 - DNA, 330 bp, Homo sapiens
  misc_feature (246)..(246): n is a, c, g, or t
gtaacaaccaacgccccctggacccacgccaatactaaccgcccctcaggagtactaaacataaacacactttcagtgcaccatctgcaaaaaagcttttctgcagagtccagactttgggaagcatcagagacctcaaacaggagagcagctctacaaacaaaattactgcagaaaaactttagtgactcctcaggactgggataccacaagaaaatccacacagaagagaaaccctataaatgnctatctccgagaaaagtctcatccaaagatccaactacagcagacatcacagggctcgcactgaagagaaactttatgcaagtc

SEQ ID NO: 545888 - DNA, 719 bp, Homo sapiens
agcggctggtctcgaactccttacctcaggtgatctgcttgcctcagcctctcaaagtgctgggattacaggtgtgccaccgtgcccggccaagatgggagtatttctatggccatttcacatatgggagaacagtctcactcacaattgagcagcttgcccagctaggagcagtaacaacacggataccctccagctttggagagccacaccctacaactggtccaacggctggtcaggaccgtgtcctccttcctccatccttgtcttggtgggcccatggatatgtggcagtatctagcttcaccctcaggagtggcccgaaccctgtctggagtccagctcccttctcaccatcctgaatatcgactttgctgagcctctggccctgccgagatttcatgataagttaacctccaggccctgaagccccagtcgttgcctctggctcgtgtgcctgcctcaggtgctccatggtagcatgtcttgtcgtccacctggagtcgtgggacctggctccagcacacacgttaccgctgggaccatgtatgtgcccttccagcctgaaagatctgtgggcacagatatagccatatagaaccccagagtgttgtcctgaactgaggcctgggtggtggaatatgtgagatgggataacttaagaccctgtttggaggcccttctctgatggggtgaccttaatcccttctcctgggaat

SEQ ID NO: 545889 - DNA, 750 bp, Homo sapiens
tgaacattccttgtgaccaggtgtgtattagcaggacccttccctcagtaatgagtatggtcatatctgttaagaacaccagtcaatgttaatgcttgctgcttaaaatgcattctgccagataccttaaatcatctcaagtcaaaatttcacatgatctctaagagcaggggaaaaatgctgttagtctgttagcataaagcacagcaagagtgaccttagcgtccagttcccaataagttcatcatccatctgagagcatctcaacctggacttcattgccccatcactatcagcattttggtcaaaactattcaacacatttctaggaagttccaaagtttcccacctcttcctgtcttcttctgagctctccaaactgtaccaacctctgcccattacccagtttcaaagttgcttccacattttcaggtatctttacagcagtgacccaaactcctggtaccaattttctttattaggtcatatatacattataatgaactacgtgagactgggtaacttgataacagaaaagaggtttaacttgactcacagtttcacaaggcttaggaggcctcaggaaacttacaatcatggtggaaggccaaggggaagcaaggcacgatcttacatggtggaacggagtgcgggactgtcacacttttacaaccatcatatctcgtgagagctcactatcctgtgaaccagcaaggggggaaactgtctccaggaatcaaacctccccac

SEQ ID NO: 545890 - DNA, 443 bp, Homo sapiens
  misc_feature (247)..(247): n is a, c, g, or t
  misc_feature (386)..(386): n is a, c, g, or t
  misc_feature (403)..(403): n is a, c, g, or t
  misc_feature (434)..(434): n is a, c, g, or t
gctttgcgtgaaggctgctcggctcacttttcctaagtgtggttcctgaaggctgtctttgtaactttttgtagttctttgtgtaaaaagcgtattctgaatttatacacatggcatgttcttcattatatcttccaggaatacatctattttatatatattaaatttgaatgtgtctatcaaaatgcttgggttaacttaagcgcacctttattaaaacgcagaatgttaatttgatattaaattnttccagatttatataggcttgcgttgtatggatgactccctcaatttgaatgatgggtgttacgatccccaataacaccttattttcattgtgcctcttgcttatgttggattaaaaaaaaactttctgtttaaaaaanccatcttagaattgaanaatacattttaatacaccctgcatactaaanaaaaaaaaa

SEQ ID NO: 545891 - DNA, 196 bp, Homo sapiens
  misc_feature (36)..(37): n is a, c, g, or t
ggaggttttggaaggcagcgattaccagagccaccnncggaacgccgctgtgcagttgacgtcgtgcggccgggctgcccttcgctgccaggacacctgcctctcagcggttggccgccatccgggacgcttccagaccacctgccagccatcacaaggggaatgcagaggcggaaaccttgcagcatttttattt

SEQ ID NO: 545892 - DNA, 343 bp, Homo sapiens
attttcatggcagaaaaagccctggtgtttccttggagctggggataaaggccagtgaaccagcctgtgatgaaagctgcccctggccctatttgagtggaaaggtcattggggcagccatgcaggtatcagagccggctgaagccctgtcccttacccctcaggcacctgatggttaacttgcctcctgggaaataatgatttagcctttacttgggacaatgattaatcatgttttttaataattgctgacatttgtattttaagctggataccaatgtttggatttggcattgattttttaacccttagagatatttaattaaaacttgaaaaaaaaaaa

SEQ ID NO: 545893 - DNA, 320 bp, Homo sapiens
  misc_feature (47)..(47): n is a, c, g, or t
  misc_feature (55)..(55): n is a, c, g, or t
  misc_feature (189)..(189): n is a, c, g, or t
agccaatggtcaagaagactccaaggccccagatgggtccacacttnaggccctnggcctgcctcagccagacttccacagcctcatcctggacctgggtgccctctcctttgtggacactgtgtgcctcaagagcctgaagaatattttccatgacttccgggagattgaggtggaggtgtacatggnggcctgccacagccctgtggtcagccagcttgagactggcacttcttcgatgcatgccatcaccaagaagcatgctgctttgcctgtatccatgggcttcatgttgttgggataactaagcaccgcagcac

SEQ ID NO: 545894 - DNA, 100 bp, Homo sapiens
ggatacgaacatctatggtggatatcacatatatgatattttcgcgacatacgatgatgttgataaaggggaaacacacacatttggtaaacacgacacg

SEQ ID NO: 545895 - DNA, 338 bp, Homo sapiens
tatcctctgacatacttcaacatgcctctaaaacactaaacagatgacaacggtcctctcacatctcttgctagtgaagtgctatgagatatgtgaggcaggccaggatccagaaagtaggcctaattgctaggcaatgatggtcacgtggccacattcaggtgtattcctgagaggtggaatctctatgaccatgtgccagactcactcatcgtgaaaggaggaactgtggaggaatgtgctaatatagcaaaagccgcatattgaaccagtggcttgcacttagtaggaatggaattggcactgacttgattaatgcatcttgacgagtactgggt

SEQ ID NO: 545896 - DNA, 677 bp, Homo sapiens
ccagtcaaggaaagtcaagtagcaatgaaggaaatgtctaaaagagatggcaatggagaaaaaagacatgagtgagtgacgaggtttcatgtgaaaatgccatgtgaatgggaaggcccctgcagaagacgtctttaagaatgcccctgcctcctactgtgaagaagtgaagagagtccccctccacctaaatgtgtgtaaacccactgatcgtgcctcttgtggtgaatatgtgagtgatgacagtgactatgagtgagtgaatgcaagatgtgatgtgaacatgacccctcccccacagcccctgcacgagcgacagccccagaagcgagagtgagcaaaccaatgaaggatgaattgacagaagacaaactcgactgactggaataaacttgtgcttgtcttgctttggcacgaaggcatgtttcccaagtaaacgaagttcttgatcaaacaccagcatgctgtcagacctgcacaagcacaaacctggaaatccaccggaaatgataaaacagtcttgagcaggagctagcctatctggaacagtgagagaacgagagtggaaagtttaaaggaagagtgaaatgatcgcagggaaaagctccagtcttttgactctccattaaaggaaacggattatgtactccaacggaaactgacagtgatcgtaaaca

SEQ ID NO: 545897 - DNA, 157 bp, Homo sapiens
  misc_feature (22)..(22): n is a, c, g, or t
attgggctgagacagcaaaggncaagttatgaaaagaaagtgcgtctcaatgagatttatacaaagacagaagaagcaattcatgaggatgaagagtggcagatgttgccaagaagatttgaaacgaagagcttgacgtgatggagtgtgttctgaa

SEQ ID NO: 545898 - DNA, 240 bp, Homo sapiens
  misc_feature (18)..(18): n is a, c, g, or t
  misc_feature (46)..(46): n is a, c, g, or t
  misc_feature (49)..(49): n is a, c, g, or t
  misc_feature (124)..(124): n is a, c, g, or t
tgatagctgactgctgtnattctgctgagaaatgattattttggtntanataaaataaataccacattatgaattttgtttaatcaaattagtagtggaagtggactttggtaagtgcaggatnatgtagtaccttagcataacttgacagtttttaatgtgtatccctatggagatttattaagtaattagaatttagtttgattgtgacctcggaattatgtattgtctttttttgtt

SEQ ID NO: 545899 - DNA, 288 bp, Homo sapiens
agtaaagctttcttcggaaaacattttatcaaagccaaattgttaataaagactttccttttgtaaaactggataagagaagacatatcaggtgtgttcatctctagagatgatcagtaagttcagcatcttaaaaactgcagcaggaaactgaaagcttatgttccagatcatctcttccgttgttcaccatatatttcttagcatttggtcatcatcagcgaagcatttgtacattaataaacattctccactgaatttcttgtgcccactgttcaaggtgtaccg

SEQ ID NO: 545900 - DNA, 461 bp, Homo sapiens
ccgggtcaacccgccggtagtccttccttggggcagccccgtcggtgtctctgctcttggcggctcccttccatagcggctttagcacagacctcgggtgttcgatatcatacggcgttgctgcttcagccaaggcagccctggccacagcactgctggtccgcactttctgctgctcatccacaagaccatgttccatgatttcaactaaacttctaagatgtggcaagatagcacagcccataagaatagctatctgtagtacaatcttaataccagagtgtctcgcttgccaggacttcttgcttaagaacacagcttaaaagaagggcactaaagaaggaatgcccagggcaaaggctacaacagcaaaagctctagctgttgtgtaacggacatactcatccatgtaatctatatcaggtctcatggtagagatcatagtagccagaccaggagcc

SEQ ID NO: 545901 - DNA, 87 bp, Homo sapiens
tcaatcttacatttctttaatagatccctaaccaaaaccagtcaaaagaaggtaatttatccctcccagccttaggtttagcatctt

SEQ ID NO: 545902 - DNA, 580 bp, Homo sapiens
atgcaggagcaaggtgggttacagtgggtctgggcactgtgtgctaggagcgagtaccaaggtttctgagtcagacccggtcagagaccctgcgctgataggtggactaatgtcttaacactgccagctgctttctcctcacagctggctcacactcgcaaggcatatcttcaacagtaaatcatttcagacgatgttaagggaacagacgtaaaagaaatggaatgctgagtcctggtgcgcctcagcagttgcagctttatgagtcataatagcatgtgaacagagagtataatagattttccagtaacaatgagccacagagtcgataaagtctgtgtctatctccctcagatagcctactcatgacctgtttactatcatacctgacttcccatctttcagctgtgtatcctgatgtagagtctcatgcatacaagaaaagttacccgatgacaaagtttctgcttcctagcattcccatcaacagcattgtctgcagttgatgatattcaagcactggtctctggatggttactctctgtgaagaagagccattcacccctgtaccagtgtctaa

SEQ ID NO: 545903 - DNA, 83 bp, Homo sapiens
ggggggtccgattccttcctttcttgtctagattttatgtatacgggttcttcgaatgtgtggtaggggggggggcatccata

SEQ ID NO: 545904 - DNA, 405 bp, Homo sapiens
actactgttattgaccaatgaatgacttctaataaaatctagtggtgatgcaaaaaaaaaaaaaaaaaaaaaaaaaaaaaaattggggggggccgcgccctctaaaaaagtgttttataaagaacccaattcgcggtgggggcgcggggcggcgccaaggataggggataagtggagaactgtgtgccatacgcctgtgtccccaagaggaaacccggggccagtagacataggtcgcgtggggttcccacccaaataaaaaaccgcccggggcgggaaaccggagcggttggtctggaacaaaacctcaagaaggggcttctcagaagggcatcacggagtccatcaccacacgagagggcgtcagcggagcgcgcaatttataaaatataacggcccgcatgg

SEQ ID NO: 545905 - DNA, 233 bp, Homo sapiens
caagggccccggcccccctgggggggggggggttttttttagggggggggcccaaacccttgggggggggcccccccttggcctgttttggggggcccccctttgggcctttagggttagggccctgggggggggggccccccctgctcctttggggggggggccccccccccccccgggggcccggggtttggaccccccccggttggcccggaaaagcctttttgcggcca

SEQ ID NO: 545906 - DNA, 172 bp, Homo sapiens
tatctagcctgggctactgacgtaggagaacgaccggcaggctgaggccgagttcaaccgcatcatgagcctggtcgacccctaaccatagcggccttgtagaccttccaagccttcatacgacttcatagtcgcgggtagaccaccgtacacggtaccctacctacgccgt

SEQ ID NO: 545907 - DNA, 110 bp, Homo sapiens
ttttgccccccccccccccggggaaggggggtttttttgggggttttttccttttggtccccttggttttttttttgggattaaaggccccctggggggcctttttttta

SEQ ID NO: 545908 - DNA, 1444 bp, Homo sapiens
  misc_feature (1153)..(1153): n is a, c, g, or t
cgttagatgacttatgtattgtatcccgccggtgtgttccacttaaacaggggtttatgggctgtgaggggcgcccctctgtggggggttggtgcgcccgcgagtagttttttcttcgtggcccactacccgaagagggggcggtctttgatacgcacctctctgggggggcaagcttttcggggcgcctctggaaatagcgttccgctgttgatcttcctttccccatcttgggggtgtaaattagctgtctacactgcttcgtcgtcggttttgccccccgcaaccagcagtggtctggcccccacaccttgtttcgccccacaccctctgttgttggatgcatagatactcccccgcccacccacaggtggcggcggggtttttttggtgggccttgttttcccccatgggggttgtcacacaacacgccacacaccacactcgtggtccttcttcgctctgaagttgtttgtcgctctctgggaagagtaggagtgtctcccccctccgctcccctctctgtgtttgctcgccccgctctgttagggtgctccctcgtgtccccgcctctgcttctttggcacactttgcccccccgtcgtggagtgggcccacggcggttctccccctctcttgtctcttcgggtgtgtgatagtgcccccccctcatggtgttcacccccccctcgcgcggaaagagtggggataagagagtaaagagagagagtgcgaatagttgtgccccgctctctcccctcgtgtgttttctctaatatatccccacactgtttacacacgcctcttttaatacgcctcctccgcaaattgttgtctttgctggtgtgtcttctctttacataaacactacaaaaacatatatatatatatatatatatatatatattggtggtcttctttctgtgcggcgagacacacgcggtagaatattttgttttgttgtctctctcttgtgggtgttgtagatatacagatatatgcggaatattctgcgcgagatttgttgcagaatatgtctcatataaccccctctgggctctgtgcgcgcccctattgtggggccacgcctattttaaaggggagaggggaattgttctcccccgcggcctcgggggtgaagaatattcccccnccacccccacgcggagactccccctctcccctctcttggctccctctcccctcttttctaatgaggaaaatataagaatgctcgtaaactcttttggaacccccacgcttttttgaattttttaatttgggtaaggttttggggtcccacgcgccactctttttttaccccctctggaggaaaatataaggagtgagggagaaaggagaaagggaggaaacttctcccctccccccttcacccttagcttcttgaaaatgggcccctcccagaataaatctgccccttttt

SEQ ID NO: 545909 - DNA, 194 bp, Homo sapiens
tcgcagtaactcatctgttacgaagcaaagggggattattccagtggggcagcaggagcaaggggcatgatattcatgactatgtctgctgggcatgtttcaaagtgtccttgaattcactcagcaaacaaagctttcgggagaatctctcaaaacttaggccctgctcccatttggccaagatttactcatcg

SEQ ID NO: 545910 - DNA, 207 bp, Homo sapiens
ttcatactgtggtgttactgtgggacacgacccttctcttcccctctgcggtcacaaatagacagaagcctctgcaccttactatcagcctgagatggatgctctaagcaccacctcagctccggatttccgccccacctgctggaccacaggtcccagcacggtgtttgtgggaaaggtctaggtcattccaaacaccacagtacg

SEQ ID NO: 545911 - DNA, 421 bp, Homo sapiens
acgacctcgcccaaagattctgtgcaagaataagcgctaccacaattggatgactagattgtctccaaaacactgttcgcgctcgacaagatgtgatatagagaaacatttgcgagacctctcgtccctgctaattttacaattctctccggtgagagtaggctgtacgcctccattgagtagtcttgtcgggggaggagggaggaccctccgcgctttataccctcgggatatacttaaacttctctagcaaccctcccgcgagcgtcgggggaacacaacacccgagcagttcgtgttgacaatattggtccacgccacgcagcttgcgcacagtctttctatgatgccttgtaacacatctactgggccaaccccccggcccggggcaaaaacccccattttcccaaaaaaaaataac

SEQ ID NO: 545912 - DNA, 562 bp, Homo sapiens
ggggatttagggccactgaagatagaagatacaatacagtctgagatgctggggcccaggatgatcagtaagctgggtggttcatggatgttttgcagacaagaactacgatagcatgagactgaggtactggtgacccaggagatatctggggatttagggccactgaagatagaagatacaatacagtctgagatgctgggaaacaggagacagaggtggaagcttctagggtaccagagtcagaggctgaggggacagaagcttccacctctgtctcctgggtccccagcagacagaggtggaagcttctagggtaccagagtcagaggctgaggggacagaagctaaaatattagggacccaggagataacagctagggattcaggggtcagagagatagaagcagagatagcagagtctgacatattggtagcccaggagatagaggtgggacttttgggggttctgggaatagagactggggcagcagaaggtgcgatattggggacccaagagatagcatctagggattcaggggtcccagggttagaagctgat

SEQ ID NO: 545913 - DNA, 1132 bp, Homo sapiens
gtggtggacccaatagggaaggcgaggagtgggggatttgcgttggggaggaaaaggcaaaaaagcagactcctgccctaggtgcactcgtggacaatgcgtagaggagctggaagccgagcggggtgggagtgatgtggctggctgcgggcgagggacgcgcgcgcctccgctcgccctccagcgcggagcgggcaggacgatgcgccgtgggagcggcggttacgcggggccccgatcgctgttgggcaccaatcaacggttgccatagcagcgtatgacgtcatcagtgctgtgtggtgcccctgctgacggggcttggtgattggaggaaaccccgtgtctgcggagcgggtgtagcctgtgagcagtcgagatccagggacagagtctcgagtctcgctggctgctgccgcctgccggcggccagagactgctgagccctgatcgtccgccgtcgaccaaccagtccggacacagaacgtccagtcatggcataaaaattgacgctggttcagaaggccaaagtggacgagcaggctgagcgagatgatgacattggcagcctgcatgaagtctgtgactgagcaaggcagctgaattatccaatgaggagaggaatcttctctcagtttgattataaaagtgttgtaggagcccgtagggtcatcttggagggtcgtctcagatatttgaacaaaagacaggagagtgctgtagaaatgaaaggtagaatgagtcggggaaaaagagtagaaaatgagagggagataaaagagatgatgacagagactcaagaaaataggaagaagattagggacaccagagtgttaaccacgcaaaacaacaagactttagatgtacaataagcgaaatatccagagaacagccaaacactacattctatcttctacacaacgacaaaagattaaaaaacgcagaggataccaaaaaatgagaaaatacaaaaataaagactaaacatgattcactaccgaatgtacacaaaaaatcacataaataatctaacccactaaactctgcatgccaactgataatacaatacaatactaaaaatcgatcacaatgatccaaacgaactcaacacgacagtcgatcataaatgaagaac

SEQ ID NO: 545914 - DNA, 385 bp, Homo sapiens
cctcatacaggatccccaggctgctagttgtgtgtagtatgaataaagatcaaagaccgcatgggaacttgaggaggagtgcatgatgcatggttggaacgtcatcctaataagtcgaaagcaattttctagcttgtatccagctgatacttgtatttccatcttacccccatggtcagagtaaccgagatcagaatggggggtcaaatggcatatctcacacccagtgggcctggcttgagggttgcgtccatttctggttctagatttccctgatggctaaatgtcttaatgtacatttctctttgggggtttttcttcatccacttttgccatctgctacctctgtactactgaatgtgtcccttcctctcgctgtgccctc

SEQ ID NO: 545915 - DNA, 282 bp, Homo sapiens
attggattagaaataaaaaatattaaaaaatataagatcatgccactgcacaccagcccgggcagcatattgagaccttgtctctatattttaaaaacaaaaaaagaaaatgaagactttaattctggccaggcgcagtggctcacgcctataatcccagcactttgggaggccgaggcgggcagatcacccgaggtcaggagttcgagaccagcctggccagcgtggtgaaaccctgtcactgctaaaaatacaaaaattagccaggcgtggtaacacacg

SEQ ID NO: 545916 - DNA, 476 bp, Homo sapiens
accctgttaactcagctatggcagttacgacaccgccggtatggcgttcggccttaaccatgcgctgaccgaacccggcgccgaggtgcagcactacgcccggctggatgtgagccgcaacaccaatcacagctacatcgaccgcgaccagcgcgatgcctggagcgtggcgttttccctgctcagcgacctcaccccgaacctgtcccacaccctggccttggagtatcaggacgaacatgaagacagcccgtactggggcacgccggtgctcaaccccaaggccggtgagctgaagatcgacaagcacaaccgcttcaataactacaacgtagccgacggccgttatgagcaacgcacgatctgggcacgctcgatcatcgactaccggatcaacgacaacaccacactgaaccccctttcctacagcaatatgttcactatgttaccaatttgcaacttgtgcttcaatagtg

SEQ ID NO: 545917 - DNA, 944 bp, Homo sapiens
  misc_feature (402)..(402): n is a, c, g, or t
gtgcctttccttcagctgtcgtcaagggtgctcggtccttccgaggacgctaatgggtgcgttcggggtgaggccctcacttcatctcgggcgacttagtcaaccgctgtccggtctagcgccgagtccgttagaatccgtgccgagaccaatggccgtcttgtctctcgagcatcagtcctgccatctactcagagcaaacttctattcttgcaactgaatgattactgatgaatagtcaatggtagaggataagaaatcaaaatgaccctctattaatagttcagagcggatgctaagaatgttcgagcctgtatttggtcttgtgcttttgtttgctaaggcacctggcggaaaaagtcgaacattgagagatgtcatcatttagcaatgtagtagtgngcctagttgagagccgtgttctatgcaggcttagtgttggcatgtaggacattgatgtgaaggtcgatgccgcctcttccgatcatgggattgtctggatccgagactttgatgggattagatgagaagtagggtgaaggccatatatgtagggcagcatagatagattcgacgtgaggcaaggtccattggaactgattgtaagcttgtgggattaatgagtgttacttatttggacttaataaagcgttactatttatatggtaggtattgctattggacaattctaccaaagagagctttggaatctggtttaaaaaaaaaaatatacttaatcacaaaactgagggtgtaccgaagcacttttatgccagtgagttaaccccaatttaagcgcgtgagttggtcttgcaagggtcctttgatgtgataacaccaggttttaacgacatacttttctgtaaatgggtcggggattcttccgtaacacttccttagagaaggttcctggtgaaccaatttggggaaaaggcagatttggg

SEQ ID NO: 545918 - DNA, 356 bp, Homo sapiens
  misc_feature (91)..(91): n is a, c, g, or t
gacaaggaccgtgtcatccccttcgtcaggtcagatcagtttatccccagctcaggcaccgtcctcgtttctccttcttctgcaaccccangctgtgtcctgacacccccaaccaacttaaaattaacgcactcccacccgcttccagatctctaaccaacgttacagcataccccgccaagaatttggcccagcccaggactctcaaatatgatctggggagaactcacagcccctgcaaaattccctagaagccgttttgagtgtgtaatggggggggtgttcctgagagaagtggggaacacagttttggcccttggaatacccggcggctgctgatggggggggatggacac

SEQ ID NO: 545919 - DNA, 168 bp, Homo sapiens
gtccgtcactcttcagttctgctaccttagaatgtccacttcctgtttggtgaccatggcaaccagaagactatggcagtgcagagcgtgtgggatgggggagctccatcttccttgggtacatggggacgagacttcagcgaccatgagaagcggcgagagccatgg

SEQ ID NO: 545920 - DNA, 327 bp, Homo sapiens
  misc_feature (182)..(182): n is a, c, g, or t
gtcggagaaaaacatgaaagcattatttttggccggccattggcggcaaggccggggggcggttgcgcgcagcatttttccagcagacggtagcgtgaatgccgagttttctaccgccagcttggaagatgtgcaagaggccgttcaagccgcgcaccgggcctggcaagagccctcctggngcaatagcttgcccgtggagcgggctcgggtgctctataaagtggccgatctgatcgagcaaaatgtggccgagctggcagctttgcaaacaagagacaacggcaagccgctggcagaaacgcggtcgacgcggccgcgaattta

SEQ ID NO: 545921 - DNA, 1392 bp, Homo sapiens
taagaagcacgcacatcaccactgagaagagacaactcatgggttgattctgaccacatgggtgagtagtatacacaacagcctgttacaaagagccgcgtcgcgctgctcagcgaggttccaacaaagagggggataggtacttgtgcacgtcgtcctaggtagagccgggtgtaaacaagcccccggggggggggccacacggggcgccacagtgaaggggtaacccccgggagataaaatgtcgcggagaaaggccccccatagaacgcctttagtgggcaaagccctctctttcccgggggggcacaaaaattgtgggggcttttcaacaaaggtgacaaggagaaatgcgcctcccttttacaagaggaaatgtttcccatgtcggggggggaaaaaacattctctgggggtgaccacggccacaaaaaaggggaccgcccgcccccaccgggggaaaagacacctgggggttaacacaagggatacacagggtggatttacacccctggggagcccatcccccggggcctcaaattaaggccgcccggtttatataggccccctcgttaattaggggatttgcccaacacggggtttcaccacttgccaacacgcaaagttttggcttggaggcctcgaaagggatataagcatttgattcgccccttttctggggtgaaaaaaagctcggggaagagatgggcccctctgaaaatatgtcttggaaaattctcgggtgtatagctgaccccatttgcttgtataatgggatcttcctcgtggcgaaagaccccactaggtgttgtctttgtgagagaagctctttttcgagaaactttatacccgaccgctctctggggttacgcctattgcctggttccgtgataataggagaacacagaaccagattgccggtgtggtgttcaataccacaagactcagctggcaccaaagtaagagctgccttgggtgagactggccaaagggtccaccacaagatcttgcgcctcagaaaaaggctcaagaaaggggtatagaatgagagataattaatcccctataatacactgccacaccccacacttttaaatcacgtgggtggaaagaaccggtttcaagagaactgtttgtttcacaattggccacatttaaagtttaagtagtaaaagagctgggtaaatgaataacacaatgcactcgtaaaacctctcacgagaaggagaaaggaggaaatgttttgtggaaccacctcttgggtttacttattttgcgtgtggcacgttttaaagttaattaagtttttaaaatcagtactttttaatgggaacaacttggcccaaaatttgtcacagaattttgagaccccattaaaaaagttaaatgaga

SEQ ID NO: 545922 - DNA, 804 bp, Homo sapiens
ctgaccccttaatatcatctagtccaccatggatatcgcgcatctaccaaccctgtataccgatgtccgtttgtatgattttccaggctccctcgctggctgtcttgaccggtctctctcggatcagcccccatggtacggatgtccttgagtcctttgcccgactgctcctcacgtatcgcctgcagatccgctctcttatccattcaggtccgacccatcactttccttgcaggagcgtcacaatgcatggttggactcatgggctctctgtcgatgcgcctggggccaacggataggcttctctgtgactctggctgtgaatcgagtttgttccccctgaagtaactgaatacattacggtgtgttggagagaatgtgattaggatgctgcatgggtcaatcactgatggggcgccagtgatgaaacgtggtttcatagcgtcctaaggtcagtttcccgtgagggaccctaatcatcatccctggacgtgggtgtaagaatccatcttccaaaatttacttatatcgcctgtcatctgaagtgggtcatcacctggtgtatcaggggccatgtggagcaggtaactgagtcacgagaagtgcacacattcccatcgaatccgttggaccagaaaccctgatgttgccgctgcactataagcaagatactatgcgtttccctgcctcgattctgacacgaaagggggttaaccaacacgtgaatgatagctcgcaacagagagaacatcatcatgtaaggaaagccaaaaatcatcgattaattctcttcatcttaagcta

SEQ ID NO: 545923 - DNA, 178 bp, Homo sapiens
ggagtcgcaagcgatgaagaacgagtagacgaacgagtcgtagaatggtacaccacgcataatcggtagagaagatggcgcgacatagtcaaggaagtacaccactacacgaggcactcgagacacacctagccattgacactaccacacggcaaggctattcctgcagatatttgcc

SEQ ID NO: 545924 - DNA, 716 bp, Homo sapiens
catcctttagctgaatttacgaggattttggctaccctgagtatactgcatacttcatgtcctctgttctccttcttttgatctagacctaatcttcgaatacctgaactaatgtgaacagctagggaagcaagggcccaatatgcactaagtttctttgcacctgtttgcacttacttaagtacattactaaaatgttgtttcaaagcgttttgtactatgtgtctttatgacggtaacatcctaatgtggtaggtattaggtaaatgtgctgtcatgagatcaaattgagacttccacagaattatctggacaccacggtgagggcttggttctggatgactgcgaataggtgtagctgcctcttccttgaatatcacagtgtgtagagatggctgagtgcaatggctcacacttgtaatcccaacactttggaaggctgaggcgggaggatcagtatatcggtacgtctgagcccaagagttcaagatcagcctgggcagtatagctagaccccatctccattttttttttaatgattttttaattaaaaaaaagaacaacaggatagagctgttggcggtggcacagtggcccaaagagcagcttcagagataattccttggttctatgatacctgtgtaactccaaattacagtcggacttggatacatcatttgtaacattgtagtacagccgaggtcttggttcgtcga

SEQ ID NO: 545925 - DNA, 1204 bp, Homo sapiens
  misc_feature (1018)..(1018): n is a, c, g, or t
cttggcgctacaagataaagctgttctcattcctgtacttacttacacaagagctggagcccggtgccctagccacacactctgtaggaagagtgcccagagagtttgagctcagggcccttagatactttgcgatagcacgctgctagcgtagcctctattgagagtagatacagttcgcgagggcgctcacgttcgtgccttactctaaagtcatccagatgaccacaagcacaggtacctagatccaagtatcctcttggacttttactttaacgtgtccatacactgttgtcagacactaacagacgacaagactgacaataacacaagacacaagaaagacaaacaagagggccgagaccagcacaccttaatacaagaacaaaaccaaacacaacaacacagccaacatggcaacaagccggagagacacacgacgctcacacaaacgggcacacggcggcaacgagaagcaggaagtgacgcgaacacaccagggtggccaaaggtagcgaacaccacaaacgacggaccaacacacaacaacgagcatacaaccgcggtgcccacacagggggacacacagacaaaaacaccctacacaccaaaagacgagcagcacacgcgccgcgagacacaaacacaacgacgagcataatacaaacacaccaaccacaccaacacaaacaagtaggagaccatgtatcacagcaccaatgcaggcgacgctgcgacaccaacggcgggacacagagcggacagaaacaacacacgggcgcgcccagaccacatcatacaccccacaacggcaccaccaacagaggagaaacgcacccaccacatccagagagtcacaccgagggacaacccaccgatacggccacaacaccacccgctgcagcccaccaacaaaaaaacaacatcccaccaacacagccatgtcacacctccgaagcaacagagcaggagaacccacacacacacgacagacccacaacgaccaaacacacagagnaacatacaccagcagagctgcaaccgactataacccacccccgaaggcaaacacaacaagaaacagatccaacacaagcaagccaacgaaacaacaacggtgcgatcaacacaggcgcaggaagccatacgaacacaacaaccaaaaaaaacccaacaacaagaaacaaaacgaagaccataacaa

SEQ ID NO: 545926 - DNA, 231 bp, Homo sapiens
ccaacaccgtctcacggtggccaggttgacgtacgcattgagctcgcccgtttcacggacggcgattgcggcccctactggagtgtcgtcgatatacgccaacgacaccgcaaattgatcaggtttctccaaggcctcttcgaacaggtacttcattgtcccatcgaaagcgaagaggccattgtcgagtgcgatctttgccagtcggtccgcattgccagcgcagacgtg

SEQ ID NO: 545927 - DNA, 231 bp, Homo sapiens
gatcttcaaaataggaaatttttagataatagtggttctagatatattttgaaaccacatttcttaagacagagtaaatcatactttaacccaagtaacataaaacagggtatgccaattacacttacaataaggctcatcagtcgtatccagttgcctcttactcattcatcatctaacaaaggtgcattcattagtaattatagaagttttttgtcgttccaaatgatc

SEQ ID NO: 545928 - DNA, 243 bp, Homo sapiens
atgtgaattaggtggtggatggctgcgctcatgagttgagaacagcctgggtaacatggtgataccctgtctctacagaataatacaaaaattagccaggtgtggcagtacatgcctgtagtcccagctacttggggagctggggcaggaggattgctcgagcctgggaggtgtttacagtgagccgtgtttgtatcagtacactccagcctggcatgacaaagcgagaccctctctttgggg

SEQ ID NO: 545929 - DNA, 362 bp, Homo sapiens
aggcagtaagggggatcccaggcacccatttcaaggagtgggtgggagttttttccctaacttgtggggacccccccagttgtcaagctattaggcagtagggtttgaggggtcaggcctccacctgagaggttataacctgagagacagctttccccttcctcccagtaaaaagggaaggggggggggcacctgaaaaattaagaatattttcccagtcccactaccagcacccccgatccctgagattgaggggtttagggggtgggaatggaccttcagccctgccccccctccctcccccctggtggtgagtttgtttgatgttttggttgggtgaataaaaataattcccctttgga

SEQ ID NO: 545930 - DNA, 193 bp, Homo sapiens
ccagtttttccccaccctccttaccccggtggggtaggtttccgccaggggtggcctcagtttttcctcaacagggctgggggcagccctttccctgcctagtccccgcctgagggccagcccccccccccgcctgccgccccctgttcaggttccctccccgccccagtgaaataaagcatccccccctgca

SEQ ID NO: 545931 - DNA, 1000 bp, Homo sapiens
tctagactaattaagaaacggttgagtaagacagagctggaagatccccgcctaagcaagcagcttccttccagactagtgctacaggagctagaccagacccgccctaggcacctccaggcgctttagcccggccgcaccctcttccctgttcctcgatggggggagggtagaggccggataaggcgggaccctgagacttagagctggctgccagcggaaagaaagcgatgccacgtgatctcagcaccatccagttaaaaggaggtgcagggccctgtgagcgctagtacggattccacgtttgagtcccaacatctccagtatgtgtgctgctcggctctccgcggcggcacagtccaccgtgtatgccttctccgcgcgcccgctgacgggggaagcctgtgagcctgggctccctgcgggcaaggtgctgctcattgagaatgtcgcgtctctctgaggcaccacgatccgggactacaccgagatgaacgatctgcagaagcgtctgggacctcgtggactggtggtgctcggtttcccgtgcaatcagttcggacaccaggtatatggggcgagatgggtggccttgggctctaggctcccacgggcgggacaccgcttactttctcctctggtactacagctggaatgcaggcctatcctcggttatacaaggagggcaacttcctggtgactcatcgggaaacctctgttttacagttaaaaagtacattctttccgaaatcctagcacataaataaatgcctttgtcttccctaggagaatggcaagaatgaagagattctgaattccctcaagtacgtccgacctggtggcgggttcgagcccaattttacattgtttgagaagtgcgaagtgaatggtgagaaggctcacccgctctttaccttcctgcggaatgccttgccaacacccagtgacgaccccactgcgctcatgaccgaccccaagtacatcattttggtctccggtg

SEQ ID NO: 545932 - DNA, 782 bp, Homo sapiens
tctagactaattaagaaacggttgagtaagacagagctggaagatccccgcctaagcaagcagcttccttccagactagtgctacaggagctagaccagacccgccctaggcacctccaggcgctttagcccggccgcaccctcttccctgttcctcgatggggggagggtagaggccggataaggcgggaccctgagacttagagctggctgccagcggaaagaaagcgatgccacgtgatctcagcaccatccagttaaaaggaggtgcagggccctgtgagcgctagtacggattccacgtttgagtcccaacatctccagtatgtgtgctgctcggctctccgcggcggcacagtccaccgtgtatgccttctccgcgcgcccgctgacgggggaagcctgtgagcctgggctccctgcgggcaaggtgctgctcattgagaatgtcgcgtctctctgaggcaccacgatccgggactacaccgagatgaacgatctgcagaagcgtctgggacctcgtggactggtggtgctcggtttcccgtgcaatcagttcggacaccaggagaatggcaagaatgaagagattctgaattccctcaagtacgtccgacctggtggcgggttcgagcccaattttacattgtttgagaagtgcgaagtgaatggtgagaaggctcacccgctctttaccttcctgcggaatgccttgccaacacccagtgacgaccccactgcgctcatgaccgaccccaagtacatcattttggtctccggtg

SEQ ID NO: 545933 - DNA, 92 bp, Homo sapiens
gcttcgatgcgtacttgctttgtcactgcccccctattacatgagggggggtttaatttggtttctgaggcgcattaagctcaggaggggat

SEQ ID NO: 545934 - DNA, 166 bp, Homo sapiens
tccacagagatgtttgtacagttgatgacgtttctgtgtttccacgatgggcttatttaccttggaaaagcccagatgcaatgagagtccactttcctatttccttccacctcccagatcacagagcatcttgttttacagtattggagattgtgatttactatct

SEQ ID NO: 545935 - DNA, 429 bp, Homo sapiens
ggtgggtgtctcaaaagacagaagtaacactgatgatgcagagaaggtgaactctttctaactcttgtgttagaagtgtctcagtgttgatgagaatgtacattaatgcagccattacggaaaacggtgtggaggtttctcaaaaaaactaaaagggccaggcgtggtggctcacgcctgtaatcccagcactttgggaggccaaggcgggtggatcacaaggtcaggagatcgagaccatcctggctaacacggtgaaactccttctttactaaaaatccaaaaattcagccaggcatggtggcgggtgcctgtagtcccagctactcgggaggctgaggcaggagaatggcgtgaacccgggaggcagagctggcagtgagccgagatcgcaccaccgcacttcagcctgggtgacagaacgaccca

SEQ ID NO: 545936 - DNA, 553 bp, Homo sapiens
  misc_feature (14)..(14): n is a, c, g, or t
  misc_feature (34)..(34): n is a, c, g, or t
ggtcattaattatntgtattgtagaggtgttatntgctttaaactctgagctatgtttagaaagcaacatgtttttcatttcaaatttggataggaatttgctttgcgcagatttaatggataatgggtgaaattttgacatgttgaggtattctatattgctgtagtacagaatatggtcatattcgaaacattttctaagacatttttgtatcaggtgaaaggtttatgagagatgaaaggaaatcagagtatgtagattggcaagggctgatggtgtatctatatcattgtgatagtaacatcaagagattacaaaaattgttgatatttgatagcaggtatctataaaggacttaagaccttcagaaggtctaattttcaactgcattttctttatttctcttaaagaacaagttaaaagaaatagtttgtatctcttaagtactttatattgcctctgagtattttcaaagaaactcacttatcttgatgattgtgtttcttaacttgacaaagagcatcttcataatataaattccatttattatta

SEQ ID NO: 545937 - DNA, 592 bp, Homo sapiens
  misc_feature (183)..(183): n is a, c, g, or t
tcattggctgctcacgggcgctaaaccagttattgccttccaaggatctgtgcatctgtgacaccgtctaagttgagaactgtttggatagtacctcgagtgacctgagtcactgtgacaggctaactagggtaagtagagtgtcctcctggagtctgaacaggcatctgtcctccagacaangcgccaggtagtgaaccctgtggtggaccaccgcgtcatgcctgtcagtgtggctgtggatacccaaatagcatgctccacttggtgaacatacacatcgttgccctgtaggagctccgcagtagcatggagctcacgctgtctgtggggcaccaggatagcctccagggcatggataacctccaggtgcagggtagcctcgagctcctgggtgtccccatcgtggcacttgtgggtaggcacctcctgccattggagcatagccactaggataaggattctgaccagtagtggcaatagatggctcctgacctgcaggagtatatccaggcaaaggtgggtagcctgctgtcggatagatctgggtacagcattgtgacaccagcagcagtgtcacggcccaacaggg

SEQ ID NO: 545938 - DNA, 1690 bp, Homo sapiens
gcacaggctgagtcaccaggtcagcgctcgctggcactggggctgcgactgcgccatacactgctggtgttgaagagccgaagcgtgtgcgatgcgacccaagggcaggcgcccatggtatcgtcagacggcatgcatccgtggacgggtctgatgtgtatatgaggacctatgtggccaagctgcgcgagcagccatacaggcaggagtgtccgtggcatgtgacatcgcactccaagtatagtcaacgtcgagcgttcacacatgaagaagatgatcgcatcgcgccatgtccgaagtgtcttgctggataccttcctgcttcgaactatctgtacgtggaactacgaggaatgctatcctaggtaccactgtggacctaaccacaccagtggtgcatactaggactattggcgacataggaactgctgcgcagatagtcgtcactatgtacacccgatgcgcgataaggcccgcgtggtaaattggcatagacccagggtcggacctagcgtgtgccactttcattggtgctccggagaaacagcttgcgtttcatgggcgccgagcgctgggcggtggtgtagcttggagaccaaatactctcggggtataaacgtgacgtgcgctctacatctatttggttgaacttagttacgcctgtacgaggctatggctctgtgaccattggggcgtcaccgcctaattgtaattagcctccataataccatcttaaagaattccaatcttgacgcaaaacatctggaagtcgcagtggcaccgaggcggggagccaaagaggcattggtggatcggttgtggctcgtgattaaatagggcttggcaacccgaggcgaaccgaggtagaaacggtgccaggagggcatttcgccttgcgccgtcaaggacggtaaggagcaggggaacaatcggagggggcgcgaggaacaaataccggtcggggttaaccatttggaacacccaccgcgggggattgcgcgcaatcggaactcgttggcgacaagtttcccacgggctcggccaccgggtcctcgttgtgcgagcgcttgggttggggcaagcggagtgaaatgcaataacaggccattgcttggggaagtcctcgtccagagtttgtggccatacaaggttgccatcttagtgacgtgtataagggccaaggtgccccaggatacagttaaacaacgtgactcctgaatggagtttagcccctatagccacagagggccaaacttggtgtacccatgggtagcctagggcccaatgggcccgatggaaacagggcctggacatgctgccttgcaagttaacctgacacaccggcaggggcgagcaactactcagggacccctgagagcggagaaaccgcgcatgggagtagaaacccaggagaggagcacaccagtctgaggagcaggtcccacaccagagagccccatagagttgcccccagcaagcgctccccagggcgacttgaaaagaagagataaagacgtggccacaaggaccactgcaggccagagacgaaatagcctgcgataaacaggccgagaacgatgagacacacagcaacgaggagcgattcaactgtccacaaacagcgcactgatcccccagctctgcatactctctctttacacctttcactacgcactgagcgtcgggggca

SEQ ID NO: 545939 - DNA, 454 bp, Homo sapiens
  misc_feature (110)..(110): n is a, c, g, or t
  misc_feature (121)..(122): n is a, c, g, or t
cccagggtggactggccccccctttgtgggctggggtttgccccctccctttccttgggggggggggcagaacccccccctgtttacaccagcccggttttttccccctnggggttttccnntaggtttttgttttccctgggaaacctggggcaaccccctttaaccttgggccccccttagggttaggccctttttcctgggggggggtcccccccccccccagggggggggtgggtttaccccccctttttttcttttgggggcaaaacccctcccccccttgggggtgggtttccccgggaaaacagccttttttccccaaatgggggggccccccccttttgggggttgggttcccgggggttttttttttcagtgtggggagggggggggcccccccccttcttttggtttttaaatttacttattttaaatttcctgggtgggggga

SEQ ID NO: 545940 - DNA, 388 bp, Homo sapiens
cactgcacgccagccttaccacatcatatttccgacaggctatattttagagtagagggaatagagtaataggatattccgtagaaagtatccatgcctattaaccataggatataagagtagatagagtagtagccaaacataccagctcacttctgagggtttgaaatactctactatttgcctttgttgtcacaggctggttaaattatattataatggagcttatgttacctattgacataaacattgagcccttaaaatcaaaattggagacaagtataccaaagttctgaaatcatccatgaaaggatattcatacattcattccattattaaaatcaaaatcataactagttatttcttctataaaagaaataaattctgc

SEQ ID NO: 545941 - DNA, 119 bp, Homo sapiens
acgctactgggtcgctgggtctcacgacggtgatcggcgctcacgagggcgatgacgttctagatccattgagacacgctctacgacagtagcatgcagatccacccatcggacgtgtg

SEQ ID NO: 545942 - DNA, 363 bp, Homo sapiens
  misc_feature (243)..(244): n is a, c, g, or t
  misc_feature (247)..(248): n is a, c, g, or t
catctcatctgcctgtgtcagctctcagacaccagcagcttagctgacgttggctttgcttggtcaccgctgccatgccgcagatgatgcgcctagctgtgctggagccacacgactattatgttggccttgaactggtactgcagatccctcattttgtctcccttgttcctctgtggctgaggtgggagggtgagggtggggtagttcccccatcattaaattttttcattatcaccccanncannaccaataggtgtgtaggctgtggtggttgtgtggggggttggtgagttcacagatgtcgccccagagcccatcgctgtcataatgtattcttctcctggctttgcttctgcggct

SEQ ID NO: 545943 - DNA, 737 bp, Homo sapiens
cgcatacctgtagtcccagctgcttggggggctgaggcaggaggatcgcttgagacctggaggctgaagctatagtgaatacagatggcaccacctcagcccatccttggcaacagagtcagaccatgttcctttaaagaagaagaatatgtcatacaaaagaccttcgcacagccgggaagagacagtctccagcttatgccaaaagtgctctcttcccagagggaaaagggcagattgcgttttatgcctcacagggcctgtatcacacaatagagtaaaacatattcagcagttttgggagaaaagttatacatatctatgagggaagatgaacacacgtgcaatggataaacatatgtaacacacattccacgctcactttggggtaggcctctacattaaaaaaaagcggaacttgtcccttcatgtcacaaggtgaactattggacacaaagattgcatgcaggctctataaactcgctgacactggctcagggcttcggttgctatcaagaaagatttttgaaggctggtccttgttcaatagagctatagtggtttggttgaaaacacgttgggaagggtctgccaatttccaatacccctattttagccaattaacagaatgtggtttttttgaccctaggaattcggaggtcccagcaacaaaccctgaccttcaccaaagaaacttcgttcttaaatagggtctctatgggggatccttgggtttc

SEQ ID NO: 545944 - DNA, 493 bp, Homo sapiens
attcgcggccgcgtcgactgtagagatagcgtcagaagcattggaacgagagcaactccatgttgaataggggctgggtaaaagtgtcagaggtatttgaaccagagcgactccattttgagtgagggctgggaaaatgaggctgagacttactggcctgcattctcagaaagttaggcattcctaccctctaggattgaattgggacccctttcctgtaacatatttctggtgaccacagaagggactatagtgcagaaacgttgacccaacggctacctttgcgtaagtgttggggtcctgtaacatatttctggcaaaccacagaaaggatgatactgaagaaatccccccaaccccaaagaaatagactgcagcactgattggacgactttgggtaagtgatggggtacccgagtaacaaatgggattgggttagaggcccaacttagggggagttggagtttctcctaagacagagtgagttagaggc

SEQ ID NO: 545945 - DNA, 170 bp, Homo sapiens
atggtagagactagggagcaggacggagtggataacagaggcaagcggtcaagggcatctgggcagcagctcccatcgccttcccggtactggagaccagactggatgtagtaagcagaccagtaatgtatagcagagcagcactggcaggagcaccaacgaattgcctg

SEQ ID NO: 545946 - DNA, 179 bp, Homo sapiens
caggagagatggctatgagtcgttagtcgtagtatctaatcgtattgccccgccggatgacaaaaaggccagcgccggtggccttgccgtggggattatgggggcattaaaagcagccggaggactgtggttcggctggagtggggaaatcggtgacgaccagcagccgttaaaaaaag

SEQ ID NO: 545947 - DNA, 132 bp, Homo sapiens
tcgctcactgcagcatgatgtccttcaggttctcctgcaggatggtgtctttcacagcatggaacacttcctcatccgtctggttcgtatcgtgttccatctcctgggattgggctatcaaggtaccgagct

SEQ ID NO: 545948 - DNA, 204 bp, Homo sapiens
ctcaccctatatccctacactttattaggaggccaaaccagacagataacaagaggttgggagttcgagaccagcctggccaatagggtgaaaccccatctctactaaaaatacaaaaatgagctgggcgtggtggtgtgcacctgtaatcccatctactcgggaggctgaggcaagagaatcccttgatgtgagcagcgttgg

SEQ ID NO: 545949 - DNA, 440 bp, Homo sapiens
ctcttgattctaggctgttccaggaagaaaataattagggattaatacctaaaataattctccttctcaataatgtcactttgggactgatagcattatttgcattttaaaacaaaggctgggtgcagtggcttatgcctgtactctcagcactttgggaggctgaggtgggaggatcgcttgagctcaggagtttgaggccagcctggggaacatagtgagaccctgtctttacatttaaaaaaaaaaaaaaagaataaaaatgggaagttagcagtcaaaataaaattaggtcccttttaggggcattacctcttgtaaagggtaggtttcaggaccgggtgctatggcttatgcctgaaacaccaacactttgggaggccatgatacgaggatcacttgaggccagtccaggcaacagagtgaaaccctgtctctac

SEQ ID NO: 545950 - DNA, 158 bp, Homo sapiens
tcgctcactgcagcatgatgtccttcaggttctcctgcaggatggtgtctttcacagcatggaacacgaagcggacgttctcgtgtcgatgcggtgtgaagtgatgaagagtgctgctgcgttactctctcctgtcgaagcactgacaaacctctaag

SEQ ID NO: 545951 - DNA, 851 bp, Homo sapiens
  misc_feature (65)..(65): n is a, c, g, or t
  misc_feature (84)..(84): n is a, c, g, or t
  misc_feature (92)..(92): n is a, c, g, or t
  misc_feature (101)..(101): n is a, c, g, or t
  misc_feature (117)..(117): n is a, c, g, or t
  misc_feature (121)..(121): n is a, c, g, or t
  misc_feature (126)..(127): n is a, c, g, or t
  misc_feature (136)..(136): n is a, c, g, or t
  misc_feature (139)..(139): n is a, c, g, or t
  misc_feature (145)..(145): n is a, c, g, or t
  misc_feature (148)..(148): n is a, c, g, or t
  misc_feature (150)..(150): n is a, c, g, or t
  misc_feature (159)..(159): n is a, c, g, or t
  misc_feature (163)..(163): n is a, c, g, or t
  misc_feature (171)..(171): n is a, c, g, or t
  misc_feature (174)..(174): n is a, c, g, or t
  misc_feature (185)..(185): n is a, c, g, or t
  misc_feature (202)..(202): n is a, c, g, or t
  misc_feature (206)..(206): n is a, c, g, or t
  misc_feature (208)..(208): n is a, c, g, or t
  misc_feature (214)..(214): n is a, c, g, or t
  misc_feature (217)..(217): n is a, c, g, or t
  misc_feature (219)..(220): n is a, c, g, or t
  misc_feature (244)..(244): n is a, c, g, or t
  misc_feature (254)..(254): n is a, c, g, or t
  misc_feature (280)..(280): n is a, c, g, or t
  misc_feature (284)..(285): n is a, c, g, or t
  misc_feature (288)..(288): n is a, c, g, or t
  misc_feature (322)..(322): n is a, c, g, or t
  misc_feature (329)..(329): n is a, c, g, or t
  misc_feature (343)..(343): n is a, c, g, or t
  misc_feature (345)..(345): n is a, c, g, or t
  misc_feature (351)..(351): n is a, c, g, or t
  misc_feature (358)..(358): n is a, c, g, or t
  misc_feature (371)..(371): n is a, c, g, or t
  misc_feature (392)..(392): n is a, c, g, or t
  misc_feature (406)..(406): n is a, c, g, or t
  misc_feature (415)..(415): n is a, c, g, or t
  misc_feature (417)..(417): n is a, c, g, or t
  misc_feature (468)..(468): n is a, c, g, or t
  misc_feature (470)..(470): n is a, c, g, or t
  misc_feature (473)..(474): n is a, c, g, or t
  misc_feature (478)..(478): n is a, c, g, or t
  misc_feature (483)..(483): n is a, c, g, or t
  misc_feature (503)..(503): n is a, c, g, or t
  misc_feature (510)..(510): n is a, c, g, or t
  misc_feature (526)..(526): n is a, c, g, or t
  misc_feature (636)..(636): n is a, c, g, or t
  misc_feature (730)..(730): n is a, c, g, or t
  misc_feature (851)..(851): n is a, c, g, or t
agctctcagtgtgcctctgtcctttgccacaaacatgaggttcacattccctctcaaggctaaantcctggaaaatgccaagantgttttanttggattanttgttgagtatgaaanggancaaanngttctcgancanctcaanaanancaaaccaanaaanaagggcanaanctttgagttanaacctctgttccaaaangtanangttatntananntgttgggtttggcttcctcatgancttcctgaanaaaaaaggcttcagcagtgtgggtancaanntantcgttgctgctttgggcctccagtggggcactantgtacanggaaacctgcaaancnaagganaaaaaantaaaattggaaanaaaaaaaaaaaaaaagcaaanatcagtgcagccanaattctganancttttggagctgtcctgggaaaaacaagccccacaccaaatgctgatcatnanaannttanaaaangttttctttgcccacaatgnatacctngttagtgaaatatttnaggcctctgacattggagcatcaatgacgatccatgcctttggggcctactttggcttggctgtagcaggcatcttgtatcgatctggactgagaaaggggcatgaaaangaagagtccgcatactactcagacttgtttgcaatgattgggactctctttctgtggatgttttggcccagctttaactcggccattgctgaanctggagacaaacagtgcagggccattgtaaacacgtacttctctctcgctgcctgtgtgctcacagcctttgccttctccagcctagtggagcaccgaggcaagctcaacatgattcacan

SEQ ID NO: 545952 - DNA, 294 bp, Homo sapiens
  misc_feature (7)..(7): n is a, c, g, or t
ccggagngcagcacggaatctagaaatgatttaaagtatatgtgaggatgtgtgtaggttacatgcaaatatagtcatacactattaggcaatttcctcactgtaggaacttcatagcatgtacttacacaaacctagcttacaaacccgtacagtatttactgtactttatactgtagataattgtaacacaaagtatttacgtatctgaacaaagaaagaggtatagtaaaaacacagtcttacggtcttatatgagaccactgtcatatatacattccatcattttttgtt

SEQ ID NO: 545953 - DNA, 127 bp, Homo sapiens
atgtagtaactaagagatagatgtatatggtatactacgcagtgacagactgacagacgagggtacagtgcaacaaacataagatcacaatcacacaatgaccagaatcgcctgacacctgaacaaa

SEQ ID NO: 545954 - DNA, 160 bp, Homo sapiens
atccacctgtcttggcctcccaaagtgctgggattacaggtgtgagccaccacgcccagccaaaccttctgttattagtgaactatcaattaactagaacttacttgtcacccagcaaataggcttgccggcctaaaggtttaactgattgccatatact

SEQ ID NO: 545955 - DNA, 591 bp, Homo sapiens
  misc_feature (481)..(481): n is a, c, g, or t
ctgtttccattcaaaccggcgctcctgtgcatcatgaaaccctttctagaaagcccaaagcctcatctgggagtttcttcttgagccacggcagaccttgaatgatgttgatgagaacggctcgggcgtgagcttgtacctgcttttgacccttccggaatttgcctcatacactagttcccaactgattacacctgcttgaatgaaaccgacttatttgagacacgtccaggggccgtcagattaacgcttgaaagatttgtcgggggtatagggactgactactccacaccagaggtaacccggggcgaccagctgtgagaatgacccgacatagtcatgatctgaggcatagagagcatctctgtgacagctgcctttattgtccccagtgtttacgcagacctcctttcgagacagatgtctctcctactaccacacaaacagagctgtgcattactgcgcagggagcagacggtancctatgtcgttgggagcggcaccttgaggaaacctcgaagctctagtttgtttctccgggcaggggagacaaatcagtcctggaagtgtgggcatatttcagggtatctt

SEQ ID NO: 545956 - DNA, 178 bp, Homo sapiens
  misc_feature (38)..(38): n is a, c, g, or t
  misc_feature (161)..(161): n is a, c, g, or t
  misc_feature (168)..(168): n is a, c, g, or t
ggcaacatagtgagacctcatctctacaagaataaaanactagccaggcattgtggtgcatttctgtagtcgtacctactggagaggctgaggcaagcggatcttgagcccaggagatcaaggatacagtgaactatgattgtaccactggcgttcccagnataggcnacacagccag

SEQ ID NO: 545957 - DNA, 919 bp, Homo sapiens
tgatcagatgcaatgtccttgatacccccatggtgccaccccaatcacagtcttggccaccagttctcctacctgccccggatgctgcctccagtacccatccctgtccccagtcccagctccatgcctcagatgaggaggagggcgatcggcagagccccccactggagctgtctgtacggcgagacgtatggcctggagccccgggccatgggctcctgcctggcggagacaggcagcaagaagaagatccgcctgtaccagttcctgttggacctgctccgcacgcggctgacatgaatggaacagcatctggtgtgcgctggacaaggatcaatgggcaccttctcagttctctgtccaagcacaaggaggcgctggcgctccgctggggcatccagaagggcatccgcaagaagatgacctaccagaagataggtcgcgcgcgctgcgcaacctacggcaacgcacgggccgaggtcaagaaggttgaagtaagaagctcacctaccagttcagcggcgaagtgctggaccgccgggggacctggccgagcggctgccacccgccccacatgagcccgcagcccccgccgggccccgccaaggcctccaccgactggccaatagcactctaagcccatcagccacggcccggaacacagggaggacgactcccggggcccagatggcaggacctgtggcgggccgaggcctcagctctcactccgccacgcctcgcgccccactccaggccccctccacatcccgcttcgcctccctccaggatctccaccccggctcacggacgccagctgggcgtcagaccccaccggggcaaccttagcagaggacgacccggggtactgaccttgggagtctcaagtccgtatgtaaataacatctcacgctctcaccca

SEQ ID NO: 545958 - DNA, 172 bp, Homo sapiens
attaggccacacacacatccgtaagcctactaccacactcattcacacccaccacacaactatcaataaacctgggtatagcaatccccctatgatcagcgaaccgtgtacacaggattccgccataaaaccaaaacatcactagcccactttctaccacaaggaacacccg

SEQ ID NO: 545959 - DNA, 320 bp, Homo sapiens
  misc_feature (125)..(125): n is a, c, g, or t
  misc_feature (137)..(138): n is a, c, g, or t
tttttttaatttttttttataaaaaaaatccataaattcttggggaagggggttataagctttaataattccctttagcggcccccccggggggggtccttaacaccacgtggggttaatatttnaggccccaaaannctttggcccttttggaataaaggggaaaaaaaaccccccccaagtaaaagggggttcgtgaattgtccccctaattttttgggggggcttatgggctttttttgaaaggggggctttcccattttttttttttaaaggggggggggcccctgggatttttccataaaattttttaaatttta

SEQ ID NO: 545960 - DNA, 1385 bp, Homo sapiens
catcatagtccagaactcttctgagtgaccattctagcaagatgccataatgcacattttcgaggttacaaggactgtcctctagtaatgctggcgagagatgaggagctagtcgaaatggttaaatttccattggggaacaaaccgcattgcttcagttgcatggtagtgccacgcgcctgagcactgctcgatcgagacatgtattccgcaggacctcagtatgcaaaacacgactcgacttctacacatcgtgtttcaacacgacggaacctaatcaggagtgcgatctgaactctcagtaggatgtaaggcaatcgcaggatttctaccaccgcgatagggacctgactcaacgaaagacagcacgcaccattcctctccaatttctattggattcgtatcgcgcctacgatcacgcaccacctccgtggatactcgatcccattttgtcgtggcgattcgaccgcggcggtcaggttcccctttacttgcaacacctttccggcgttctgagagcggcatcttactaactggggctcagacattcctagttgctcacaaagcagatctttaccgaagccacacttcgctacacagattaaggcttgtcttctgggcagagcatatgttcacatcgagcacccatttggaacagattctgatcccacgtggattgcacctccgctcacagccatacatgtgccatagctcttggcgacaaaatcttttgtggaacacacacgtgagccccttattgcctttctaagaagagccgcgttatatacactagtcttgtgcacttgcgcttcctcaacgcccactatcgacctgatcaggtaacccagcgtggctctcatttcccgcaaaaagaccacggcacttaccgtgggcaactacccactcacgggaaggatagtatatatcgaccccttggatcagcatcctttcactggacgtgagaaagaacatagcaaattcggcactccttgtcttaaacttgaaacaggccactttttcaccgtggaatgaagacaacctcttgaaaataaccatgaggtaacagtttaccgcatcaatcaactcacttttatggacatcttcgcgcaggtcactccttagttgccttgagtccatgcaccgctttccgttctgaaccactcggcacttctcaccgtcgagaagtcacgacatttctcatcttctgtggtccagctaacacacgacacggaaagcaaggcggaccaaaggaaccccgtccgacacggacacccgctcagcaggtccacaaaaccactcacacaaggtcaccctacgagcgcctgttcattgagtctcattccagcacagccgcaaagacacacactaaacaccagacaaaaacc

SEQ ID NO: 545961 - DNA, 143 bp, Homo sapiens
ttcaaggtttggaaactgcaaatgtccccttgatggggaatccgtgtgtgtgtgtgtgtgtgtgtgggggggggtgtgtgttttctcctaaacccgtgacctgaaatgtgtgatttttagtcattaaatggaagtgtttgcca

SEQ ID NO: 545962 - DNA, 420 bp, Homo sapiens
taggtggaccgcgacgtaagcaatagtatagttcctagggaggttgtgatgacgcagtgagtgaatgtgaaggcaacacttcagcgctggcacctaggaagtgctgcacgaagccttgtggacaggcagaagttgggtgtctttgagtttgaggctggggtgagttaatgtaagggcaagtactgcaaatgctccagaacccttaacaaagtggcagctacggccatggctaggataacactgcacaccatttgtgccactgagtcccggttaatacttaccaccttgaggaatcaccaagacctgtcaatctgacctcctaacttcctctcacatctgtaccttctcccaatcactggcacctctccaaatcaaagccctgttacttctcacctaaacaattacaagaccctcctacct

SEQ ID NO: 545963 - DNA, 169 bp, Homo sapiens
gtgtattcaccactgcggttcatgccttccctggacaagttccgtcgacacggtgagcaccgttgttgacctcccaagatatcggttcagctggagcctggtcgacgtgtattcaccactgggggcatgcctcccctgtacaagtccgtcgaacgtgagcccgtgctga

SEQ ID NO: 545964 - DNA, 233 bp, Homo sapiens
gacagtttgaacatacaaaacccaccaccgagaccacctcacacagtactcccagcttgacttcttcaaggaccgccaccaggcccagctaaattttttgtcgttctcttagagatgggatttcaccatgttggccaggctggtctcaaactcctgacctcaagtgatccgcccgcctcggcctctcaaagtgctgagattactggcgtgagccactgcacctggctactgga

SEQ ID NO: 545965 - DNA, 106 bp, Homo sapiens
tcaggactcccagctccatgcgccgcaataatagtgtatagatgttccacatgtcatttgtggttagtcagcagcaatcagtccaactggtctggctgcaaccatc

SEQ ID NO: 545966 - DNA, 1047 bp, Homo sapiens
agcgggaggtagtggcagcggcgccgcgtcgggagccgccgccgtcccggtcctcccgctcgccgtgaattggtgcctccttgattactggcttgcttggtgagcaagtgacaccggactacgtaaccagttgctactggaatgtcacatagcatatcagtcatgcagtcaatacacgcacttgtgcctcctgttgtcatacggtataaccgaggcggtgagcataagttgcttatgcttgtggaaccagaatactacgcatttactgtactctccaaaagtattggtacttgtgcgggtcagcctaggttatatgctaggctggtagagcctgtcagacacccgtgagaccaggtggttaccatttattagatacgcaagataccgaataagaccgaatgaacgctctcggagtggaccttctttgaacccatactcggaaaactttcccagtgcgtgacagcaggtcagttggggtgcagtagatacatgtggatacggacccttggggtttcacctgttttgtgcagtcaacgtcttatagcgtctggcacaaggtatttcataaacatgtctggatacacgtaagcttacgggcatgtgtaaaacaattcactgaaggggtggccttttcatttaggtacgtgtgcgcctcgaaccacatgggctccgcatgtttaacgcatttcgcggtgggtatgcatatgaggcacgagggggataaattggtcgcccctccctagtaaattttggaaaccccctagttgaattcgtatggctcgggtggcacgtggatttgcttattgcataccaccattggcaggaggggtctgttatgagctgtcccagtgggcctgtatgactgtgcccaccttatgggtaaaccggcacacgtagatagaagccaccctgagggttccttttagcacacttttcagcagcgaggcatcgagggggcgttatctacctttcgcaagggacctgattgtcctcacattgctactggatgcgcctattgtgcaatagcccattcggcatcccaaatta

SEQ ID NO: 545967 - DNA, 240 bp, Homo sapiens
  misc_feature (33)..(33): n is a, c, g, or t
  misc_feature (43)..(43): n is a, c, g, or t
  misc_feature (187)..(187): n is a, c, g, or t
ggtgggtggatccccgagatcaggagatcaagncccatagtgncccaacatggtgaaacccccatctctactgaaagtacaaaaattagctgggtgtgttggcacatgcctgtagtcccagctacttgagaggctgaggcaagagaattgtttgaacccgggaggcagaggttgcagtgtggtgagntcatgccactacactccagcctggcgacagagcgagacttggtttcaaaaaaa

SEQ ID NO: 545968 - DNA, 285 bp, Homo sapiens
  misc_feature (136)..(136): n is a, c, g, or t
  misc_feature (218)..(218): n is a, c, g, or t
  misc_feature (269)..(269): n is a, c, g, or t
cagtagcaaaacaaacaaaacaaaacaaacacctaccttcccccgacccagatagtccaattaaaaacaggccagagatctgaatagacatttctcaaaagaagaaatataaatggccaacaggtatatgaaaaantgtttaacatcattaatcaccagagaaatagacattaaaatctcaatgaggtatcacctcaccccagttaaaagtgcttttntcaaaaagatgatggagtaaaagatgctgacaaagatgtagagaaagaggnacactcatacactgtt

SEQ ID NO: 545969 - DNA, 939 bp, Homo sapiens
  misc_feature (292)..(292): n is a, c, g, or t
  misc_feature (326)..(326): n is a, c, g, or t
  misc_feature (337)..(337): n is a, c, g, or t
  misc_feature (342)..(342): n is a, c, g, or t
  misc_feature (351)..(351): n is a, c, g, or t
  misc_feature (356)..(356): n is a, c, g, or t
  misc_feature (700)..(700): n is a, c, g, or t
ggctgtcgccgcgggagcagacggtatctctgttgtgtccgcgtgtgcgccggtccccgcctgccgcaccatggagagctaccacagtgcctgaccagcagaagctgcaggatcttgaaggacacggccaaccgcctacgtatcagctccatccaggccaccactgcggcgggctctggccaccccacgtcatgctgcagcgccgcagagatcatggctgtcctctttttccacaccatgcgctacaagtcccaggacccccggaatccgcacaatgacccgcttgtgctcntccggccatgcagctcccatcctctacgcgtctnggctgaagctngtttnctggccgangcggngtgctgaactgaggaagatcagtccgacttggacggcacccggtcccgagacaagttttcaccgacgtgtggcattggtccctgggccagggcctcgggtgccgtgttgtgcgagatggctacaccggcaaatacttctgatcataggccatgcctaccgagtctattgcttgctgggagatggggagctgtcagagggctctgtatgggaggccatggccttcgcagatctataagctggacaaccttgtggccattctagacatcaatcgcctggggcagaagtgaacctggcccgtgcagcaccagatggacatctaccagaagcggtgcgaggcctcggntggcatgcatcatcgttggttggacacaagcgtggaggagcttgtgcaggctttggcacggcaagcaccagcaacagcattttgcagacctaagggcgaggagccgggacaaaaaggagctggtggagccccccaaacgtggtgataccaggattgcctcccgaagaatctgacctcaggagccggttgttgtccgccctggaaaacccggtgcggaggtccatcgggcactaaagggc

SEQ ID NO: 545970 - DNA, 231 bp, Homo sapiens
ccatttagcctggcagtgtggagggctgtgtacaaggccctgaggatgccctaccgaatcctgcctcggcagctgccccaaaaggggcgtcaggtggccacagctgtgcaatggaccaaggcgagaaggcagctatgggtcccactggggatcatcatcctgagccatcctgtttggcctcctgctcctgagtctactcatctacatcctctacaagcttggattcttcaa

SEQ ID NO: 545971 - DNA, 362 bp, Homo sapiens
cccggacgacgcatccttacacagcatagtacaccacgaaaaaatatgaatatggagatctccttcaccctcaacttaattgcccagttatacctcagtgtggtagcagtactgtgatcgcgggcacagtgcttggatcttacgatgccctcggtactgacctgaaggagacctacgagtcctttcccttttggagttggaatcatagccttgatgtggtctctggttttatgtcctgtgttcctaatgtaaaagtgcttaagggcttctgggtggtatggggtagattggggataagatttaaccggggtacttcttgaatggcttttacaagtaaaccaattttataatctttaaattta

SEQ ID NO: 545972 - DNA, 452 bp, Homo sapiens
  misc_feature (292)..(292): n is a, c, g, or t
  misc_feature (326)..(326): n is a, c, g, or t
  misc_feature (337)..(337): n is a, c, g, or t
  misc_feature (342)..(342): n is a, c, g, or t
  misc_feature (351)..(351): n is a, c, g, or t
  misc_feature (356)..(356): n is a, c, g, or t
  misc_feature (416)..(416): n is a, c, g, or t
  misc_feature (448)..(448): n is a, c, g, or t
ggctgtcgccgcgggagcagacggtatctctgttgtgtccgcgtgtgcgccggtccccgcctgccgcaccatggagagctaccacagtgcctgaccagcagaagctgcaggatcttgaaggacacggccaaccgcctacgtatcagctccatccaggccaccactgcggcgggctctggccaccccacgtcatgctgcagcgccgcagagatcatggctgtcctctttttccacaccatgcgctacaagtcccaggacccccggaatccgcacaatgacccgcttgtgctcntccggccatgcagctcccatcctctacgcgtctnggctgaagctngtttnctggccgangcggngtgctgaactgaggaagatcagtccgacttggacggcaccgttccgagtttcaacgagtngccaatggctcctgggcggctcgggcgctttnggtg

SEQ ID NO: 545973 - DNA, 261 bp, Homo sapiens
  misc_feature (40)..(40): n is a, c, g, or t
  misc_feature (140)..(140): n is a, c, g, or t
  misc_feature (147)..(147): n is a, c, g, or t
  misc_feature (193)..(193): n is a, c, g, or t
aaaatattaatggccaaatttttttaagtaatttactcanaatacatgtccttttcccttagtttttttctatcataatacacacaaagcttgaagatgaatcaacaattcttggatttaagtacttttatcctaaatanttaaatntctataaaaattaatccatctgagcacacaaactttacataagcanaaggatttatgaaacccaatgagacactgtaaacgaattgaagaagtaaagttaaacttataacagtc

SEQ ID NO: 545974 - DNA, 648 bp, Homo sapiens
  misc_feature (543)..(543): n is a, c, g, or t
ccgctaatgtgtgaaacgcagacttgcgggtactataacagaggttaggacttaactttactatcgccatagaataaccattaacacctagactactacatgtccaaggcaacatacatgtagcggcatattccctaccatacttgcgaaggcattctataccctaggttgccatgcacgattgctgaatgacaaatactagtttgcaaaaggccaaacctgctttaaatattggagcgttacttagaatcaacgaattttaaagctgtaaggcaattgaactcagggcattatcgatcatgttactaggacttactggtgacatactgagaacaatgtacatgcccctaatatgtaggtacttttagaccaaggttagaactatatgttcagatccattgagatgaaattaccctaactccttcgacggtaatgatacacctggctgttaaggatatcctttaaagttatgattttatgagcacttaatagcactaccagatttagcaaggaccactataagatatctacttcaattgattntcagatatacaaccattaaattgtatcagtagaagtatatcctttgcaattattgagagatcgcttaacattgtacgttggtcattctgacatttaccattgtcc

SEQ ID NO: 545975 - DNA, 149 bp, Homo sapiens
aataagcagtcagcttcatcctgctgtgactctagatgatccccccaccttttccgtggggggaggtgggcaggctgcagagaggtggtggccatgtggtgtgtggtctgtgataggcgggtcaggttgtgcccacgtgcataggtggg

SEQ ID NO: 545976 - DNA, 216 bp, Homo sapiens
  misc_feature (14)..(14): n is a, c, g, or t
  misc_feature (54)..(54): n is a, c, g, or t
  misc_feature (69)..(69): n is a, c, g, or t
  misc_feature (71)..(71): n is a, c, g, or t
gatgtctgcaaaanccagaaagcggcaaaagcaggtaaccttgtcacgccccgngactttcacatcaancntttttcaaagttgcttgcccctggcttgaaaggagaaaactcccaagattgagggaatttgggggttttttcttattaaagggggttttcccttgcttggaaccaggggttgttgggatttgaatttaaaacagctggcgacaac

SEQ ID NO: 545977 - DNA, 454 bp, Homo sapiens
gggtcaaaatattagttgtctcctagtgacacaagaggtgcaggatccccgagaacaacccacacccaaagagccagcgaacacaacccttgccaaagactgggggctgcgacagaataaaagagaacagccttcgccttcccatgcctatttgcagaggaggaaatgttcagaagtaataggaatccaccactgaaggagaatcaaagctcacagagacctcctttgagacgcaggcacaaaagaaaggctgaaatcagatggtgagaagacattgagggaaaagtctggcaaaactatcctcagcctaaacacactggaggcatttaaagtttgtgctgcactaagggtaacaggcgaatcaataacaataaaatgaacaatcccaaatcaggttctaaatggattggctcaacccccagactaaaggtttcaacagagaggggcggagcag

SEQ ID NO: 545978 - DNA, 1006 bp, Homo sapiens
  misc_feature (324)..(324): n is a, c, g, or t
gaaagtataggcgatagaaatggaaacctggggcaatagatataggtaccgcgaaggtgaaagatgatgaaattatagccaagcataatatagacaatggactaacccctataccttctgcaataatgaattaagctagaaataactttgcaaggagagccactacgctaatgacccccgaaaccagatcgagctacctaagaacagctaaaagagcacacccgtctatagtagtcaacaataggtgggaagatttcataggttagaagtgccgatccatagtctcatcctgagcctggggatgaactaggttgtccgacgatnagaatctctgagttacaagcatgtgtaaatagttgtagcgccgagcagtaacccgtctcaaatcactccttggtaaattttgatacttgtacagtccaacaagagggaacgaggtctttggacagctcagtgacataaaaatccttgtagcagagacgtacaaaccaatttaacagccatagtaggcctaaaagcggccaccgaagtgaagaaagggttcgaaagctgcgaaacatcctatctacctacaaaaatatcccaaacatattagtgaactccgttgacacccagaattggaccaatctatcaccctatagaagaacgaaatgtctagtataagtgacacatgagaaggcattctcctgcggatgagcctggcgtcggatgtgaacactgatctgacaacttaagagccaaatatctacaatgcaagcacaagtcattatgaccatcactgtcaacccagcccaggcatgctcataaggagaggctaaaaaaagtacagggaacccggaacatcttaacccgcgtgttgacaaaacatactttagcaatacagtgacaaggccgctgccagtgaacaagttaaaggcgagacctaatggaaaagtcgtaacaaagacctaaaggacgtataaaggcaaaagagaacattattaaagaagactcgaaaggaaaaaaa

SEQ ID NO: 545979 - DNA, 551 bp, Homo sapiens
gcatgtgttatcaatgtgttgtgggtgggtcagtgagctctctattcaggtaggagcggaaggttggctcagggctcatccagtccaattgtcccacaggtatagaagtgccctgattaaaactctcagagtctggctgtccagtcaaggattggcatacctccaagaaatggggctctaactaccccttcagagtagcccattctactgtggggcacctccaatggtcagcatttcctttccggcagcctctttcctgggctggggggtgggcggaaactgtcactccagcctaaccctcagaacaagagaggcagctggggtggaaacagaagcggaagaggtaataagtaaattccaagaatgaacagagacacggcagaatgggcagggacattcctggggtgccagcagtctctagcttgatccaggaggcactggggagaaggttgctgatggcaagattccaggcaggaggtgactcaaaaggccgggttgtcaatgcccctctgatccccggtatattcttcaggccttaagctgtaggggac

SEQ ID NO: 545980 - DNA, 533 bp, Homo sapiens
tctagaggatctcggtgagcagctggagagatagggccaagtgatgggctcatctaaactaattacatctgcatggactggtgtttcccaagtaaggtcacatttggaggtactagggcttggacttcaagatatggatttggcaggggggcataattcaacccataatacacaatttagaaaataaaatcatagagcgtggggccagacatggtggctcacgcctgtaatctcaacacttggggaggctgaggtggttggatcacttgaggtcaggagttcgagaacagcctggccaacataatgaaaccccgtctctactaaaaatacaaaaattagctgggctgggtggtgcatgcctgtagtccgaactactaaggagactgaggcaggagaatggcttgaacctgggaggtggaagtggcagtgagccaagatcacgccactgcactccagcctgggcgaccgagctagactctgtctcaaaaaaaaagggtgccaaggcagagtacgggagtggtgacccggagctt

SEQ ID NO: 545981 - DNA, 447 bp, Homo sapiens
atgtgcatgcatgtgcactgacaccacagattttatttaaccagtcatcaggttctctgaatggattttaatgaaagctactctgtttccctgatttcaacctaggatgatacatcagtatgcatacacatacacacttaacagaaacatttagagaaagtagctgaagttgaggaaggtaaaccacagcttaatacagcaatagaatattaaaagtttgtattaatttgggaagaatgtactttctaagagagttactcaactggtgatgtaaatcaatcatggcaggtgactgagaaagtcatgaaaagtgctggagcattggcagaagtgagggggtctcttttaggtaatgtgtgcttgacgatgtcatagtcattcagactattcatttaatggcatgtgtctaaggtttacaaaaaaaaaaaagtcgacgcggccgcgaat

SEQ ID NO: 545982 - DNA, 87 bp, Homo sapiens
aagcagtggtatcaacgcagagtgcccattacggccgggtcactcctgataaataacaaatttggagaaataaaaatatctaaaatt

SEQ ID NO: 545983 - DNA, 1231 bp, Homo sapiens
ggagagagagaactagtctcgagttatattttatttttttaaacaaaagggaccttgaaaaataaaatcaaggccggctatttaatggatgccgcccacagaagccacccacaattgtgaaaggcatgataatgtaaacaatacgagataatctcactcaccaaaagcaactttaaatactacaaagtctatattctgtgcaagcggctttggcgaggtgccagtgcagtgccctctacaataaatgttaggggacaacgtggcgcaacacgcgtagtcaccaggcggagactcaacaaatataaagggggtactctatatacaggagaaaaatatctttatccccccacatttctgttgtgaaaggagaggaggagggcctatatcagggaataatcgggggagacatgttggggaaatattccagagaaaaaaatcaaatactatactactcacatcaagacacacagagaggggagaaaggacaaacctagtggaggggcgccgaaaactgcgcggcgacgaaggaggagataaacacacagatacatgagcggaaggaaagaggcaccaccgccgttaataatagagcaaaacgaccacaaaaaagcagacggaagaagaggaaggcagcggaggacgtcgaggtagcaagcaaaaaaaaaagagaaataaagggaggcagacacgacaaaaaatacaacccacgcaggagaggaggacaaccacacagataggtggaaaaaagaaaatactaactaaaccaggcagagagaaacaacgaggcaagacaaaaaaaccaaaacaaatacagtcaacagaaagaacgaaagaacgaacaaacacaccgccacgataaacatgcccctacgaaatagagtagcataccaccacgaaaatctatatacaaatcgcaaacaaataggagagggaaagacaacgatattcccgcacgcaaaagacaacaagagcacacgaggggtagagacccaaaataaccaaaacaaaaggacggacacaccacaaaaagaaacaagacacgatgagagcaggtaggaaaggaaacccgcgccaccccaccccgacggcagggcacacaaacaacacttacaaccccgcgcgggccacccaacgaacatagaatggcgtgaaaagaaaacaaacacaaaaacggaacagagaaggagagatgaaggagaacgggccaacagcaaagcagaaagacaacaac

SEQ ID NO: 545984 - DNA, 1383 bp, Homo sapiens
  misc_feature (561)..(561): n is a, c, g, or t
  misc_feature (604)..(604): n is a, c, g, or t
tactccttacactattccttatcacccaagctaaaaatattagagacaaactaccagctacctcccgcacgcagagcccataaagagtaagacaaattagtaacagagagccctggagacaccgaaagatgacacgaaaatcatggtgtcgctgtcattcagttgcccccagcgatgtcctagcggccgtagcccgtccgcagctagcgtgtatcattctagtgtgtcccgccgtgcgtagttggagtcgcccaaccttcgcgagagtagcatcgtcagtccagagcgagagtccgggaccttatatttcgagccgagcgcgcgagaccacagtggagcgttagagtccaagacttagagcgcctcgaaacagagctaacaataggaattaagtcccactaaccagtcgagagcgagctatatatatgcgtaccggaaaaccgtggagttcgtcgtgtgagttagcgtaagggtacttcccgtgtgagcatcacatttgtctctcatgtggcccccaacaaagcatacagcgcgttccccttcggggaagcttccctggcncttctaacattccactattatgacgagccaaaaacgcgagcgnccatagcgtgagttcgtcataaaagccctgaggcgccatggtcgcagtcgcgccgtgtactgaggcgaggcggcaggtgcacttcactagggcctttcgactactaaggagttaaacgcaatggcccgtagcaccacattcgttaccatcaagggcacaccgtacaaccccctttaatccccagtactagttagttatcgaaaagccatcagcgcttactcattgcaagccaaattagccctgggcccgtactgcctaaaccggtaacatttactggcagggccaaccttacctcattgcaccctaaattgggaaagcgccaccctaagcaagtatcaaaccaattaaaccttcccctctaccactgtgattcatcttcacaaattcctaattctactgaatattctaaaaaatcgcttgtcgccttaaatccaagcccacgtttccccactttctagtaagactcttactgggacgaaaacattaagacacaagagaacctccggattatatttacgtggccggcgcagaaatgttacgaacaggggaccgggcaaatgagtggtctctgaccgcttcgttccaacgggaaacttacgggcccccaaaagagcgcgcataatcaacgagagaatagtgccgacaaaaccacataacctaaatgagtaatataggcaatatcgataaacacatacacaacaccaacacagcaatatatcacaacacatacactgatcaacacatacatagcaatacgctttctatctatctttctttgc

SEQ ID NO: 545985 - DNA, 402 bp, Homo sapiens
tccggttattgcaatcagcactctcgagtggacctgaggagctcttcacaagctcgaacgattggaaagggctcgtagggggaggtctacaagggcatcgataaccacacaaaggaggtggtggccatcaagatcatcgacctggaggaggccgaggatgagatcgaggacatccagcaggagatcactgtcctcagtcagtgcgaaagcccctacatcacccgctactttggctccgtacctaaagagcaccaagctatggatcatcatgtagtacctgggcggcggctcagcactggacttgcttaaaccaggtcccctgaaggagacatacatggccacgatcctgcgggagatcctgaagggcctggattatctgcactcccggcgggtaccgagctc

SEQ ID NO: 545986 - DNA, 440 bp, Homo sapiens
  misc_feature (154)..(155): n is a, c, g, or t
gtttctcatgggtaatatagggataattactggcacctgcctcccaggccattctgacgtgtaaccgcatataggagcccactggctgagtagctaccatcatcgctggtggggaaactggtggtaggggtgtgagggtagtgggggtgtcagnnctccaggtgttttagaacaaggtctggggcactcacaagtctgcctcttggctgacaccctcaaagcccatgttctgtgaggccacatagaacacatgcagtcttagcaaatgaactaatgactaccgtgggactgcctggaccacctgggcactctgatggctacaactaatacgtcctgtgggggcattggcagagttcccccatgatgagggccacgatagaatttggaccacttaggggtaccattccaacccctacagtaattgcacccggggccttggg

SEQ ID NO: 545987 - DNA, 115 bp, Homo sapiens
cctgtgtcaggttgtgctgttcgaattcatagaacaggcaggttagaagtagggtcttggtgacgaaatatgttgtgtagagttcaggctcttggtgaggagcacaagctgggac

SEQ ID NO: 545988 - DNA, 496 bp, Homo sapiens
  misc_feature (54)..(54): n is a, c, g, or t
  misc_feature (56)..(56): n is a, c, g, or t
  misc_feature (61)..(61): n is a, c, g, or t
  misc_feature (65)..(65): n is a, c, g, or t
  misc_feature (67)..(68): n is a, c, g, or t
  misc_feature (72)..(72): n is a, c, g, or t
  misc_feature (74)..(75): n is a, c, g, or t
  misc_feature (83)..(83): n is a, c, g, or t
agaaacttcggtcaactttcagtggatccaaatggacatcatttgtcttcctantntgacntatncnnaatngnngatgacanatgaatgtcataggatccatgaagtgacgaggttaccgtgtccagagtatctgcagtgtagttcatcatattcgacacagtgggtccatggtcgggaaagagctgacatctgtatgaggtcaacaacgaactctgcaccatcattatgtccgtctaggagtaatgagctctgcctctaccatcagagatactgtagcagagtctcttgcgcaaagggttcaagaagaagacttcttgatcgatctgtcgcatatgaggctcgagttgtgcaagaatggactcaggagaagaaggggtcgatcctcaaaaactgctgttcgagccatcctgaagcattcgtggctctgacgtaagcgagaggcgcgcagaacagcggaaaagcatgggaagaacgatgtcaaactctgcgcgtc

SEQ ID NO: 545989 - DNA, 1068 bp, Homo sapiens
cacagcgtcgcccacgcgtcgattctgatgtctcccagatgaatgatagactgggagaagatgaatccgttgctaatgaaatatatataggcttcctccgtaaacgattccccgtttgaatccactacttgccagtttcttcagcaaggtgctaagtatccttatcagcagaaaaccagaacagattgtggctttcttaaagaagaagcagtgattaggtagaccttatgtataaagcacataggaacttctgctatcatggatatcgtggctcaggctcctgagcgtgtactcgaaccgtccatcgagcccaaggctaatgattgtgcgtgaaagttgggttcaaaatgaggcgagaaaattgatccagaggcttgtggagagatacgattcgatccaatcgcaatgaagaagaatctgacattcagaatgctatctagcaaatcactgttgtttgaagatttgttcgacctgaagcaagagaccaagaatagtgacgaaaagttcatgacacatggtaacaagagaccctgacctccactggcgtatggcacagactctacagaacacacgcaacgacaacttcatacagaagccacgctatactaatcaagatatatgttcgcagcaaagggacgtaaaagagtgacgtcagcacataagtcagggtgcaaatcccaggaatattggcgtgaactgtatactttgaggaccacgaacgaacaaacaattttgaaaggggccgtattcggaggaatcgtggcccacccaggcggatgaggccaatacagcgtatggtaccaagataaacaagaagtgtgcatacgacaggccactccagccggcgaaccaacttgggagatcattatcccatagcaaccgtccatggcacaggaaggcgaagcccaaagaaaataacgtgctgactagaaaagaccccaccatgcggggagtagaggcacggggaaatccatcccaggctgggagaacataacacagggatcgcagagtgtccaacaacagagtagagacaaatccaaggcctaggcagcagagagaccaaaacac

SEQ ID NO: 545990 - DNA, 214 bp, Homo sapiens
cggttatagaggacatggaggcagcggcgcgtataggacaccctcaccgtatgctgacctggacatggtcacctcaaccggacccccaagcagccggccccaagcttgagccgtccttctcagagtacgccagcgtccaggtcccgcaggcagtgaactgggaccggtggttggcatctagcgggctaccggagcctcgaatttcgctacactc

SEQ ID NO: 545991 - DNA, 439 bp, Homo sapiens
tgaaggcagtgagcaagatcgcgccactacactcagtcgggcgacagagcaagagtcattcccccaccaccaaaaaaaaaaaaaaaaaaaaagaaagatgttgtgatacttttcacttttttcctaacacccccaaccaaacacttttttgcttttgcttaaagcaaacgagaaaaaattctaaataggctctgaattctcagttttctcttctctacaatgggggcagtgttggcttgcacctcccaggggctggtctgagattctgttgcctcccttggcactggtgagcttggcacagggacaggtgtcccaccccaggccttttgacctgggttgtcctttgggcctggaactttcctcccgcgattcctcctgagagggccccctcatttcctttcagggcacggcttcaaacagggggggttcctctagagtc

SEQ ID NO: 545992 - DNA, 4839 bp, Homo sapiens
gcgagaaccccgactgaccgcggccacggcggctccccgacctgccgcgtcctgcgggcggcgctgggctccgggcactcgggctgcgcccccatggcctcgcccgcggggaacctgagcgcgtggccgggctgggggtggccgccgccggccgcgctgaggaacctgacctcctccccggccccgaccgcgtccccgtccccggccccgtcgtggacgccctcgccgcgccccggccccgcgcacccgttcctgcagccgccctgggccgtggcgctctggtcgctggcctacggcgccgtggtggccgtggcggtgctcggcaacctcgtggtgatctggatcgtgctggcccacaagcgcatgcggacggtcaccaactccttcctcgtgaacctggccttcgccgacgccgccatggccgcgctcaacgcgctggtcaacttcatctacgcgctgcacggagagtggtacttcggcgccaactactgccgcttccagaacttcttccccatcaccgccgtgttcgccagcatctactccatgacggccatcgcggtggacagatacatggccattattgaccccctgaagcccaggctgtctgccacggccacccggatcgtcattggaagcatctggattctggcatttctacttgcatttcctcagtgtctgtattccaaaatcaaagtcatgccaggccgtactctttgctacgtgcagtggccagaaggttcaaggcaacatttcacgtaccacatgatcgtcatcgtcctggtgtactgctttcctttgctcatcatgggcatcacctacaccatagttggaatcacgctctggggaggggagatcccaggagacacctgcgacaagtaccaggagcagctgaaggccaagcggaaggttgtaaaaatgatgatcatcgttgtggtgacctttgccatctgctggctgccctatcacatctacttcatcctcaccgccatctatcagcagctgaacaggtggaaatacatccagcaggtctacctggccagcttctggctggccatgagctcgaccatgtacaaccccatcatctactgctgtctgaataagagatttcgtgctggcttcaagagggccttccgctggtgccctttcatccacgtctccagctacgacgagctggagctcaaagccaccaggctccacccaatgcgacagagcagcctatacacagtgacaagaatggagtccatgagcgtggtattcgactccaacgatggggacagtgccaggtccagtcaccagaagagagggacgaccagagacgtaggctccaatgtctgctcccgcaggaactccaagtccacctccaccacagccagcttcgtgagctcctcccacatgtcggtggaagaaggctcttgatttctctctggggtcaaggccactgcaggcaccccttctcctgtcactgctgctgtctctcactctctggaagctgaaggacagtttttagacagctacgcttacaataagacagattgcacataaatataacaaaaatactactaagatatgagctctccccccaaaaaaagaacaaaatgggctttaagagtatgccttgaaaactctaaattattaatatgatacaaacaaaaatatagatccgagaaatatttataaagtgtccagttttgcttatttaaaagtcactgtgcacatttgtgacactgatatggtagttttttcccaaaatattaaagtttaaaatttaatactgtcagtgaagagaagccatgttttccattacagagcatagaatggaaaagttaaatgactcattttcttacaatagtgatggaaatttaacctcaaaaactaacaattaacgaaatctcaagaaaacctattttgtaccataacaattttcaaagacatttaaatgaaaaggaaacctaaatcaaaccactaggcttatctaaatgcctttctcttatttttttctgagaaaatgatttcaaaggaaaaaaatgtagctttgattgttacatattttaaatgccaagttaatatgtagttaaacttaagaccttaaaaggacaaacaaaattcctatgatcctctatttttcagaattttgttctaagtaggtaagttgtaagacattaaatatactttctgagatggaaggaaagaatcccatttgtctctgtaactggctgctagcctttaggcaggaaccacccacagcctcacgtagccatgaaggtggacaggaacacctcccagctccaaggcagttgtttttcccctgtaccccagcaaaagttccagacatgcactttatcaaccatatcgtgtcctcctcctccttcatcaaagaaggagtgtgggcatgggggaaggatcagaatgcgtcttgtgaaaatcctgagaggaaaaagttgtaagaattatgaaagcaaatatagctgatgaagttaatatacatgttggaaaatcagacaggaagtagaaagttgagtcaactctttgaaagatgtaccatagtttgggtcacccgtcaggtgagtgacaatattaccctgctgttccacacagagacctgtacgctctgcataggtaacccttgtccctccagaaaggacgggaaagaggcatttgttttactacaatagtatattttttgagaaccatatttgtgagtgttttatgcctcaatcttgaagcatgaacctttccttaaattaggaatactgtcaatcctgctgaagaaatcacaacccttctggaaatctaaatgtgttatataaacttctgtaaaatattgttaggttttgaaaactgtctaaaataattatctctaacatttatttcattgctatgccttccttagtgtcagaaccaaataacttttcaaagatcagcataaaagcaattatccaatgacaagtgatggtctattgttaccctgatattaatctcccaatcctgctttggagccaaagtcagaaatatttagttgttagtctaaacagcttaacaacatgagtttgagttgaatttcttttaatgacaccaataaacacaaacaagtagatggcacaataaatttgcagacatatacaaccagccaatgaatgtaacaatatcaagaagtaaattaaaattaattctaaaacagtataagtggtctttccagggttcctagaaataacctaataaaatctgtgaaacatgtgtgcacttttttagataaacaaatgtatcataatttagaatctaattgtttgaatgttttaacatgtacgggagcttggtcttcaaatttcatatagtcagccactaacaaagtatatctgaaatacatactcttgaccttcacatgcattacgcaaattcatgctatggcgtttctaaagaaaaaatagtagcttaatcttgttttgttctgtttgtttggaattttttctttagtagatttgttgttgccttgcttaccgagcatcactccttctagtatggcagaaatactgaggtccaggtcacatctcttaaatagttaagaaaaactgacatcatttactcaatagtcatgacttttaaactaagatttattatatataattttcaagttcaagaaatgtaagcaataacagtaaaatgaatgaaaaaggctaaaggttagcccttgtgtctgaatttcgaagctaaaaagtatgaaatgatgcccatgcagagccgctttagtgggctctctgtgagtaaatctatgccagtgttttcacatttgccaaggcttagaagcatttgcctccaaatgcgctctaccccaatactaacgtccacgtccatcttcttcattatttgcagtcaaacactactcaggacactgagcagataggtacaacatcttagggtttattaaatttagatcagcagacaaaaatcctaaactatgttgagaaaaatatgggaaaaaaaagccttgccttgttttaaatattctcctttttgaaagaacatgctagtaaaacaaacaaacattgaatttctattattttgcacctggacaaagtgactgaagtggcctgccggggaaaagtttaaagcaaacgcggctttgtggagtccagtctagcttttttttagtggttcagtatgttgttgcatgattccacctcccaggtgacatttctgacccagaagccacatttacgttttcaggacgtaaatctgaaaatctcttgcaaaaagaaatctggccaacttcaaagttccgccgcccttagaaggcacacaaagcaccaagaagcttagtactaaacctaacaaacacaaaataaatgtaaaaaccaacactagttacctcagaatttggattggattttgttaatgcagaatttccccagaaacctgtaatcagtgtctgttaaattgctccattacatacaaagacaggaggattaaaacaattcaactaacagtaacaatctgagttccattttcctttgatggtgtgccagaagttaaggaaatcaagcataacattggccatgaagaaaaaaattgtaacaatctcactggaggccaaacaggaatggagaatcacatttaatggagctgtacaaagtcatttattgtgtgatttaatatacattactgaaatcctgcgagcaagaatttcatatatataaaatttgtaggcagtgcataaagtatttttcaagttgtggaaattatactgagtatgctaaaaattccatcttctgtatatgtgccagtattttggaaagtttaaatccaatgtttttatttaaatatattaaaaatcatatgaaaaat

SEQ ID NO: 545993 - DNA, 461 bp, Homo sapiens
  misc_feature (203)..(203): n is a, c, g, or t
ttaatgcgagaagtggtatacactctgtcatgagtcgacggtttaacaaaccaacgacaacagttgattatattcaacggccaaacttaatcagaaagttacaagacgccaatgtctggagtatggacatcacttatttaaagttaagcaatggtcagtgggtgtatagtgggtgtatttagcgtcagttttaaatctacgancacataagatattagcccatcaaatcagtgccacgatggataccaaattagtagttacaaaactacaaagagcgctatcaactcataaaaaggtgttgcagatcatccgaacaccgcatgttgctgaagactttgcgtggtgattgccagttgagtgttttcttggtctggcattaacccaatgattgatttgttctaattctttctgctgtggtttcattttgcgttcttttggataaacgccgcattcgatcagca

SEQ ID NO: 545994 - DNA, 373 bp, Homo sapiens
  misc_feature (340)..(340): n is a, c, g, or t
acctaaaggattttccgtggcacggagggcaacaagggccaaacggcgggctgactttgtcgccccggggaatttgcggggggggcgggggcaaggttttcccccgggtattttgggggccccttttttttttactaaaggtttttgggggggtttgtttttccaaaattcttttttttctaaattctggttcggcgggggcgttgcccaaaccctttgtaaattttttccctttctggtacttttctaggcgagggatttttgaaattatttgttttggcgggattttctggaattttctttttgggggaaagggagcgataattttttttttgggganaatttttgttatgttatcccccccattatgggg

SEQ ID NO: 545995 - DNA, 598 bp, Homo sapiens
  misc_feature (167)..(167): n is a, c, g, or t
cagtttctgagttacaccatccccaagcacacggaagtatttctcatcctgagcactgctctccgtgacccacactactttgaaaaaccagacgccttcaatcctgaccactttctggatgccaatgggccactgaaaaagaatgaagcttttatcccccttctccnttagggaagcggatttgtcttgctgaagcattgcccgtgcggaattgttcctcttcttcaccaccatcctccagaacttctcccgtggccagccccgtggctcctgaagacatcgatctgacaccccaggagtgtggtctgggcaaaatacccccaacataccagatctgcttcctcccccgttgaagggcctgagggcagggggtcaaaggattccaggctcattcagtgtccccacctctgtagataatggcttctgaccccccgaaacttcctgcctctgagagacctgctgcaagccagcttccttccctctccatggcaccagttgtctgaggtcgcagtgcaaatgagtggaggagtgagattattgaaaattataatatacaaaattatatatatatattttgagactgtgtctcaaaaaaaaa

SEQ ID NO: 545996 - DNA, 778 bp, Homo sapiens
  misc_feature (4)..(4): n is a, c, g, or t
  misc_feature (180)..(180): n is a, c, g, or t
  misc_feature (247)..(247): n is a, c, g, or t
  misc_feature (324)..(324): n is a, c, g, or t
  misc_feature (338)..(338): n is a, c, g, or t
  misc_feature (365)..(365): n is a, c, g, or t
  misc_feature (457)..(457): n is a, c, g, or t
  misc_feature (528)..(528): n is a, c, g, or t
  misc_feature (534)..(534): n is a, c, g, or t
  misc_feature (632)..(632): n is a, c, g, or t
  misc_feature (671)..(671): n is a, c, g, or t
  misc_feature (683)..(683): n is a, c, g, or t
  misc_feature (764)..(764): n is a, c, g, or t
ccgntccccaggaccagctgtgtgtcgtaagccaggaacagggtgaaacaaatggccccccagagcagcatagagcatgtggagccagtaaacgtattggtagtagagcacaatgctagtgacaatcccagtcaccaggagcacagttcccaggacacagaagaggcctgtgcacgaggngaagtccaccttggtctgaaagcagaagatggtgactgaaatggataccaccgcagtgatgatcatngcaatgatgacggctttggtttggtacatacgggaaatggtgcccgtcacgaagcccatggcaaaagaaaaaagggncagcagaaagaggncccaggggaaacggcgtcggggtcccnggcagcaggcaaggaccaggtaggtgacaacgaagacagcaaaggacacgaagaagacagccacaaccccccccacaaaggcgctgacaggncccacaaaggcgaagatagcaaggatggccacagagaagagcagccgcacggagaagaaggagaaaacccnccgganaaaagtgcgccgcaccccccggccatcccaccccccaggcccgaagccaccacccaccgccctcccccccccaccaaagccagggcccgggccgcagnccaggggcagcggggggggggggggcaggggcggggggnagccagcagggngaccgaagccaggcggcgggcagccagggaaggcaggaaacccccctggcaggacagacggccgcccatagcccccagggngcagagggccgggg

SEQ ID NO: 545997 - DNA, 308 bp, Homo sapiens
cttcgcccgcatgcacggtgatgcgcaggccggcgtcgcgcgcgcggttgaagtggttgaggaacaggctgccggggaagcccagctcatcgcccgccaaatccagcgcggtaatgccgtcgcggtgcgccagcaacccttccaattcctgcagacaggcggcctcgccaaaggtgcggctcatgatgccgatcaggcgaatgtcgatgtcgcgatcgcggcagcccgaacggatcccgtcgatcaccgcttccaccacgccggcgaccggcagctggtgcttcatcgccatgtagtaaggggagaaa

SEQ ID NO: 545998 - DNA, 567 bp, Homo sapiens
tgggcaggactccacgatgctgctggctgtggaatcgggcagcagctgcctaacaggccttcctcctggatgcacaagcagctaccagtgccaaaggtgatgctggcagccctgagactattatgatgcccagccttccagtccggttatcacaggctgccaggtcaggcttccctctcactgtacctggctgccagtttacctcttggcctctactgaactgcctgtctactgggccctgaaagcagcatgaaattcactgcctcacactccaggtcaccaaacaagtacccggtgagaaaagtactcctgtgtagagcaagcagggaaaggggaaaatgtagacaccaggatggagaccaggttctggagaggcagcaagcacatcctctcacctgcccacccaccttgttggtcactttgcccatttaaagatctgcccaagaagctgcagaaaagaaacgatgctgccatttcattgcatggcatttggacactcctctctgagctgctacagaggcaggcctttgcctaaagaagtcgaggtgacttaaaaagtgctttttt

SEQ ID NO: 545999 - DNA, 218 bp, Homo sapiens
  misc_feature (206)..(206): n is a, c, g, or t
atcctttagaggcacaggaggggcttgggcttacaagttataggctgatcatgcaggatgtggtcggataaataaaggggatgggctaaagggacgtaggagtcgggggcaggtttgggggataggagtcctcacctgttgtcataggcttaggccccaaaactctagagcagtggagcttgctactctagagggggtacccgagnctcgcaattcgg

SEQ ID NO: 546000 - DNA, 248 bp, Homo sapiens
tcatcgagtcggcccgcttaccgacggggtgggcagattgcttgagttcaggagttcgagaccagctggtgaaacctcgtctctaccaaaaatacaaaaaaaattagctgggcgtggtggcacacgcctgtgattgcagctactcaggaggctgaggtgggagaatcacttgagcctgggtgatggagattgcagtaagccgagattgtgccactttattccatcctaggtgactgacaccccgtcgg

SEQ ID NO: 546001 - DNA, 137 bp, Homo sapiens
tatatcatatatattggatatgtgatatatgtatatatagcatatgtatatatgggataccctatatatatgggtataccctatatatcctaatacattgatcctatatattgattatcttataaatcctatcatgc

SEQ ID NO: 546002 - DNA, 494 bp, Homo sapiens
gaagcttaatacacttaaggtgaagagtcatacaaatgacagcacagctaacttatgcaattactgtaggagacaacttagacattgatggacctacggatacccaaggagactaagctgaagcaggagaaggaggggacaattaaccggccttccaacttttgtctgtctcattctaaaatttacacagtaaaccatttgtcatccatgctggcccacaaatagtaatcagtttacgatttatgacaggtttatgttacttctatttgaatttctatatttcccatgtggtttgtatgtttattattagtgggagtagagccagttaacatttagggagttatctgtccccatcttgaggtggccaatatggggatgtgtaatttttatacaacttataagtgtttggcatattacttttggtacattgtggcttctaaagggcccggtgtaaaactgctttcatgtctaaagcaagaaaactgctacatact

SEQ ID NO: 546003 - DNA, 175 bp, Homo sapiens
attagtgcatttgtggatgcttgggattacaggcgatgaaggacgtagtagcctgcgaaaagctgcggggagctggcaacgagctttgatccgcagatatcgaatggggaaacccggcccgaatgggtcaagcgaataagtgcatgtggtggatgccttggcgattagggttagt

SEQ ID NO: 546004 - DNA, 296 bp, Homo sapiens
tttccctaaagaaaaaatttgtttttttcccccctttaaaattcccaacccattttaacccatataaactggcccttttgtgcccccgccctttcccaatttaatacctttttaacccaataattttttaatattttttcccgggccagatccttttaattttaaagttcccggatcctttttccttggctgggggccccttttagtttgttcccttttaaaacccccaacgagtgtttttttgtgctttccttttggtggggttttatcccctaaatgaatgtttttgggggcca

SEQ ID NO: 546005 - DNA, 100 bp, Homo sapiens
cgtgatgtctacaagaaggttctccgttcccggacatgggtccctcgtctccctgcctcggaggcacaggacaggaatcgtcggaaggttaaggcgtgcc

SEQ ID NO: 546006 - DNA, 305 bp, Homo sapiens
tttttttgagacggatctgggtttgttccccaggctggagtgcagtggtgcaatctcggctcactgcaagctctgcctcctgtgttcacgccattctcctgcctcagtctcccgagtagctgggactacaggcgcccgccaccatgcctggctaattttttgtatttttagtagagatggggtttcaccatgttagccaggatggtcttgatctcctgaccttgtgatccacccgcctcagcctcccaaagtgtttgtgacttctaaacattcatttaattgaagaattgtgtgtagagtcgacg

SEQ ID NO: 546007 - DNA, 110 bp, Homo sapiens
tacagtaaataaagccgtgcgtttccccttcccatgcccatctgcgtgtcaatatacgtctgtcattcatctgtgaaaaaatacagtgtctccccttctgtcgtcttctc

SEQ ID NO: 546008 - DNA, 832 bp, Homo sapiens
  misc_feature (1)..(1): n is a, c, g, or t
ncgggcccccccccgtcgttcttcctgcggaaatggttaaccaccggtgtaaagttctccaccaccgatcaggttgcgacacacctctgctgtaaggtaccccgccccggttttagtctggtgtcccccccgaatcgtatgcacccacgccggcgttgagggtctttcgtacctgagacaatatatatctttcagagtctgattcttatttggggaccacaaatcgcaacccaacggtcatatatcatggggagagacgagactgtgtgacacacctgtcagatacatatacacatagaaagaggtaattccccacgccatacgctttgttttaagaggcatagacacccacgtcagggacacacctctcagcctaccttcgctgcgataaattagcgcgcaataagaaatattccccccgtctccacttacgtttgtgactctcccctgttaacccacacagaaccagatatacccaccccgtgtagtggataccaaacactgtttactctttctttcctctcagcgagacatataatatacacacgcgaccactcatttttcaaactgtctaacactcttcataagaatatatccactatatttatatcttcttagatctgcccccgtaaactttacatgcgtgcctccatttatatcatccgagagtcaaatctataaagatcgatccatagacctttagcactctcccacgtgagaaaacaatacaccgggcaccacaaaagtgaatataatatagaagacaacacatttcttttcattaggcggtcaataaaatataagcccaaccatttccaccaatcataaacaa

SEQ ID NO: 546009 - DNA, 275 bp, Homo sapiens
  misc_feature (25)..(25): n is a, c, g, or t
ggggagaaccggtctccagaactgntttgtttccaattggcccaattaagattttagttagtaaagagacattggtttgatagataaaccaatagccatccgttaaaccttcagaaggaaaggaggatgttttgtggaccccttttggttttcttttttgcgtgtggccacttttaagttattagtttttataaatcagtactttttaatgggaaccacttgacccaaaatttgtcacaggattttgagaccccatttaaaaagtttaatgagga

SEQ ID NO: 546010 - DNA, 111 bp, Homo sapiens
aaagccatgtcatcatcagatcttcttggcttccactttcttctcctcagctggagcagcacgactctgcacaccagctgctggagcaggtccaccggcccctacattgca

SEQ ID NO: 546011 - DNA, 369 bp, Homo sapiens
tacacaaatctttattttctatatttaatatctgagtatgtttcactataagataatagcctccagttccacccacgttgctgcaaagccgtaatttcattctctttatatagctgagtaatatcccctggtatacatatacgacgttttctttatcccatcatctgctgatggatacttaggttgattccatatatttgctcttgtgaattgtgctgcaatagatatacaagtgcaggtatattttggatagaatgatttattttcctttaagtagatacccagtagtgggattgctgggtagaatggtagttctatttttagttccatgagaaatttccgtggctgtttttctaagaggttgtacta

SEQ ID NO: 546012 - DNA, 395 bp, Homo sapiens
tgatacccacggatgtgccgctccgagcatgtcggtccggtaaccgacatagagatttaaaatcggccgtggagcttcgcggtccacaccatatggacaagtcagcctgcgctctgcggcaagcggtcgcgagtgtccgcggcagatggtagtgcgcacagcatcttcaagacccaagccgttatgtcagatagcggacagacgctcgcgagatatcacgcataatttgtagcacaagatcttttggttgctggaccggaagcgtggcttgttcgttaccccatacgcagatcgcatcttgaaggcggacgttaccgcgagacggagtaatttgatccgacgtattttctgctggggacgaagacgcggacattttattcaccgaggtaatcaat

SEQ ID NO: 546013 - DNA, 160 bp, Homo sapiens
tttgattatcccggcttaaaattggttttaccccagttgcacaaaacaaaaatatttaaaatacctttggtattaaaaatgcttaaattttaaggaaatatccttaaacagtttccagaattttaatccatcaactttcctgtttaatagtaaaatattt

SEQ ID NO: 546014 - DNA, 347 bp, Homo sapiens
  misc_feature (44)..(44): n is a, c, g, or t
aaaaaaaaaaaaaagggtcaccacaagggcaaatgtgtgatttnatggggttgggactttcagccccatcccccaacctctggggaggagagagggactgaaggtcaagttgatcaccaatggccaatggtttaatcaatcatgcctacataatgaagcctccataaaaacccaagaggacaggcttcagagagcttcctgatagccagacatgctggggttcctagaaggtggtaggcccagggaggacgcagaagctctgcaccccttcccatacctcaccctatgcatctcttcatctgcagcctttgtaatagcctttataataaactggtgtgtttccctga

SEQ ID NO: 546015 - DNA, 534 bp, Homo sapiens
  misc_feature (113)..(113): n is a, c, g, or t
  misc_feature (295)..(295): n is a, c, g, or t
  misc_feature (485)..(485): n is a, c, g, or t
  misc_feature (496)..(496): n is a, c, g, or t
  misc_feature (513)..(514): n is a, c, g, or t
  misc_feature (526)..(526): n is a, c, g, or t
gagtattggttgttagaatttcagggaattccaccaagtggggaatgactctgtattaagggctgcaaagaaaagctcccaggccaagcattgagtgggaggtgctacctgcnctcagggatccacagggacttcaacagctgatgtgggtctcatcagcctcaaggtggccaagtttctatgctgagactatagcccacagttacaccagccatgatcctcagcagcagaggtagtgatgatgaagtctgatgcccaaagacaagcagaacaatatgcacagttccagccaatnccacgaggtagcctttgtacttccctatacctagctgggagggaggaaggaaggagagaggagactcctaggaagaggagaaaataattatcccaaagagactgacataacctggaaaagaccaagaactactaattagcaagataaagttcatttacctcttcctgtttcttaccaagatggtatgtancctttcagatnataaataaatttatgtnntcttgccctaanaaaaaaaa

SEQ ID NO: 546016 - DNA, 566 bp, Homo sapiens
gttacccaggtaaacagctatacacagtggtgcaaacactggagactcgtggtacataccatatgatgaagacttgtgtacaaagatgttcctgtgtaatgtaccaagcaaatatggatattgcctccaccaaaagacatagagattcttacctctatgctaagtttgtgtttgggtaccctctaggttggcatcagaggctcttgagctggtgtttgtttagggcattgcctctgtcctgaagataaaaggactctattaacagcattgacattgattttttaatgaaatgagatatatcttttcataaccagctgcgtttttttcccctaacatttgtttttggaggcttatcaagagttagagaacttagtgtagagcaaaacctgcatttctcctactgggccagctattccacttagcttgggtgacaaatagtgcttttggtatccattttttgctacttctgaccttgccttccaggcctaccaatagcagaatcaatccatctgtccctgagatactcatgttgtttcaaatgcctcctcccatttctggcatagtct

SEQ ID NO: 546017 - DNA, 378 bp, Homo sapiens
  misc_feature (10)..(10): n is a, c, g, or t
  misc_feature (41)..(41): n is a, c, g, or t
  misc_feature (55)..(55): n is a, c, g, or t
  misc_feature (68)..(68): n is a, c, g, or t
  misc_feature (117)..(117): n is a, c, g, or t
  misc_feature (269)..(269): n is a, c, g, or t
  misc_feature (284)..(284): n is a, c, g, or t
  misc_feature (298)..(298): n is a, c, g, or t
gcatccaaanatgtgaaaacatgaagatcaataaaaagaantgaaaagtctgctncattgataaacancatttatcttaataatgggtacttctctgaatttccaaagtgcccttcnaaatgccagtatcaaagccagtgcccacatgtgtgtagaaagttcaggagggttcaggggagttgaggcaggaacacaggctgctcagcccagggggtccaccgaggagaagacatcattctgggaccagtcacccactggaactggtttcnaaccaaggagatttnaagtcggggatttnccaagacatatttctggaatttcaaaacttaccagtgaaaataatatacaattgaccccttggaacaacaatgatttgaa

SEQ ID NO: 546018 - DNA, 482 bp, Homo sapiens
gggcttgagcagtctcaggggtgatggaccccagtcgatgtccacaatgttcccctggcactgaggggagatgggcatgagtgagttggtacaggaatcaggacctctcagcacttggcaggaggtgaactggataatttctcactaacaggtgcagggcaggggccaagcctgggtcatcctgatcatctgaaagagtctggggtcacactgagggactgtgagttgggactcattcatctcatgcatccctgaaatctgggcacccagcccatggcacccagctacgctgcttgtatttctttccagaaacgtactatgcagtcttacctccgggccacatggacttagctctctctcttcccaaaacacctttctcgcatgtcttcctatagcatggctcctttctgtcatacaagtccaatattcccccgagtcctcttcaacgtgtcctgccttccctcacctgcgaacctatgagg

SEQ ID NO: 546019 - DNA, 1543 bp, Homo sapiens
gctcatacactattattgcgcatttcgcaccttggtgaatgtcggtggctacattccacatttatactcccacttgctcagtgagggagatgaggtcagtgcaagggaggatggcacagaatacaaacacaaagattatgatgaaaacacttctataacgctgactcgggagaaggcctcgctgcaagatagtcatgattgctacaacatcagtgagtgatgaagaatgctatctcgtggagtatagccccattcttcatgtatgtcagtggcagcaatgtgacatgcgcgcatgtcactcggagtgcactttgaggctgagactcacagatgttctgtgcacgtgactcgttgcacccccagtcgaagatgatactaggctttgtgtctctttggatcataatcgcgttgggcgtctccaccgtgtcgactgtgcaatgtgcagtgggcggtgccttccacacgaacgtggtgctccctcgtgttgaaacgagccgcacggcatgagaggacctcctttgtcccaggaagatatcaccacgctcacacgactttcatggaaggacacatggtaagtaaggatagacgtagagtctagggttggttgaacattcgaaatacgaaacacacaacaaatggaaccacaacaagaaagaataccacttcgggaggaacaggacgttggttctcatcgaacactcgaccgaacttgaacttctaatcacaaagtgctggcaggaacacaggtgacggtctccttacaccaaaggataaacacaatgagcgaggaaatatacccctttaaccacaagagccattttggtttgaaaaacttaccttcaagagcacgtaccaaagaggggttatccttgtagtcgaacaccttccatattggactatttggacccaaaaggatttaataggacaaaagcgcctttcttgggaacaccccagttagaaggcaagggctgcccccattaggtgattattataccacacgtcggctgagcagtatcctacggaggacaatgccgcatattatcaccggagctgaaaagtgttatagaggatcacagtatcgcgccatatggaatatatccacttaaacgatactagcccacaccgagcgacagttttacccccagagtgaggcacatccaggccaccagagtagcgttaatcagaaacagattcacatagacagtaaacatgagggagagaaagaagaaccccagaacggaaacacgagcacctaggaaagttagcggaccaaaacacgggtgagcggacaacaggttggtacggcaccacaacataacaattcgagccgacccagacactgggtaactaaccgcaaatgggctaggcaaggcactaagcatcaaacacccacgagataaacacacagtcacatagacgagcacacagttcgcgatcggagcagcagacacgaacaccccaagagcatacaacgacagagcacacgagggaaactcaaacactcaggagtagcacccaagagacagagagactcatcagaagc

SEQ ID NO: 546020 - DNA, 952 bp, Homo sapiens
gtcaatagtcagatcccctgaatgcaggtatcgggtgttaaattgcctgcgcctgatttctgcttttcccggatgctgttgtaggaacctacgaagtagctataccttatggctttcaattccttgacccgagtggagcatcaggagatatgagtcgttccctcatttgatgtcatgggcttcccatctcgctgtctcatgggtgttttctgcctgaatatccacgcatgtaaggggcctaagtattggtacatggacttggggtcgtataaattcacgttctggatgttccccggagcgcactcttcatgccagaaatacaaaatgttgcgggtgtccgcttgtgaagggtcggtcacaggggacctccaagagcaagctgctgcttgtaactggtgtacccattttgaggccagcatggatcgtgtgatgatttgtggcagggggtctccatttgggtatttcttacccacgttggaccatcaaaaggcgggagtataaatcagaaaatgactgacctctcttcgtataaagaagacgcctgtactgtgggagtgtcaggtctcagcagatgaattgtttgccacgacattgtggcaggaaagtgccacccgaagattgaagctcgctataacaatccacgtggttgagagggcaattcatcccatggccgggaaccgagcggcgacaggatgagtgtcttcatcgaaatacataccccagatttggttttgtcatccagacattactgcaagtgccgagaacgtcattagttaaaagccatttttttgccgccgtctgctcattgaaaaagaagttggctcacatgtgaggaattcgccaatgaggtctaagggcctattgaacagtaagctcatagggtcacattgttaggacgcggtacacaggaaaggcgcgcctttcccgggaaacttttggagaaaagcgtgca

SEQ ID NO: 546021 - DNA, 149 bp, Homo sapiens
ttattcatacctctttttaaatggagtccacagactaaaggtcatgttccgagcactgaagctttcaaatgaccctcagttccaatatagcacgactttcttcagtttcatcagtagcttttcacaactctgaggcctgtggttaagca

SEQ ID NO: 546022 - DNA, 518 bp, Homo sapiens
tatgggtcggatgtactagaggtcccgagagagtaagagattagaactagcgtgtggtccgaagaccttaagcgcaaagctatctgtgaaagtccgtatagggattttgtaattctgtgtgtgcagaacacagttaaattattattattattattatttttgagacggagtttggctcttattgcccaggctgaagtgcaatggtgtgatctcggctcactgcaacctgcacctcccgggttcgggtgattctcctgcctcagcctcccaagtagctgggattataggcatgtgccgccatgcccggctgatttttgtatttttggtagagacggggtttcaccatgtttgccaggctggtctcaaactcctgacctcaggtgatgtggctgcctgggcctcccaaagtgttgggattacaggcgtgagccactgcgcctggtctcagggagcaatttctgattggcagctttggtttgctaaattatagaccaggtagagccgagggggatcctcta

SEQ ID NO: 546023 - DNA, 951 bp, Homo sapiens
  misc_feature (446)..(446): n is a, c, g, or t
ggaaacataggcagcactgaaaaaaaaaaaaaagctcattttaatttagactgacaattatggcctttgaggaagggctctccctttgttgggaacccaatttgccatggggccttggggtgctctgcgataacggggtgtgggtgggtttaggtttggcaaaatggcgccaaaaaaaaaaaacgggttccccggagaagttgcctttgaaattagggttgggcgcgcggagaggccacgccgtaaggaatttcaaaacccttaagttcacaaaacccttacttgggggggccattaacacgtgtgtttgtgaaattgccacatttccgaatttccagaattggaaccttgtgttcaagcggggcagttaaccgcgaaggggcctggaagttcccagccaatgtcccaacagcgtgtgtaacttttcccaactttgtgcacacaanttggggggcaactgtgacgagtgtgggtgattaatgtgcgacatctatttatttttttcaacgaaaacccgaggttttttcgaacaaaaaaaccttctctatggaaaagaatatactcatgtgttgagagcacccctgggggagaccgttggggggaggggggagtctcccacaaaaaactgtgtggtatctgtcgcaacaaaaaagtgtgtgtgacagtggcgttaaaccaagggtctctacgtggtgtcaaaaacgccttaaaggctcccttttatagaaaacccccctctttcagaagaggtttttccagggttcgtggacaccgccaagtttctcaccagtggcaacattgaagacttctgaatctatttaaggagacggtgcgaaacggttatgtgagagaaggttcagagagaacggccctttgcgagaaggcttaagattgtaaaataagttcctaccgttgggcaccctttgtgtcgaaaagaagtttacccaaggg

SEQ ID NO: 546024 - DNA, 228 bp, Homo sapiens
gatcattagcggcacatcaatgttcaatccagttcactgtatgaacatctccagtatattaatcactatggctattctattactctgttactatagctaacttaccctagattgatataaaacaagttaacactaagccttatgtactcaggactaaacccaattaagttttatatactactgctgatacacgtatgttaaattattatagatgggatttgattagaa

SEQ ID NO: 546025 - DNA, 482 bp, Homo sapiens
tgggggcatcaggacagttgccagggtgtggctgcttgggcacctacctgtgggactcccagacccacccaggggatggaagctagagaggaacctgacgtctcagctgaggacccagctcctgctctctgaacccacagccctgactttccctctgatctgctgtgagatgtgatgttggtggttctctgggcctctgtttgcctgcctgtatagtgggaggattgctaccgttggggatgatgagggtgtaattagactcctgagatttcagggttgaaaacagacctgatgggtaagggaggagaatagagtaggggtttgggcccctgagtcaggctgccttataacccctctgtgcccagttttcccatctgtaaagtggagccagtgatagtacttaccttgcagggtcgttgtcaggttatgtgagaaaatataagcagggcattgaattcactgccaggcacataataagtgtg

SEQ ID NO: 546026 - DNA, 286 bp, Homo sapiens
gagacggtatctctcacccagtctggagtgcaacagcgtggtctccgctcactgcaacctccacctcccagattcaaatgattcttgtgcctcagcctcctgagtagctgggactacaggcatgtgacactatgcctggctaatttttttgctatttttaagtagagacggggttttgccatgttggcccgaggcaggtggatcacttgaggccagaatttgagaccagcctggccaatatggtgaaaccctgtatcactcttttaggcccttctgtcgtcttctc

SEQ ID NO: 546027 - DNA, 733 bp, Homo sapiens
  misc_feature (550)..(550): n is a, c, g, or t
cacggtggctcacgctgtaatcccaatacttgggaggccgaggcaggcagatcacctgaggtcaggaattcgacaccagcctggccaacacgggaaaccccatctctactaaaaatacaaaaaaaaaaaaaaaatagcccaaggcgtgggtgggcagagtgccggttaatccccagcttaccggggaaaggcgtgagaacgggagaaatctcattggaaccccaggaaggcagaaaggttgtgcagtggagcccaagagattcggcgccactggcattccaaggcctggggttgaccaaccagtgttgaggacctccggatcttaatctcgtgacacccatttcacatgtcgcgtccctgtgtgttcaacaccaaaatattacccaaagagggcagacagggcaaggctacaaatctggcggcgatgggcaaggctcttcctataggaagagaacccacactaacgcttgtgacgtttgtgggacaccccagagcgcaagaggtgaaccgaggataaagattggtccccacaccccaaaagaggaggganacgggggggaggcccatattggcgagaatatattataatctttcccatgatattattttgggggacgccatttctcttactaatataacagattatttttgtcgtagaaatcctccattttcaaccatctcctgggggggaaacctctccccccgttgggggaagggcccctaataacgggaa

SEQ ID NO: 546028 - DNA, 657 bp, Homo sapiens
gttgacggatccctgagctgcaccggcatcccacgtgagcgcgccgccccccagatccagcgcgctgaacccgatcgccatggccctcttcggggaccctcttcctagcgctgcatggcgaggcgcatcatgcaggtgttcccagtgctgcaagatccgcgtcacctccaatggcgcatggagctggtgaagcaaggagcgggctgcgctattctggagcaagagctggagactatcagcattccggacctgcgagggcaaagaaggccacttctactacaacagtctctgagtgtgaaggtcacaggagctgcaactgacatcttccgagcatcgatttccagcacagcagcaggacgctgaatgcttcagaaatcacgcaatgcactccattgagggccatgcgcttcccggatgaccagctgtgtctaactggttcttctatgaatgggggctacatcagaggcctcagctgacgggtgtcgtaccatccagaactggtctggagactctcccgggatcccgactggaccggatgacaagtgtccaatgtctcctgccaggcctcttgtctcaagaatgcaaggcggacttcgagggaaaccttgcacagaagggtagtatgatgtctctcacaagtttcatcgatctcaggga

SEQ ID NO: 546029 - DNA, 289 bp, Homo sapiens
ctctaaacacgttgcacctatatgactcatcgggaatacacctctgtagagaagcagactcttcacctcccttcaacttttatcccatactatatctagacctatatatcttatcctgccaattcagtgtgattgaaaaccttttcgtttagtaccgcttagcagagggcctgggcttgcatagttgctatgcatgcagcagatatgagacagaggagggaatttttttagcaccataaaagcagctatgctgcagtacatctcactcgcagataccgaacctaggaaa

SEQ ID NO: 546030 - DNA, 372 bp, Homo sapiens
gcacaagagaactttcactcgagatttttcgataacaaacagatgttctcacattatgagcactacgcatgagactctaggtgagcacatgaggctcatactatggtgtatcttatgacaagttatgggcatatgagcacaggtgtggatatggagagttgacgagaataactcgatgcagtggaatataaggaccgttacatggtgaaagctgacctcgtggcattacatttagcatatgtgatgagccatgggtagccactacatattctatggttcctagagctctgtggtttaacttagcaggcttgtaccaggcctggttttatattttcgctcagggtattttctgtgaacagtttcctgctttcg

SEQ ID NO: 546031 - DNA, 291 bp, Homo sapiens
atctgtactacgcggttcgactctagactacgcggtatcgatctgactacgcggctctccagggacttagtatgcggcacactgaagggcttgttactgattgcgaggaggagcgtgcttgccccgttcagccccatgattcttgtcccagtactatgtcacggaatacggagaatcctaccatagaggagaaataatattattccatccaccaggtgcctgcaagagaggcagctgcgaacagggtacaccaagaggggacattccatctatccggactgttctatgctg

SEQ ID NO: 546032 - DNA, 560 bp, Homo sapiens
gagagagagagagagtgagtgagtcatagagagagcgtgtttgcgcagcattctttatacatgagcctttcctgctcatttaataatattttgattatattaaacaagactgctgattttgctactttttttaaggggtctttacgtaagctaaacatacatcgtagctagaaaaaaaatgtaccttagaattgcatcttccctctcatacccaagctgtaaacaattgaaatatgttgtcttaaatcactggggtcaatacatgcttatttgatttaaaacctgtatcatcaaactctctctctaaatttaaaatgctgatgaatatgatacttttgaggagagagtgtgctcagaacttaaacgggatttggaggccaagatgcctaagcgtacaatatttttttaattttcacctgaaacaagaaaggggtcactaaaataaaagttatatgacgaataatgtcctttgctttgcaaagtgttgctatagttccaaggattatgtcctctactttgaaagggtgcatttgtggcaatgtattgttcaaggcatttct

SEQ ID NO: 546033 - DNA, 268 bp, Homo sapiens
gatctagcaggacgtaacactgggttcgagttcagacactctggtagggccatgtaaagattcatcgttgcaacaaatcttttatatatactgctctctcccttacgatctagtgacaattgagcaagtgcaggaatagcatactattgtcttgggccctgtagggagtacacttcacctccacagttgtgacaatgttaaaagtcattggtggttggcatacgttgtcccatctcttttacaacagggtgcatcttttacgttctta

SEQ ID NO: 546034 - DNA, 171 bp, Homo sapiens
gagtgagagcttttagagaggggctgcaaagaagaaggtcgtccacatattgaagatgactgggagacaggtttaaggaagtgaggtttcgggctagagcttgtccaaagaaatgagggctatccctgaagccctgagggaggacagtccatgtgagttgttgtgactgga

SEQ ID NO: 546035 - DNA, 731 bp, Homo sapiens
cgacccccccccacctaccccaagcaaccacaacaccctcaagggattcttgtcaaacgctctagcagcctgatgctaaagtttttaaaaattacttaaaggtgttctttcagagagcaaggccctgaggactggatttccctgtgcctacttcatgatcatgaattccagttaatattataaagaggcgatttttgtgtgccattacacactggtctttttcacattgttttagagcttattgcagtatatgttttgggcatttttctagtaaacatgggtgtacattttcctaataccaggtatgtacacacacacaacagaagttgcctgcatgccggtccaacattgttctgtcatccacagcatgctctctaaaagacacacagcagttatcctcagcaaccttaattcttatttaatttgcaacattttacagtcaagtcctttataaagaccatagcagcggaacacacgtgtactttttacaaacttgctgcctatcacactctttgcaaattttctttatgtgtgaagacacaaagtatgggggacgacagaaatcaaaactaactttagtacgatagccatttcattacatatacaactgtattcaccgccactatgtattctacaacagacgaatggttttaggctccagtgttatacttataacatatatactatataaaactatatttctgtagtgaacaaacaaaacaaccacatgg

SEQ ID NO: 546036 - DNA, 525 bp, Homo sapiens
tatcatcctgtatcctataaactagttcatgtcatctgattgcagcaaatcttcatgagggccaagccctggatcagatacacaacattgcaccttatcaagtattgatgtagaataaaggaagaatatctctaaaagcctgtgtaaatactcttccatttcccaatttatatatgtgtatgatcaccagatttatattccatatacttcaatctaaacaacaattgaatgcaaaagcaaatcggagaatccagctgtcttctatcagctagacagcaaagcgatttgcaagaatggcacatcagccacttttctcactttacgttttgaaagatagctctattcgcaaaatgttataaagttggtatgtaaactgcatgtattattacatttatatgacttaagatatggaaacttattaagtcagctttaatgtccaatgtggtcaatatagatacatataacatataaacttaatatgaggttctcaataattgataagagtcaaatgttctctgactgcaa

SEQ ID NO: 546037 - DNA, 442 bp, Homo sapiens
ctcttacctggatcaaaactctccacacaaaaggccctgcaataaccactatagggcaagggctctcctacaacgagctctccatcccaggtaaacccaatctactgctgcctacacaagccacaggttttctccttcaggccttacttacaaatgtccactacgccaggcgcagtggctcacacctgtaatcccaccactttgggaggccaagctgggggagctcacaaggtacacgagatcgacgcaccactcctggccaacactgctgaaacctccgctgtctactaacaaatacactaacttagctaggcgctgctggggccatgcctatagtcccagcttactcaggcagactgagcgcaggagcaatcgccttgaacccactgaagcagcagatgcagtgagccgagatcgcaccactgcagcccagccctgacaa

SEQ ID NO: 546038 - DNA, 370 bp, Homo sapiens
ggccctggctctctagcactacacatttcacgttcaatcactgacagcccttccaaaacagaggctccttaaatctgtttcccacgcatgcactataagaaactggaaacggggcaaagtgccagctagaccgaggagtgaacaggtgagcagagctcagtctctggccccctccgagtccggggtagcctctgggcgttggccgctgccttggtgcgagatggagaggcagggcaggttaggtgtgcggagggacgtgtgggtatggtttgtatggtatagcagaggtctgcgcgcctgtttccggttcacgctctatcattctcctcagtctcaatactcattctatcgcaccctctggccttgtctt

SEQ ID NO: 546039 - DNA, 500 bp, Homo sapiens
  misc_feature (8)..(8): n is a, c, g, or t
  misc_feature (21)..(21): n is a, c, g, or t
  misc_feature (24)..(24): n is a, c, g, or t
  misc_feature (35)..(35): n is a, c, g, or t
  misc_feature (206)..(206): n is a, c, g, or t
  misc_feature (210)..(210): n is a, c, g, or t
  misc_feature (214)..(214): n is a, c, g, or t
  misc_feature (217)..(217): n is a, c, g, or t
  misc_feature (219)..(219): n is a, c, g, or t
  misc_feature (224)..(224): n is a, c, g, or t
  misc_feature (231)..(231): n is a, c, g, or t
  misc_feature (254)..(254): n is a, c, g, or t
  misc_feature (257)..(258): n is a, c, g, or t
  misc_feature (260)..(260): n is a, c, g, or t
  misc_feature (267)..(267): n is a, c, g, or t
  misc_feature (270)..(270): n is a, c, g, or t
  misc_feature (279)..(280): n is a, c, g, or t
  misc_feature (287)..(291): n is a, c, g, or t
  misc_feature (294)..(294): n is a, c, g, or t
  misc_feature (351)..(351): n is a, c, g, or t
  misc_feature (397)..(397): n is a, c, g, or t
  misc_feature (425)..(425): n is a, c, g, or t
  misc_feature (431)..(431): n is a, c, g, or t
  misc_feature (495)..(495): n is a, c, g, or t
tacaggcncggattttaaagnggnaatcccaaggnaaagccaaaacccttcccaggggaacccaaaaacggaaaacccacggggttggctcatgtctctatctcaaagacatggctggccccagaggtccatgtgtgttattttttcatctccttagttttccgggcccccccccgcccccacaccagccccaaatccacacgggnggcncccngcngnggatnggcgggngggaggtcccccccccaggggcnggnngncgccacncangggcaaagnnccccccnnnnnggnagggggaggccaggaaggggaaaaaagctaccatagcaattgggttgggaataaaanggtcaggtcctggggccattttttcccccctcttaaaacaaaaagnggaaaccacgggcccccaacaggcgggnggaggnttaagttcatagtgggccatttgcttcccgggggcctgttttgtgtgtagtccaaaaagtaggnaagag

SEQ ID NO: 546040 - DNA, 284 bp, Homo sapiens
gcacgagtaaaactggggatttcatttatggtaaaagtgatattttatgtcaatggaaaaaagaaggattatttgttacacagtttgatggcaaacagctgtttgggaaaattattatactttattttaactcattccttatgaacctccccaccaccacaaaattcaaggttgacagatttaaatgtaaaaaatgtaaaccataagaagtctattaaaagtctgggtgtatcttttagtgggaaatgccttcctaatcaagacacaaaacccaaaaatcatta

SEQ ID NO: 546041 - DNA, 304 bp, Homo sapiens
cccttcattcagccaattaacagagacagaacgaaagtagattttagctaccaggtgacaaggagaggagggaatggggagttacagcttaatgtgttagagttgtcttgttgtcttgtcttgtcttttctttttctttaggtggagtttcgctcttgttgctcaggctgggattacaggcgtgagccaccgcacccggccagaacttcatccctttttatggctgaatgatgacccattgtatggatatagtacatctggtttatccattcatttgttgatggacacttgagttgtttccacc

SEQ ID NO: 546042 - DNA, 102 bp, Homo sapiens
cagctccgctttgccggcagtgagtgcgctgtcttccatggcttcttctccatgcccgagtatgcgctgccagaagctggagctgctcctgatggccaccct

SEQ ID NO: 546043 - DNA, 1327 bp, Homo sapiens
  misc_feature (239)..(239): n is a, c, g, or t
agtctgcgaatgaccatatcagatagggccactggatcatgctagactcgtgtgagtcaactatgtgggcgaagaccctgttcatcagaaggttcaagacatgaatcctatgagaagcacctgcgtgctaattggatagctagcgtagtccatctatgctatcataatctctaacttgatctggacaaatagatgtacatggtggcatagcggactcagagctcgaggactagacgccnatgattaggacccatcgcaacattgagagcgaataggcacgagacggcaaggagacttcgcagtacaagcccatttaagtcgttcaacggtgtggcgtaccccgtaggaagcggcgagggcacattgaaggccaaaacccgattagggacaggagaaagcacggtactgactccttcctatcaatgaggcgggataactaacaacaggttacatctttaggacccacgtagagccatgggtgcgactgcgctgggccacctctgcgcatttgtcacctggcacacgagagctttggaaacctacagtgcgagcaatgtgacgttaggggcgagcttaggttgagatgcatattacggatatgtctgcatataggcatttaacgcgtaggaggcaagcctaaaggggttataacgccgacggaacaagaaccgttcaataagggaagaaatgttgggttatcgcaactatggcggatatccccacaagacccctaggtactccaaccaataatcaggctaaagcattgaatcaaaaccgttgcctcggaacttcatttcggactaggggcataacaacggaataccattatatctacacattccctataggacgggaagttcctcggtcgagcacccttacaaccaataaattagcgaaacttcgatccaagaaaatctataggttaggcgcaaggagcgagcccctcacaaggtaaaaacgataacaacaagccttatcatagtaacacacatacagataagaccgcagttacagcgtttaccaacgatgatgttggcgaacccattacggtatccaatggtgcccgttacaacaataatatatttccacccgcttctacacccccaagggataaacttcacttattctacttgtcgacggcgcgcaccaaatcattggagagtagacaaagcaagactccaaataatagaacgtatcacgaatccaacacttacctccccgacagtaggaaaaaccaagcgagtcaactacactacacgtttgttcggttctacattctccacacgttacttacaagctcgcggagactattctatgatccgattag

SEQ ID NO: 546044 - DNA, 1348 bp, Homo sapiens
  misc_feature (168)..(168): n is a, c, g, or t
aatccttagccaacagcgcatgttacccgaaattagaaagtatatgcgattaggaaattgaaacctggttgcaatagatatatgtaccgcaacgggaaagatgatacaattataagccatagcagtaactattagcaaggatctaacccctataccttcttgcttaantgaagttaactaggaaataaactttggcccggagtagccaaagactatagacccccgatacaccatgatcgtaggcttacctaatgaatcagcttactgtgatgcacacccgtcttattgtagcgaaaattagtagggcagatttgataggtactgagtgcgacgaagcttaccgagcactggtgatacgctgtttgtccaatgacttgacctcttatggtcaactttaatagtttgcgccacagaagccctcttaaatccccttgttgagatttaaacttgttaggtccaaaggaggaagcaggctctttgtgcacacgtaggtaaattaatcttgatatgcagtagatgtaccaagaattttaggcagccatacgtaggccttagggagcagccaccaattaagtaaagcgtacagagcttcaaacatcgacttatgcttaattaaaattccctacatcgagtatagcatgaaactacctcaggccccaaattcggcatccaatctattctaccctgatttggaagaacttcattgttcggtcatacaagtaaccagtgcacaaactatttctccttccagtatcaagcctgccggtccggatttagaactgatggaaaccttggggcaattaatacttgggccacataattcttgcaatcaaaccataacagatagatattaacccggactggtaaaaccactaaaaaaaggcatggatccataagggcaacaggttaaaaaaggtaataaagacacacggtggagaatatatgacacgacacggtgatttccaacaaaagataacacagatgtagttacccacgaagttttaatgagcacacacaggtaccgtaggaaaaaaggtattagtaatcagggaaggaaccactcaaccaagacaggagagtgaaaaaaaccagtcgagcgtaaaaaaagaagaagaagtatagtagtaacacgaaggaaaagagaaataaatttaacaaaagaaatgaatgcagagcatagaaagggaaggataaaaaaaacaacacaatagcatatatagatcagaaaaccaaaacaaaaagcaacaaaggaggagagaacaacgaacaaacaacaacatcattaaagaatacaccagcaccccccctccttctccatctatagacgaaaagacagaacgaaaaaaat

SEQ ID NO: 546045 - DNA, 412 bp, Homo sapiens
gtatccatgcgacctagagtacgaaccctgccgggccctactactcctgtcactagtatcaacaggtacacgcagagctgccgccaagttcctgtacgggggctgcgaaggaaaacgcaaacaattcctacacctggacacgcttgcgaaatgcttgctgaaggatagaacagagttcccaaagtatgccggctgcaaagtaagtgtggacgaccagtgtgaggggtccacagaaaagtataactataaatctaagttccatgacatgtgaaaaattctttaccggtaggtgtcaccggaaccggatagggaaccggttaccagataaagctactcgaatgggcttctgcgcaccaaagaaaattccatcaatcagatacagaccaaaagatgagggactgtgctctgccaa

SEQ ID NO: 546046 - DNA, 430 bp, Homo sapiens
  misc_feature (366)..(366): n is a, c, g, or t
gcaggacttttcttaagttacaaataagaccatcttaaactctttgctgtaatctgtaaggctagacttgacctggtcccagacattgtctctagcctcacctccttagctccctgtcctcattcttgccttctttgattccctctaaaacacaagcagcgattttccacttggattttttgcacccactgcacaatgcagcctggctctttccctcccttgttcctgtatctttttcctttaagtcttagaccggggcttctctggcttctctactaaaggagccccctctgagaagtgagcttccaaaaatattgtccctactgtcattcttcatcaacaatgggatatgagagcctatttttnccatatccctggcaacaagggagtatttccaaagttgttttcatcctggccagtttggattagg

SEQ ID NO: 546047 - DNA, 384 bp, Homo sapiens
taacattggatgatgatgagcgcgacagtggtttatttcagactgaaaagcctccagtaactgagctcagagttgattgattgatttattgactgattgactgattgattttttgagacagggtctcactctattgtccagactggagtgcagtggcacgatcatggctcactgcagtttcggcttcttgggctcaagtgattttcccaactcagcctcccaaataactgagactacaggcatgcaccaccatgcctggcttatttttgtattttttttttttttttttttggaaaaattgggttttgccattttgcccagggttttttccaaccccttggctccagttccttttttaaccttccaaaggtgttgaaattcagg

SEQ ID NO: 546048 - DNA, 533 bp, Homo sapiens
tcccttataccaggtaaggtgtactgggcaatgagaactgtgtatttatatgtatcctcagacacacacagatcgctagaagattttactatatgtatctctcaccagcacgtatttgcagatagatcagtatcactcactctcagctcatagatgtaccagactcagctcctataatttcttaaaatttgtgatctagacatcaaacatataggagctattttaagtaataaaaaaaaatgcaaaggtgatttacccagacaacctgcatgtggtgaaactctaagatgtaaagctacaggctgtccttggcctccatcttgaagatgcggctgtgctgccacacacctctgacttctaagccctctcacaaaatggctttcctaatagtgcatgtgtcacaaccagataagcacggtggctttcccacctcacctccagctacttccaagggcccgttctttttccggagttccaggacagcttccacaaactccttgccagctttcttctccagcgtgtatcctagacaa

SEQ ID NO: 546049 - DNA, 671 bp, Homo sapiens
  misc_feature (588)..(588): n is a, c, g, or t
aaagaacctttattactttatatgactgccacttatgctttcttgccaaatgcctatggagcaagtgctttctgagccggaactttttgacccttaccagctctaggagcaggcgcagaattctggcctgtggctttctgggcaggaaccgtctgggctggagcctttttactcgcggccgtgatcttttttgctggaactttagcagcggcagttgcatgagcagctgcatcagcaccatcacccttagtaccaggtgcttttatgcgaaaagctgtcaggagaactgcctttagaagctacataacttcattcttgattatactgggactcattggcttcgccttcataactgtaaaacgaacaaaatttgtcatcttggctttcctttatcagactccaatcttcttggcccatcgtgtggctgaccattatgcatagatgtctgccttctgccaggcttgtcggacatacttctagtgggcactgaaccgaaacttgaggatgaaatcactgatctgcatgcacttgaaaggcattgcctgtctcctgacttgagtgcaaaggccatggaccaaagccctgttntgatcttgacatctacaaccgcgaccaatttaacggatgatgtccaaatgagactaaggcaaccgggcaaccttacgagaggc

SEQ ID NO: 546050 - DNA, 296 bp, Homo sapiens
cacccccacccccacccccaccccccttattttccttttgtctcctggtgattaggccaaagtctgggagtaaggagaggattaggtacttaggagcaaagaaagaagtagcttggaacttttgtgatgctccatatcatcctgtacagcctgctttcacaatgtgttagcaggtccaggtgggttataatgtaaaataatgtgctttctgcccaagtggtaattcatcttggtttgctatgttcaccctgtaaatacaacagaacattaataaatataaaattgtgtaaaaaaaa

SEQ ID NO: 546051 - DNA, 607 bp, Homo sapiens
aacacgagctagatatactgcaagcatctctccttaagataaacagttgctgttaaaattatatatttttgatcaatatatttaaaaattaaaatttctaactttaaaaaaaaaaaaaaaaaaaaaaaaaaaaaaaaaaaaaaaaaaaaaaaaaaaacacccttatacaactggtgtgacaattaaaaccctctcgaaacccaactgattgcccaattaaaccatgtgacttccaatatcaatttgattaactaatatccccattccaaactctctaccaatcacgtttacaccctaactggcaactttgataaccaaacccaaattttgaatttaaaattcccattaaaattctctgaaattgcgtaaaaatttaactaatagtttaaccaaatcaccaaaatttttaaagtagatcaaaaaacccaaaaattcctcaaaatttattaattataaccaaaatttgctaaaataaatacccaatttcaaaacttgaacccgcaattgaaaaatctatcaaaccaaatgttcaaatcccaaaacccattatcttaatcaaagacctctaataacggatgtacctccaaaatttacattatttatcccc

SEQ ID NO: 546052 - DNA, 135 bp, Homo sapiens
gcacctgggagaaggcagaccgtgtgaagggggcctctgccacccgttgctgtggctttcggggagtgggaagtggaggcagagagccttccttacacttcggccatgagttttcctcatcgactccagccatca

SEQ ID NO: 546053 - DNA, 181 bp, Homo sapiens
gctcgaccagggtcttgctctgttctcccaggctgtaccactgtggcacaaccctggctcgttgcaacctccaactccctggctcaggcgactctctcgcctcagcatcccgagtagccgggaccataggtgcactagagtttgaggccagcttgggcaacatggtgaaacccgtctctac

SEQ ID NO: 546054 - DNA, 159 bp, Homo sapiens
gccaagcaatagccgcgggagggagccgttcaaccacacgttccctgtgggtcaacgtcctcctaacgtgctgtctacaagtctagctgtacggccaggtgttacgagtgctaggtcttcaaccaagccctctccaggtccccattcgaggaaaaccat

SEQ ID NO: 546055 - DNA, 476 bp, Homo sapiens
gcggagccttgggttccgggggcctgggaccctggtcgaacctctttcgtaccaagtggcgaaaggtcgggttcagggacgggtggcgcccgggtggcggaaggtggcgcgttcctatggggttggcccggggataaccggtttggcttgcgatcagactttcccattaggtgctttggaccagggggggaaattaccacggttaaaaacaccccaatttggagggaacactggggcccttccccattcccccttggcggggtgggcaggccttcgcaacccaacccttgggctataaacaaggtcgagttaattggcaacccacccgttcgacgccaagggggtcccgtatccgtcgccccaagcgcccaggtggcactacgatttccccaaccccctgggtcgcccaagcgtccaaccctggggggggttcccgggggggaaggccccagggtgggcgttccgcgcggccccgg

SEQ ID NO: 546056 - DNA, 729 bp, Homo sapiens
  misc_feature (121)..(121): n is a, c, g, or t
gacttccgtccgtggggggagctgcggcggtggcggtgcaggaggccgggcaggggtgcggagggaccgacggacgcacgggcgggcggccgggagccatggagcgcggccctggggcccngggtggaggcccggcctgtggcggctgcccagcatgaatgggctgtcgcttgagtgagcatgtgttgcctgtcgttctgcgtgttccgaccgtgccccgggcgcatcgctgccaatgcttgccgttccttgccgtcggaggccgaccatacttcccgtggtgccttgtagcccgatgccggggcactggtgggggccggggccgcccccattgggagagccctgagagcctcactcagggcgcacccggggcgcttggagagctgcaccgtgacggacgcgtgccagacttccagatacagccaagcgcgagcttggacacgcatcgagagtcttccccgaccagagagtcgcccgcggcgaatcgcggtctccgtgcattgtatgtcccgcttgcgtgcctggttgccagtgtacagcggtcctgcttctcgcacgggaatgccgtggacctgggccagatgagcagcttctacattggcctgggctcccgcatccagtgcaacatcttctcctacagaatactccggctacggtgcagctcgggcaggccttccgagaggaacctctatgccgacatcgacgccgctggcaggcctgcgcaccaag

SEQ ID NO: 546057 - DNA, 380 bp, Homo sapiens
  misc_feature (8)..(8): n is a, c, g, or t
aaaagacncaaagtgccagaatggctgcctttgagtgggggtgagaagaggtggatggcaggtaccacaaaagaagggaataaatatatgaaaaaattcaaccccctcgggcagaggctggggccccatcattatgcccagaaaaaaaagccccagttgcttacgttcccggcaacagggccgggaccagcgccggcttcttggtgaagaaggcccccctttcctcttaagggttttaagtatgcattcaagcacccggtgggcacccagcaccaagttgaccaggggccttcacctctgtgggggttccggccctggccttgaaaactgaataaaacctgcataattccttttgtaataaagccaacgcaaccccgaaa

SEQ ID NO: 546058 - DNA, 673 bp, Homo sapiens
  misc_feature (121)..(121): n is a, c, g, or t
gacttccgtccgtggggggagctgcggcggtggcggtgcaggaggccgggcaggggtgcggagggaccgacggacgcacgggcgggcggccgggagccatggagcgcggccctggggcccngggtgcgcggggccgggggtgggcttcccacaggaacagacatggagacctgtggttgcgaggctccctggggctctgggcgtatgggacccccgcggaattgggcgggcttgggggcacccttgagacactaccttttaaacgggggggccttgccattgatcctggggggcgccgggattatgcctttgggggtgttgtgggcagcatcatccccacccgttgcccaggcgaacgtccgggatgcagccacacatgacgcctacacccttgcacggagtgacaatgcgcccgtggccgggcggcggagtgagcgaggggaagccccaccgggaaggcgcagaggacccagggacaattggacggcagggggggaacagggacgaagagcaaatgggggcaatgacaggcatggacacctggaaggaacctggctaggaactacataactggacgggccacgcaactatggcccccgggaccacgaacacgcggatcgagaagaggtagcagacgaagactaggcagcaacgaagcgccaccgtaaaaccc

SEQ ID NO: 546059 - DNA, 81 bp, Homo sapiens
tacgtagcagagcagctccctcgctgcgatctattgaaagtcaaacccttgtgtcgagggtcgacgcggccgcgaatttag

SEQ ID NO: 546060 - DNA, 152 bp, Homo sapiens
tcctgcccttctgctcttgactcgtgtctgtcgtaccccgccttacggccatcacaggccttccatctgcggtagctttgttcgcactttccatcacggtctttcttactcaggagcgtccattcctcgctgggatgtggctggatctcgta

SEQ ID NO: 546061 - DNA, 105 bp, Homo sapiens
aaaacacgtatctgggcttggtagtgcgtgcctgtagtacagctactcagaaggctaaggtggaagattgctggtgccctggagattagaggttgcagtgactta

SEQ ID NO: 546062 - DNA, 352 bp, Homo sapiens
gaattcttatttggagaaagacacaaagttttgtagaaaataggggtgaggtgcgtggaccccaaagcctaatttcccagcagaaatcggccctggaactagaactccctgatccccagaattgcagctgcggatggaggtccggttcctgaagcctcgggtttggccgccgagtcgctgcctggtgggaggaaactggggttggcgcgggtaccagcctgagcgttcctctgacccggaaccggagggtgagcgcacgcagcccgcggccactgctcgggatccagcgttcccctctgatctctccagcgcattgctttgggctgaattctctcagccctggggagtggtg

SEQ ID NO: 546063 - DNA, 281 bp, Homo sapiens
cccccccccccccccccggggtgaaccttaaaagtccccaagcaatggattgggcagcctttattttacccccccctcccccggcccctttgggggggccccacccctaaatggcaggaatttggaaaaaatgcggtgtcacgtccccccctatgcccgcccacgcggtttgccccaactccaccaacacgtggggcccgtgaatttgggggtttgctctccccttaggtggttatgtgggtaaacttatatgattacttattaaaacccaattgggcgga

SEQ ID NO: 546064 - DNA, 181 bp, Homo sapiens
tgagacggcgatatctctgtcatcatcacatcaacatcatcagcatcaccatcagcactgtcatcacaccatcaccaccatcaacatcatcacagtcattatcaccatcatcagggtcatcaccatcaacattagtcacgcaccatcaccatcatcaccataatcgccggtcacgagatgt

SEQ ID NO: 546065 - DNA, 939 bp, Homo sapiens
gagagcagcaccccaccagcagccccgcacacctgctggcccgagactgtgctctcgacctgttcatccccttccctggagggagcaagcgccctctggacagacagaaccatctgaggctcacattgggttttgagacaagaaggggacgtgtgggtttctcttccttacactatttggctgcacatgtctttaacccaggagcccaggggtagacaaaggaggactgaggtaatcaatttgcacctttaaaatttttttcttttattttctttagtggtgacttccttcccaattatctttcttcatccatcccagtcctctgccctgacgtgtgtaactcttgggtacttgagcagatggaatattccagaggtgggaggtgggaggggaggggagaagtcccaaacaaagtgttcttgctctgacccatattaatcttgtatgcttggattatttaattttttcttttgcacatttttcttgtattaaggttgttcttcccaaaaagctggatttagtaacccagccaccagcatcgtctggaaatagaggctaatggggaggcccccatgagacaaagatccctccctccctctaacctatgcctaagacctctttagtttgggaggatccccctcatctcctggagcagtataccagtggagtggaccggaggggcagggctctcggacaggttctcctgtgtagtactggacctgtttcctaaccactcctaatgtggaccccactacattggttactgaaatgacctccagtgatgaacctgaatgggtggtttcccaacatcaaagggggggggctccctccgaggagatcgttgcttctcaccctttttacagcgggacagagcggacagaaaaaaacagacgaggaatatcgcacagaagtaacagacaggagacacagggcaagctt

SEQ ID NO: 546066 - DNA, 235 bp, Homo sapiens
agttgctacctcatcagacagagtgctactgcacaacagtgtatgtcagtggaatgtgtgtagtgtccagtgtgtgtggtgtgtggtgtgcagtgtgtggtgtatggtgtgcagtgctgtatgtagtgtgtgtgttgtgtacagtttggtgtgtggtgtgtgctttgtgttgtgcagtgtgcatgtgtagtgtgcagtgtgtgatgtgttgtgtgctgtttgtggtggtagcact

SEQ ID NO: 546067 - DNA, 257 bp, Homo sapiens
aaaagagggccagtgaggctgttgaatctaagtgagacagacaatggctccaaatgaggctagaaaaggcagcagggccagatgaccacggccacataggccatgatgaagcttttgaaattttttctaagcgcaacagggaactactggaggttatcctcatatttggaatcagctgttggcagatgatggaatgttgcaggaatggtgacgctgtattgagtaaaattataaagcttatgatggcagtgtaggga

SEQ ID NO: 546068 - DNA, 493 bp, Homo sapiens
  misc_feature (398)..(398): n is a, c, g, or t
  misc_feature (479)..(479): n is a, c, g, or t
ggcaatattagcctcattttacagatgtctgagaagatgagcattaatcaaaataataacttttgtagaccttgtcaggcaccttttagagaaactactaaaaacgtaccaacttgttttaataagaaaatctagagattttcatttctaaagccttagaataaaattatggaaaatattatcaaatcatctttgacaatgcataaagtttaaaaaaagaattttttcatatggaaacatactgttattttaggatgtagtgactgagtttgatacctcctttgtgaggtttgtttggtggagaaatgtgagaggaggttgtattgacccctaaggttttcccatgcaagagtaagacagtgatagtcctcttcaagaagaaaagggctttcttcttnataatatctgtggggcaaaagaagaattcccacacattcattggattaaggtaacatgggcgtcaaacatgtaattctgcngtttttgtgttggt

SEQ ID NO: 546069 - DNA, 454 bp, Homo sapiens
caatggggcagtctgcagaaactgcccagagctcacacatgctttaatcgcctgcacttacctccatatgacacctttgagcatttacgagagaaacccctcatggccgtggaacctgctcaaggatttgacggggtcgattacagaccctctgcctcgggcgtgcttgttcttcaagcacgttctgcttgcacttttgcatttgcctaccagacttttccgacggcgatccagcagagcagctgcaggcatgctccctggcgccgagccttcaccacgcactcgtccaagttcggacgcgcgaacctgcgtcccagcttgactccctgcctttcccaccacaaattctcacctggttgatctgtacactaatcacatttcaggcggacttcatgctatctatgttgtgcctccggcagcaaagcccttaataactattttacatccttaaaaa

SEQ ID NO: 546070 - DNA, 434 bp, Homo sapiens
  misc_feature (13)..(13): n is a, c, g, or t
cagaatacagggntccagtatgatgtcatcagctgcttaaatttgctggatcgctgtgatcagcccctgacattgttaaaagatatcagaagtgtcttggagcccacccaaggcagggtcatcctggcattggttttgccctttcatccctatgtagaaaacggtggcaagtgggagaaaccatcagaaattctggaaatcaagggacagaattgggaagagcaagtgaatagcctgcctgaggtgttcagaaaagccggctttgtcgtcgaagctttcactagactgccatacctgtgtgaaggcgacattgtacaatgactacttatgtttcttggacgatgctgtctttgttctccagaccagtataaacacgtggaggcccaagtcctcagagtcacccctgcaaccgaccctcccagaagaggagatgc

SEQ ID NO: 546071 - DNA, 324 bp, Homo sapiens
tgcgggtccttcctgaccttggagatagagctgcagtcccagctcagcatgaaagcatccctggagggcaacctggcggagacagcgaaccgctactggcgtgcagctgtcccagatccagggtgctgactgggcagcgctggaggagcagcttggcccatgcttcgctgcgagtctggagcagcagaaccagtgaatacaaaatccgtgctggattgtgaagcacgcggctggatgcaggagatttgccaccttacggccgcctgcttggagggagaggatgcccacctgtgactcagtacaagaaagaaccggtgaccaccc

SEQ ID NO: 546072 - DNA, 90 bp, Homo sapiens
ctagttctagatcgcccccggccccccatgtattacttttttttctgagacatgaatgtaagttgtaaacattgtgcccttttatccctg

SEQ ID NO: 546073 - DNA, 266 bp, Homo sapiens
tctctgagagtccagcacagaggagaagagcagctcacagccaagcagctgctgctctgatcccagcaatgctggggggaattgtttgagggctgccactgcagtctctggtctggagcagatgagaacagatctgccttgtgatgtcttgagtgggctgccctgtaggaacatgatttgagtctggataacttgttcagtgagtgagattgatgacttgtgacccatcttgtctgggtacctgagcgctgaacttctgtaactca

SEQ ID NO: 546074 - DNA, 171 bp, Homo sapiens
tctctgagagtccagcacagaggagaagagcagctcacagccaagcagctgctgctctgatcccagcaatgctggggggaatgctgagcttgtgtgtgcccccggatgcaagccctttccctcgcatgacgctacacacagtcgtagtctagggcagactgctgacacttg

SEQ ID NO: 546075 - DNA, 199 bp, Homo sapiens
ttaagtactcagagaactaacattctgcacgcttctatgctctggtacacgctggacagtagcccctgtaagcctggatactacaggccagtgcttcgtgaattaggagatgataccgggaccaccttccacccccagagcgaggagccgctggtactgatgtagtaggacccaacacccatatatccagtacaacctg

SEQ ID NO: 546076 - DNA, 361 bp, Homo sapiens
tatagatggatcccatacagctcctaccctcatatccagtccatcagagaaggcagagacagcctcctttcttccacaaaacaggccactgcagagcagtgtcgtggatgcagaggatgggcccacacaaggatgttcagagtatgcgtgcttgggaaaagatggtgacaaatgaagagtaaagtgacatggtgtatggacatggcaccagcttacagacttaggtctttgacaggatggtcaaggtttgaggttcaaagaagctatttccctaaacactcagagaaggcaaagggaatgttatttctattgctcccaacattgaatcattcagaagccgaaattggaagagatttcctca

SEQ ID NO: 546077 - DNA, 142 bp, Homo sapiens
cttggaatggcagaatcacattcttgggcccacacaatactccattaggatggtttttgtttttgttttaaaacggggtcttcctctgtcactcaggctggaatgcataagcgctattcttggtcactgcaactctgccttc

SEQ ID NO: 546078 - DNA, 109 bp, Homo sapiens
gccgaatatgcgctggatgcgatcctgggcgtctcctatttggatgccatggacaatattaccaggcagaaccaattctacgatacccatatgtcatcaaacaagaaaa

SEQ ID NO: 546079 - DNA, 91 bp, Homo sapiens
ggatttgctggtgcagtacaactaggcttaatagggatttgtggtgcagtacaactaggcttaatagggtcaagcttctaacgttagaagc

SEQ ID NO: 546080 - DNA, 184 bp, Homo sapiens
cctaagttgaatgctccgcgaggcagcactgaatgccaatgactacctgtgtgcctagttgcatgtccttgacgtgcgaccgtggagtctctgcgctggcacgaatgagtccctgtgagaggcagatgcgcgaccgggaggagcggcacgtgcggaaggcggccagttatcaggaggcgctggc

SEQ ID NO: 546081 - DNA, 124 bp, Homo sapiens
accacgattgtgatctgtgaggtcttctaaaaatttacaagaaacacgttctgtgtgggccctgtgagcacaggctggcctctgtatttaggcctgctttggatctcacagatcacccttcgtg

SEQ ID NO: 546082 - DNA, 419 bp, Homo sapiens
gccggggcggaggattttagcttctgttcggaaaaccaggcatatcggggggcttcgaaggctatatcaggacctcaggaccacgggcccaaacatgatgacacagagtgactcctagtcctgtaaacaagtaactacgcacttcggggccctttagtgcgtccaggacacctcaactacggaggaagcctagaaaacaacctcagtgccctaccagacgaagacggatgagcactccgatatcactcacatttctgtttatcggtgaatacagcgctaagatgccatcagcacaccacgctgggtaatagcttctgataatcgaagtctgcccatctagacaggctgccatttcattaagattcatgtagggcagatcaataccctaattggcctaatggcccgattgcatgggtcgc

SEQ ID NO: 546083 - DNA, 144 bp, Homo sapiens
tttctaacgagaacttttaaaatgatccgttccaaaaaagggtaggagccgcgagaccctccaactgcctcaagtgtctaagtacattagagtcaggaacggcgctttccagcgtccgccatttttgtggcgtcaccgcgtcgc

SEQ ID NO: 546084 - DNA, 344 bp, Homo sapiens
gatgactgacacctgtaatcccagcgacctatgcggccggtcacggctggcagatcacccgaggtcaggagctcacgaccagcctaaccaacatgagagaaaccctgtctctactaaaagaaaaatacaaaatatagccagacgtggtggtgcacgcctttaatcccagctactcgggaggctgaggcaggagaatcacatgaatccaggaggtggaggttgcagtgagctgagatcttcccactgcactccagcctggccaataagacctgtctccagcaagaccctgtctcaaaaacaaaaaaaaaatggcatattgactcctgaagaaattcaagccatgt

SEQ ID NO: 546085 - DNA, 110 bp, Homo sapiens
cagaatggtatcattcaccttgatgaggggatcgtcgtagcggatggtgcgggcattcatgagttcaccagatgagggattccttttgtgcccacaaggatctttctcac

SEQ ID NO: 546086 - DNA, 106 bp, Homo sapiens
tttgtcccggacaaatcctgtatgaaagagagatgtgggcttccttaatgagtctagtgttaggtgctgagacctttaacatgggcttatacagggagagagtctt

SEQ ID NO: 546087 - DNA, 655 bp, Homo sapiens
  misc_feature (30)..(30): n is a, c, g, or t
  misc_feature (38)..(38): n is a, c, g, or t
  misc_feature (58)..(58): n is a, c, g, or t
  misc_feature (61)..(61): n is a, c, g, or t
  misc_feature (117)..(117): n is a, c, g, or t
  misc_feature (119)..(119): n is a, c, g, or t
gttcactattcccctttcctgccctcactnagaagttnacgatgcagggtggagatgnggnttggatgagcctttctcaagcactgggagtttgatgctccaagccctctcccacanantacagagaacgtggtgtgtgccctgggcctgactgtgggtctggtgggcatcattattgggaccatcttcatcatcaagggagtgcgcaaaagcaatgcagcagaacgcagggggcctctgtaaggcacatggaggtgatggtgtttcttagagagaagatcactgaagaaacttctgctttaatgactttacaaagctggcaatattacaatccttgacctcagtgaaagcagtcatcttcagcgttttccagccctatagccaccccaagtgtggttatgcctcctcgattgctccgtactctaacatctagctggcttccctgtctattgccttttcctggatctattttcctctatttcctatcattttattatccccatgcaatgcctttggaataaaacaaacaggagtctgtttttgctatggaatgccccatggggcattttttgtggacttattgtttaaggtttcccccaactgtgatttttttgaacccaataaactattttgatgattttgggtggaaaaaaaa

SEQ ID NO: 546088 - DNA, 108 bp, Homo sapiens
atgggtcagataggactagtcaagtacatataagcctacccaatgtggttgtgactctaggaagatggcattattaggctgtatccatgcctcccacattctaggctg

SEQ ID NO: 546089 - DNA, 137 bp, Homo sapiens
  misc_feature (27)..(27): n is a, c, g, or t
  misc_feature (41)..(41): n is a, c, g, or t
  misc_feature (48)..(48): n is a, c, g, or t
  misc_feature (52)..(52): n is a, c, g, or t
  misc_feature (71)..(71): n is a, c, g, or t
  misc_feature (98)..(98): n is a, c, g, or t
  misc_feature (108)..(108): n is a, c, g, or t
  misc_feature (133)..(133): n is a, c, g, or t
gctttccatgaccatgggaggatgaangaaagcattctatngggaccnactngaagaaagaccgaattgcnaaaggtaagaaaggagcttatatgccnaggaaccagnattttagcaagttggtggggtctcnaata

SEQ ID NO: 546090 - DNA, 685 bp, Homo sapiens
  misc_feature (30)..(30): n is a, c, g, or t
  misc_feature (38)..(38): n is a, c, g, or t
  misc_feature (58)..(58): n is a, c, g, or t
  misc_feature (61)..(61): n is a, c, g, or t
  misc_feature (117)..(117): n is a, c, g, or t
  misc_feature (119)..(119): n is a, c, g, or t
  misc_feature (429)..(429): n is a, c, g, or t
gttcactattcccctttcctgccctcactnagaagttnacgatgcagggtggagatgnggnttggatgagcctttctcaagcactgggagtttgatgctccaagccctctcccacanantacagagaacgtggtgtgtgccctgggcctgactgtgggtctggtgggcatcattattgggaccatcttcatcatcaagggagtgcgcaaaagcaatgcagcagaacgcagggggcctctgtaaggcacatggaggtgatggtgtttcttagagagaagatcactgaagaaacttctgctttaatgactttacaaagctggcaatattacaatccttgacctcagtgaaagcagtcatcttcagcgttttccagccctatagccaccccaagtgtggttatgcctccctttcctttctccggggagaatntggctcctcgattgctccgtactctaacatctagctggcttccctgtctattgccttttcctggatctattttcctctatttcctatcattttattatccccatgcaatgcctttggaataaaacaaacaggagtctgtttttgctatggaatgccccatggggcattttttgtggacttattgtttaaggtttcccccaactgtgatttttttgaacccaataaactattttgatgattttgggtggaaaaaaaa

SEQ ID NO: 546091 - DNA, 830 bp, Homo sapiens
  misc_feature (110)..(110): n is a, c, g, or t
  misc_feature (259)..(259): n is a, c, g, or t
  misc_feature (310)..(312): n is a, c, g, or t
  misc_feature (500)..(502): n is a, c, g, or t
  misc_feature (523)..(524): n is a, c, g, or t
  misc_feature (600)..(601): n is a, c, g, or t
gctttttctacctaataaatacgaagggctgtagaagctcagggcccttgctcactagaaggagccccctgaccccttcttccaaaaatactttttgtcttggtcttcgntttctgcattcatccccctttcgttcactccacataacaaccaaacaggcgacaactggcaccttaggacaggggactgtgatgtgacaggtcctgcgtggagccagaagagaactggacacgtgacaaggagagagagcgagaatgangaaaacccgtgcgagcgaagtcgtgcgtgacgaggtggatattagagtcgnnngcaaaattcagctgggaccccacccaaagcgggcaattgtggagaagtcgtgcacaaccttggcaattttaaccttttattttcaatttatatgggcaaaacaccaaaacttgggcggacgcatgtttacaggcgccggacaaggaagtgcaagtgtcggtgggaccaaacttcaggtatttaccacnnntgaagggcttattattgaagnncaaagcaggaaaactggttcttccagtgaaacgcagggattgtgtgggaacaacttaacaactggtgttcttgcgnncagaagggtttggctggagggcagtacatggccccaaaggcgcagtggttcctttgttggattatctatagttaaccatctgaagcctgtgtgtacacaggaagcaattatgtgtacctgtgataaatcaagcagtgaccaatgttactttcctcctggtcttttacctaataattgaagggtgtaaagctcaggggcctgccataagagagagttcctgacccttttc

SEQ ID NO: 546092 - DNA, 154 bp, Homo sapiens
ttttaaataatatacactggcatcagccaaagaaaaaatgcaaacagatgtacaagaagctcctaaaaagctgcatccatttccatactgcctgaccccgtgtgggtatgcccgccctcctacaccctatacagcagggtgttgccacagcttg

SEQ ID NO: 546093 - DNA, 654 bp, Homo sapiens
  misc_feature (30)..(30): n is a, c, g, or t
  misc_feature (38)..(38): n is a, c, g, or t
  misc_feature (58)..(58): n is a, c, g, or t
  misc_feature (61)..(61): n is a, c, g, or t
  misc_feature (117)..(117): n is a, c, g, or t
  misc_feature (119)..(119): n is a, c, g, or t
gttcactattcccctttcctgccctcactnagaagttnacgatgcagggtggagatgnggnttggatgagcctttctcaagcactgggagtttgatgctccaagccctctcccacanantacagagaacgtggtgtgtgccctgggcctgactgtgggtctggtgggcatcattattgggaccatcttcatcatcaagggagtgcgcaaaagcaatgcagcagaacgcagggggcctctgtaaggcacatggaggtgatggtgtttcttagagagaagatcactgaagaaacttctgctttaatgactttacaaagctggcaatattacaatccttgacctcagtgaaagcagtcatcttcagcgttttccagccctatagccaccccaagtgtggttatgcctccaagattgctccgttctctaggataaaaatggcttcccggtcgaaagccccccccccccggggttttcgggttgcccaaaaatttgatgatcgccaccccatgcctatgtaatggggcacccaggagtctgtttttgctatggaatgccccatggggcattttttgtggacttattgtttaaggtttcccccaactgtgatttttttgaacccaataaactattttgatgattttgggtggaaaaaaaa

SEQ ID NO: 546094 - DNA, 129 bp, Homo sapiens
tgctgctgcaggttgatctagaggtcccctagcccacctggcagagcggtcgaggctggaagaggatcctgggcgccgcagtctttagcaccagttggtgtaggagttgagacctacttcacagtagtt

SEQ ID NO: 546095 - DNA, 1629 bp, Homo sapiens
gggttatttcactctttgcaataagtcttgctgctgctcactctttgggtccacattgcctttgtgagctgtaacactcactcgcgaaggtctgcacagctttactcctgaagccagcctagagaccacgaacccaccagaaggaagaaatagaagacaccgaacatcagaaggaacaaactcccgtcagctgcttttaagaaccgtaacactaccgtgaggtcccgcggttcgttcttgaagtcagtgagaccaagaacttaccaattccggagtggcgtaatcaccaggaaggattattaatacataaggttgggccagaacttaccaattccgagcagtgccgctaatgatcaactagaaggaactttattaataccataaggttggaactacgctggacagtccacttggttgaagatggatgagattttctttggtctgtttttggaaaagttttcaagagggtccaggcttgcacttcaggggcagagagtttctatgatgtggcagaaatgggctttggcttccactggctttgccttggagccgacggaaggcgctcccaggataagatcgggagaagtttctacccgctgaaggatgactggtactgatgagaagtcagggatggctgctgcttgccaggtgcgcccaaatggaaattgattcacacagggataacagcctgagtggaggaggacctcccctagtgcgggggaagtattgtcgggtacaggattctccagggcaacttgggaaaacaaagcccaagttttcaaactctgcctatcagttttactgcacattaccgttggtgcaaaagtaattgcaggttttgccattaaaaatgatgtaatagttactgtaaagatgttcatcacaggtcaactggtaaaagaacaaaaggccccaaaatgctttaggtggggagatgaattaacctaattatgctatatctgaataaaagaattgcagttggccaataaaaatggcatcattgtgttgtagaagaatattgggcctcatggaaagatgacaacggtgggtgctttctatgtgcaggccctgttctcgatccttcagacaatctgcagaggtgagtactattattagccccattttgctgttgaggaaacccaggatcacagagaggttaagctaagctgcccaaggtaatacagctgtaaagtggtggaactgagatttgaaactaaccagtctggcttcaagctctcaaagactttctcatgatggaaagcctgttttgttttgtttttcctttaataaaaaaagaggccaggtgtggtggcacacatccgtaatcccagctactcaggaagctgaggcgggaggatcacttgagccccaccagagctccccccaacctctggcaaccacttgtctttttactgtctccacagttctgcaattttctagaagtggtagagttgggatcatacagcgggtttttcagatggggttctttcacttagtaacaggaatttagcttcctccatgtctttttatggcttgatggctcatttctttttagtggtgaatactattttgttgtctgatgttcttgagttcaagaccacctgggcaacatagtgagcccccatctct

SEQ ID NO: 546096 - DNA, 463 bp, Homo sapiens
cagaggacccagttgagcccacctggacttaagatctacagaactgtgagataataaatgggtgttgttttaaggcattgagtttgtggtaatttgttgcattagcagtagaaaactaatacatttgtaagaaattatttttacatctataattattcttttgggataaaatccttgatataggccgggcatggtggctcacacctgtaatcccagcactttgggaggccaaggtgaacggatcacgaagtcagaagatggagaccatcctgactaacacggtgaatccccgtctctactaaaaatacaaaaaattagccagacgtggtggcacatgcctgtagtcacagctacttgggaggctgaggcaggagaattgcttgaacccaggaggcagatgttgcagttagctgagattgcaccactgcactctagcctgggtgacaaagcgatactccctctt

SEQ ID NO: 546097 - DNA, 471 bp, Homo sapiens
  misc_feature (30)..(30): n is a, c, g, or t
  misc_feature (38)..(38): n is a, c, g, or t
  misc_feature (58)..(58): n is a, c, g, or t
  misc_feature (61)..(61): n is a, c, g, or t
  misc_feature (117)..(117): n is a, c, g, or t
  misc_feature (119)..(119): n is a, c, g, or t
gttcactattcccctttcctgccctcactnagaagttnacgatgcagggtggagatgnggnttggatgagcctttctcaagcactgggagtttgatgctccaagccctctcccacanantacagagaacgtggtgtgtgccctgggcctgactgtgggtctggtgggcatcattattgggaccatcttcatcatcaagggagtgcgcaaaagcaatgcagcagaacgcagggggcctctgtaaggcacatggaggtgatggtgtttcttagagagaagatcactgaagaaacttctgctttaatgactttacaaagctggcaatattacaaaagaaagagatttattggacttacagttccatgtggctggggaggcctcacaatcatggctgaaggtgaacggcacatctcacatggcggcagacaagagaagagcgcttatgcagggaaaccccccttttaaaaccacc

SEQ ID NO: 546098 - DNA, 180 bp, Homo sapiens
ataggtttaggcctttgtcttcagatttaggagtagcatatttaaatttctgagtttgaattatgcagcctgtggttccctcctttgggacaaatgatggaagttgttgttgagtaatttgtaatttgtgtgctcaatttataaaaggaaaattgctgagacatcacataattccaactg

SEQ ID NO: 546099 - DNA, 906 bp, Homo sapiens
ttcacggccgagtcctgtcatgcattgagtcctgcctcctgtgtcatcatgactgatggcgtgtgtccattcgctctgaggacgttcccttggccatgtgtaggcatgtgtgtcgcgcagcacagtctcccaagaacagggagggtaagacagaccccaatcggtagccgtgtacaaagcttggcatgactagccaggggtctcaggctatagtcaaggggatagccatgactcatctgccagaatttagtcacactagcggaatgtgacttttattcagagcgtggcgtgaccctgttattcccatgggtgccgggagtgctgaccttcccatgtagtcgggggaacccatgttcccgcaatggattcgattcaaggcattacttttcctcacaaagccaatagcgctcttccatgtttccgtcccttgtcacccagtagtcaattactgccattgcgagcattccatatcacctagagagttgggttgctcgcaagctaaatgaatcaatcctcgagattttgtgcgaccgtccatacatgtatgttgcggttggaaatgcttgggaccgacttctggtgtggtgtgcccggcaaggggggtcgcaacatacccgcgtcgttgaattaggttgtatggcccgtgcttagtaagttagcgcccccgtgacccccgctcgttaaactaggcttgaatagctggggtaaaggcttgcacgcattaagactgaaatgtccgaacggcctccgcagtaacgtgccgaacttgagtaattccttactaattcagcactggaataaagcgtgtcctgtagctacaggattaaaccgctcgttcgtcccggtttgttctcctctaccgagccgtctaagtgcgtcattctatggcactcgcagggaacagtc

SEQ ID NO: 546100 - DNA, 578 bp, Homo sapiens
  misc_feature (16)..(16): n is a, c, g, or t
  misc_feature (62)..(62): n is a, c, g, or t
  misc_feature (77)..(77): n is a, c, g, or t
  misc_feature (87)..(87): n is a, c, g, or t
  misc_feature (91)..(92): n is a, c, g, or t
  misc_feature (99)..(99): n is a, c, g, or t
  misc_feature (105)..(105): n is a, c, g, or t
  misc_feature (132)..(132): n is a, c, g, or t
  misc_feature (139)..(139): n is a, c, g, or t
aacaaaaagaaaacgntgtggtgctgttgccccctggggccctgaaactgttggtgtcctgngtggtgccatccatntatctgtggncccnntccttcnatccantcaaagggaagatgccgacaaaaaganaaatganagaaagaaacgcagggggcctctgtaaggcacatggaggtgatggtgtttcttagagagaagatcactgaagaaacttctgctttaatgactttacaaagctggcaatattacaatccttgacctcagtgaaagcagtcatcttcagcgttttccagccctatagccaccccaagtgtggttatgcctcctcgattgctccgtactctaacatctagctggcttccctgtctattgccttttcctggatctattttcctctatttcctatcattttattatccccatgcaatgcctttggaataaaacaaacaggagtctgtttttgctatggaatgccccatggggcattttttgtggacttattgtttaaggtttcccccaactgtgatttttttgaacccaataaactattttgatgattttgggtggaaaaaaaa

SEQ ID NO: 546101 - DNA, 558 bp, Homo sapiens
  misc_feature (16)..(16): n is a, c, g, or t
  misc_feature (62)..(62): n is a, c, g, or t
  misc_feature (77)..(77): n is a, c, g, or t
  misc_feature (87)..(87): n is a, c, g, or t
  misc_feature (91)..(92): n is a, c, g, or t
  misc_feature (99)..(99): n is a, c, g, or t
  misc_feature (105)..(105): n is a, c, g, or t
  misc_feature (132)..(132): n is a, c, g, or t
  misc_feature (139)..(139): n is a, c, g, or t
aacaaaaagaaaacgntgtggtgctgttgccccctggggccctgaaactgttggtgtcctgngtggtgccatccatntatctgtggncccnntccttcnatccantcaaagggaagatgccgacaaaaaganaaatganagaaagaaacgcagggggcctctgtaaggcacatggaggtgatggtgtttcttagagagaagatcactgaagaaacttctgctttaatgactttacaaagctggcaatattacaatccttgacctcagtgaaagcagtcatcttcagcgttttccagccctatagccaccccaagtgtggttatgcctcctcgattgctccgtactctaacatctagctggcttccctgtctattgccttttcctggatctattttcctctatttcctatcattttattatccccatgcaatgcctttggaataaaacaaacaggagtctgtttttgctatggaatgccccatggggcatctcaggtgtacgaattgttaaaggatacctccacctgtgatgcttctgagcgcattccacagcttgaga

SEQ ID NO: 546102 - DNA, 398 bp, Homo sapiens
  misc_feature (65)..(65): n is a, c, g, or t
  misc_feature (67)..(67): n is a, c, g, or t
  misc_feature (74)..(74): n is a, c, g, or t
  misc_feature (77)..(77): n is a, c, g, or t
gactcctctcttttttggaacaagggcaataacccgctcctctgcaaccaagtcaaacctcgaananaatgagnagngaaaactttgtgaatctgtaatttggtgcgtgcgtattgaagcatgagatctttccaaactcatggcaactatacctcaaaattaaactctataattaaggaagaaaccctcattctccctgtaataactgaatacctaagcacattaaaatgcctaaataatctgggattttcccggatggtggggaaaggttttcttaagctatgcggcagttataccctttgcttcctttaaaacaccctgaatgagcattttaaagagataaatggaatttataagctatcaacttctcgtcattaaaaaataattaaagctgattt

SEQ ID NO: 546103 - DNA, 196 bp, Homo sapiens
gttttaggcccggtttccttttaaaaaaagaaatggtccctggtggggaaaaaaaggtggtattttttccttttaaaagccacctgtttaggtttttaaggaatcccggtggggttttttgttggtttcctggtaacaaagcaaaaattgttaaaaatttttatttaaaatttaggggcccttttgtcctttttta

SEQ ID NO: 546104 - DNA, 583 bp, Homo sapiens
  misc_feature (16)..(16): n is a, c, g, or t
  misc_feature (62)..(62): n is a, c, g, or t
  misc_feature (77)..(77): n is a, c, g, or t
  misc_feature (87)..(87): n is a, c, g, or t
  misc_feature (91)..(92): n is a, c, g, or t
  misc_feature (99)..(99): n is a, c, g, or t
  misc_feature (105)..(105): n is a, c, g, or t
  misc_feature (132)..(132): n is a, c, g, or t
  misc_feature (139)..(139): n is a, c, g, or t
aacaaaaagaaaacgntgtggtgctgttgccccctggggccctgaaactgttggtgtcctgngtggtgccatccatntatctgtggncccnntccttcnatccantcaaagggaagatgccgacaaaaaganaaatganagaaagaaacgcagggggcctctgtaaggcacatggaggtgatggtgtttcttagagagaagatcactgaagaaacttctgctttaatgactttacaaagctggcaatattacaatccttgacctcagtgaaagcagtcatcttcagcgttttccagccctatagccaccccaagtgtggttatgcctcctcgattgctccgtactctaacatctagctggcttccctgtctattgccttttcctggatctattttcctctatttcctatcattttattatccccatgcaatgcctttggaataaaacaaacaggagtctgtttttgctatggaatgccccatggggcatctcttctgcacttcttgtttaacgcttcctcaaaccgtgattttcccgacaacaatacactattttcacgacctctgggtcgaaaaaacacaac

SEQ ID NO: 546105 - DNA, 516 bp, Homo sapiens
  misc_feature (74)..(74): n is a, c, g, or t
  misc_feature (159)..(159): n is a, c, g, or t
  misc_feature (162)..(162): n is a, c, g, or t
  misc_feature (172)..(172): n is a, c, g, or t
aaatccgtgccctcaggtgtacttgggaattttccctggggcccaaagtgttgtattgtaaaacaggatcatcnatgtttgtccaatgcatctaaaacgagtggtttggtccaaaaccctggttaaaaattgcattgtgttcattcacagccccccgtnccnccagtggtgngagttcccctattggttgcccctgggccccaaaaagggagccaaattttctccttaggaaaaaaagttttttacccaaaaccgtttttaaaaaattccgaagaaattttttgaaaggaaaaaaaatgcccaaatcccccgtttcctggaggaacagttcccacagggcaaactttttgggggcattcttttaaggccgggacagtttggcccaacaaatggttttttgttaaagggcaaaaagttggggttttttttttggaaaaacaagggccccaaaggcaaaaaaatccttttttttttttcccccctgtaaaaaaggggttttttgttttgttcccccca

SEQ ID NO: 546106 - DNA, 381 bp, Homo sapiens
  misc_feature (348)..(348): n is a, c, g, or t
  misc_feature (355)..(355): n is a, c, g, or t
cacttattcctctgatgaatctcggaaaagtaaattgaaaaccttctggaaaggatttaccattttagatgccatgaagaacattcctgggaggaggtcaaaatatcagcattaagaggagtttggcaaacgttgattccagccctcaagaatgattttgaggggtttaagacttcagtggtgaaactggcagatgtgatataaatgggcaagagaacttggaattaggaagtgaaatctggaaaatgtgactgaattggctggcaatcttcatggattaaaatcttaaatgggatgagggaattgctttcttatgggctaagccaaattaaaggtgtttttttggangtggaantctactcctggaggaggctgtggaac

SEQ ID NO: 546107 - DNA, 548 bp, Homo sapiens
ggagacggggtctctagacttggcggataacagaacatcaagatacaaagcaggtaacagaaatggtttcatttcccctcgccatttcaaggactcacggagttacccggtcgcttacaagcatcacattgggccatcggatagaacaaaacggtatattgggacatgcattctcacaacagaactcttccacgttccctcctaaattattcggtaccaataggggagaggtcggtaaacaagtaacggcacatgtgacaggtgatttccccaggggtgtggccaaggtcaggtgtataaagcaatgggcaacctaaaaagtcgggaaagataaaattaacataaggtagaagtatcagtgttcggcaagtttaaagggcctaggacaggcccggggcaggggctcacaccggtaatcccaagacttggggaggcggaaagggaagaatcacttgagctcagtagttcaagaacagccggggcaacatagggagactctatctctacgaaaaataaaaaaatagggcgggggggggggtgaagacccg

SEQ ID NO: 546108 - DNA, 262 bp, Homo sapiens
cgggtcactctagaggaccggctccactggtgcacacaggtgataaagtatcctacttctgtgtagtacatattaagaaaattttaaattttcttttattcttattgtggtaaatacccacaatgtaaaatgtacttttaatcacttttaagtatagttcagtagggttaagtatattcacactgtacgtgcaccaatctctagaactttctgcaaaactgatactctccaactccccctttccccctctctccagctctgg

SEQ ID NO: 546109 - DNA, 953 bp, Homo sapiens
  misc_feature (21)..(21): n is a, c, g, or t
  misc_feature (23)..(23): n is a, c, g, or t
  misc_feature (730)..(730): n is a, c, g, or t
  misc_feature (733)..(733): n is a, c, g, or t
  misc_feature (735)..(735): n is a, c, g, or t
  misc_feature (737)..(737): n is a, c, g, or t
  misc_feature (743)..(743): n is a, c, g, or t
  misc_feature (750)..(750): n is a, c, g, or t
  misc_feature (753)..(753): n is a, c, g, or t
  misc_feature (757)..(757): n is a, c, g, or t
  misc_feature (764)..(764): n is a, c, g, or t
  misc_feature (770)..(770): n is a, c, g, or t
  misc_feature (775)..(775): n is a, c, g, or t
gtctagtacaggcctgggtgntngacccggctgcgcgggttgtgcgggcgctgtggcctggtgggtgctgccttggcctggaggctggtgaggccgccccagccgctgctacccacgcagagccgggctggcttcgcgggggcggcgggcggcccgagccccgtggctgcagctcgtaaggggagccctgcggctgctgggagctgcggcgctggccctggtgggggagccctggtgtgcttgtaccacacggcgcggtggcacctgcgcgcccaggacctccactgcagagcgctcagccgcgcagctctccctgtccagccgcctgcagcttgaccctgtaccagtacaagacgtgtcccttctgcagcaaggtccgagccttcctcgacttccatgccctgccctaccaggtggtggaggtgaaccctgtgcgcagggctgagatcaagttctcctcctacagaaaggtgcccatcctggtggcccaggaaggagaaagctcgcaacaactaaatgactcctctgtcatcatcagcgccctcaagacctacctggtgtcggggcagcccctggaagagatcatcacctactacccagccatgaaggctgtgaacgagcagggcaaggaggtgaccgagttcggcaataagtactggctcatgctcaacgagaaggaggcccagcaagtgtatggtgggaaggaggccagacgacaggagagagattnagntngnggaagngggggangantggntggtganctgatntcccnaaggtgttcggaggccaccgaggactgggtctatgaatacgttgtccggaagggaagtaggaacgtgagtgtgcgtgcaagaaaatgataggggcaagacgtataagaagggataaacaggactgcaaggaatagcagagccttataggtgaaaagggggtaggaagacgcatgcgaa

SEQ ID NO: 546110 - DNA, 933 bp, Homo sapiens
  misc_feature (22)..(22): n is a, c, g, or t
  misc_feature (26)..(26): n is a, c, g, or t
  misc_feature (66)..(66): n is a, c, g, or t
  misc_feature (710)..(710): n is a, c, g, or t
  misc_feature (713)..(713): n is a, c, g, or t
  misc_feature (715)..(715): n is a, c, g, or t
  misc_feature (717)..(717): n is a, c, g, or t
  misc_feature (723)..(723): n is a, c, g, or t
  misc_feature (730)..(730): n is a, c, g, or t
  misc_feature (733)..(733): n is a, c, g, or t
  misc_feature (737)..(737): n is a, c, g, or t
  misc_feature (744)..(744): n is a, c, g, or t
  misc_feature (750)..(750): n is a, c, g, or t
  misc_feature (755)..(755): n is a, c, g, or t
gcggcgtcgacgacatgaccgntgcncgggtgtgcggcgctgtggctggtggtgcgcctggctgangctggaggcgccccagccgctgctacccacgcagagccgggctggcttcgcgggggcggcgggcggcccgagccccgtggctgcagctcgtaaggggagccctgcggctgctgggagctgcggcgctggccctggtgggggagccctggtgtgcttgtaccacacggcgcggtggcacctgcgcgcccaggacctccactgcagagcgctcagccgcgcagctctccctgtccagccgcctgcagcttgaccctgtaccagtacaagacgtgtcccttctgcagcaaggtccgagccttcctcgacttccatgccctgccctaccaggtggtggaggtgaaccctgtgcgcagggctgagatcaagttctcctcctacagaaaggtgcccatcctggtggcccaggaaggagaaagctcgcaacaactaaatgactcctctgtcatcatcagcgccctcaagacctacctggtgtcggggcagcccctggaagagatcatcacctactacccagccatgaaggctgtgaacgagcagggcaaggaggtgaccgagttcggcaataagtactggctcatgctcaacgagaaggaggcccagcaagtgtatggtgggaaggaggccagacgacaggagagagattnagntngnggaagngggggangantggntggtganctgatntcccnaaggtgttcggaggccaccgaggactgggtctatgaatacgttgtccggaagggaagtaggaacgtgagtgtgcgtgcaagaaaatgataggggcaagacgtataagaagggataaacaggactgcaaggaatagcagagccttataggtgaaaagggggtaggaagacgcatgcgaa

SEQ ID NO: 546111 - DNA, 1148 bp, Homo sapiens
cgaagagcgtaagttcgctctgttcccctgtgatccggggtctttgtgtcaccggccgagccttgggcactctccaggggctatccaggcggggcttaacttctaaagggcgccttggggaacaagaccttttgttcccccagcctgtataccccctgtcggtacaactttgcgttctggaaaggtggcgcatatccaggtcttctacacctggagtctgggttgaccatattactggctacagcgtggcttgaaagccctctccagtgccactgtggaagatgcccctccagtgcttcctaaaggctgaagaactacagcccagggatttttccaaagcaggaagggtatatatttccaagtggctacagagaactagggaaaaactctgaagctagatggctggatgaagttggccctggagctgccagatgtcacgaaggaggatttggctagtccagaaggacctggaagaactggaagtcattctacgagactaaccacgtttcactggccggtcatgactgtgatgccactatgttaaggtggggggccggggaggcttttttcctgtagaccttgctgagatcaggaaaccacacaaatctgtctcctgggtctgactggctacgccacgtaccactccccattagttaatggattgctaacctctaacctgaatgctagaattggggcagtactcatgggcttgccgtttctcgttgttctctcgccttgaggtaagtcatctgtgaaatacaagtcaagattcacagcatgccccaggattacacatgggtagagcctgcaagacctgagaccttccaattgctggtgaggtggatgaacgtcaaagctataggaacaaagcacattacttgtcacagtaatctgtatcactgactaataggactcagtacatagtagtcattgaagatcactacccttacttacgcaaggtaaacaagagggatcagagtggctccagcagagcattgctttcttatcacctatcagtgtgaattgcacctgtaattacatgggagtggaccaaccttgagtaacttctcagtcgtccgggcagcttgaggatgactagcagcgctatggggtactatgatgatatacaacaagggtctgaaaagtgg

SEQ ID NO: 546112 - DNA, 284 bp, Homo sapiens
  misc_feature (117)..(117): n is a, c, g, or t
aaaataataaaaataagagcagaaagcaataaaataactagaataagtaagtttagcaaagttggttgatataagatcggtatacaaaaacgaattgaattggcaacaagcgatctnacaatgaataagatatttacggataaatttgacaagagagattcaggtctatacactgagagacataagacattgttgggagaagtgcagagatctaatagagggagatactggtacatcagttggagacattatgtgaggtagtggtgctgctttggcagcctaga

SEQ ID NO: 546113 - DNA, 473 bp, Homo sapiens
  misc_feature (45)..(45): n is a, c, g, or t
  misc_feature (61)..(61): n is a, c, g, or t
  misc_feature (72)..(72): n is a, c, g, or t
  misc_feature (119)..(120): n is a, c, g, or t
  misc_feature (125)..(126): n is a, c, g, or t
  misc_feature (136)..(136): n is a, c, g, or t
  misc_feature (138)..(138): n is a, c, g, or t
  misc_feature (140)..(140): n is a, c, g, or t
  misc_feature (143)..(145): n is a, c, g, or t
  misc_feature (167)..(167): n is a, c, g, or t
  misc_feature (171)..(171): n is a, c, g, or t
  misc_feature (216)..(216): n is a, c, g, or t
  misc_feature (246)..(246): n is a, c, g, or t
  misc_feature (256)..(256): n is a, c, g, or t
  misc_feature (261)..(261): n is a, c, g, or t
  misc_feature (266)..(266): n is a, c, g, or t
  misc_feature (277)..(277): n is a, c, g, or t
  misc_feature (290)..(290): n is a, c, g, or t
  misc_feature (299)..(299): n is a, c, g, or t
  misc_feature (314)..(314): n is a, c, g, or t
  misc_feature (321)..(321): n is a, c, g, or t
  misc_feature (324)..(324): n is a, c, g, or t
  misc_feature (342)..(342): n is a, c, g, or t
  misc_feature (358)..(358): n is a, c, g, or t
  misc_feature (362)..(363): n is a, c, g, or t
  misc_feature (411)..(411): n is a, c, g, or t
  misc_feature (469)..(469): n is a, c, g, or t
actttttcatcttttatcgtccttccttatctatttttttccttncccattcatatgtttncattcctttcngtttacatttttctctataacaccaagctttatggtgtcctatttcnnaccanncatctgaatncntnttnnnccttcacgggctaatggtactnctcnccagggatggcgtcgggttcttcgtgttcccttctgcgccctttncttctctcagcgccatctggggtttttctntccttttttnttttnccctncccccgccttnccgctttgtaccncttcgggcnttccccttgcccccngccccgnccnccccccacccgacagggncagggggagtgcgganaccnnccgtcggcgggcacgagggcgtgggcaccaatggttgtaactgggccncgctgggggggtggaggggagcgcgcgacgcgctgcgggcgcgtcccgcccagcccgnctta

SEQ ID NO: 546114 - DNA, 356 bp, Homo sapiens
aatcgggcaaggtgtgggttgtcatctttgtgtcgcaagaagcattcatttctctcaggttcctgttatgcacagcagtcagccatttcaccataggtttcacgaacagttgcaactgtgcataatctgtctccaaaaagggtatgaagtgatttgtcacaatgttcacctgactcatcagcaccacatgtttctgcaaactcagttacttcatccactaattagacatgctcttcatgtgcatctcccaattctttaaaccgatgagcaacctcactcttgtgtgcatctcgacgacacacacccctggactgagccgagctagagagaaaaagaaggcaaataaaggttaccct

SEQ ID NO: 546115 - DNA, 345 bp, Homo sapiens
gagagagagagagagagagagagagagagagagagagagagagagagagatatggtggcgcagagagctctgttgcagacgcgcgcgcgcccttcctctggtctgttgtgtgcctgtcgcgtagtatagagcgggcgcgcggcagggggggggtatctactgttgcgtgctatgtcgtcggctgcgcgggaggggctggtgtgtatctctcgggcggaggagcagggcgaggacgacatactacgcatactatcgtcgaggagagagacagcatgcttcggagcaggaggaacgtggcggctaggatgagaaaggcgagcaaaccggtgcggtgacgagcagcgg

SEQ ID NO: 546116 - DNA, 434 bp, Homo sapiens
ctacaccattatcttggaaagaaacaacgttggaaacataacattacagggagctgggacacttaacagatgcaatgtgctactgattgtttccattgcgaatcttttttagcataaaattttctactccttttagtgtttcgtggttctagtgtcttgtaaagtccaggtccacatttgtcacacaacaccaggcattcgctttactgacaattcagggcgcccaattaatacatcagccaagcaatttgcatcgttccagttccccacttggcaggcctttccatccctcgggtggtgcctatggcatggctatctaacaacaaactacaccatatgtattcctggatcgccaaccttttcccccaccagctaaggacatttcccaggggtcaatcagggcctggtccctgggaggacaatttgactgggcg

SEQ ID NO: 546117 - DNA, 316 bp, Homo sapiens
gccggtgcctggtcattattccctgaatggtcacgcatgatcgacaaaagaagctgatctcagtacagccattaagcaagttgcacaagaacgtcgcgactttatgtttattatcgctgctgatgctaaagccgcccatcaggatgtaatacgtgtgatggatgttgcaggtcagcttggatttgttaacgttaacatcagcactaaagttccaactagaggtttcaccgagtgaatcaagattttaaggtttatttacgccttttagcttatctaatatcttattggggtattgccttatttgtattacttggtt

SEQ ID NO: 546118 - DNA, 833 bp, Homo sapiens
gaggagtgtcgtagcccgtgctttctcctgctgctggccgatgcttgctctgaactaaccctctaacccttggggagtctgtgtgcagcagtgatgtgagctgaatccgggcgtgacagagtgggagctcccgctatggaactggcttcaagggaggctaatctaagagagaaagtagtcctcggggaagacagtcttggttgcacccctcatttgcatcttgacctaagttgctgccaactccgggggctccaggacaactctcatttgttctttctctccaaggggtcacgccattggttaaacccaattttgtcactttcttctgaacagatcacagcaaaagtagataactcagccagaagaattcagtgcgtagtgtgacgatgcgtgatgacagacgaaacagatacaggcatcaggaacgcagttaccagctcagcagaccacaagaagagcccgaggctcttaaaccaatcttagcagctcctctgcatgatgtcttgtcttctgtgagttggcagtgtgatgagtggttcatagttgagagacttgtggcacatctggccacgtctcaccgcgcactacttccagttctgcaattgacgtaatgtggagtcacgtgaacggagttggatgttttgggtgggcccagtgtaagggcttagccacgcggggttgtacaccaaacgggttccagaccatattttaaagggctactgtggtaccagccacagggcaaatgggcagaggaaccctcgtcgtgacgaaacttgacctgggtacggcacactgggccaccattgccctgagcgaacacggtggaggacccc

SEQ ID NO: 546119 - DNA, 1470 bp, Homo sapiens
gatcggaagtctctccgtctccactcgccctcggtgctcgctatcaggcccttcgctagttccgctgcgcagggtcggtggtcccgtcaaggtgacacggggccaatggtacgatgggatgatccggggaagaggtatgctggggcgagagagcagacgtttctgcgcgagtggattgcgcgtcgacgggcttgcgggagtgactacccgagcctcactgtcgagtcacgcgcacgactggaccacgcgcttgggagtccttgaggaggacagggtgctttgatgtactgctcatacgggcgcatcctgtcgtcggctcaggggaagcgatgaggcctgctggtaatcaactggtactcgagggagcgttccttacgtgtaaggcactgcgcaatgccggcgcggtgagaatttcccgaaaagaagaattcaggagagcttagatggaacgtctgaaggtccctggggacgagggcaaggcttgggaagacatggggccttggggtctttatcggtcaaggggggcaaaatttgggggggaagggatccatttttaagggaataccttccaaagggggaaaaaggacgggaaccaaaagggtggcccttctggtagaacaacatcgcgttggcgtctgcttcgcaatcccccacttcattagcagacttgctcctctagagaaccggccctcaaggactggaggccaagtggggccgggcccgctgggctgcaaggcggccaaaagggccacgaaagcgactcgaccagactgggcccatccggggcacaccgcgcccacttcgaactctctggtggctccatcccaaactggcccagggctggggtgggctgggggtcgttggggcgtgggcagccgcggcccaaagacaccggagagatacacccacagccgctcggccagactaaagccaccgattcttcaccaaccgggccgagcaaccatctggcccccgcaaaccagagcgccacgccggcccgtcaagccacacccaggggacacaaggagacgcgcgcaagaaaccccacctcggcacgtgacgcccccccacgacacggcgacaccgcggagcctcaatcaacccccccggcagccgcgcacgtggacccacaccacctcccagaccgacccgccacgccccagcagaacacacgtggaaacgcaggggacaacaaccaggcacgaacggacaccacacaactacgaagacgacgcaccacccagccaggagcaacccccaaaaccggcaaggggacaccgacgagagcagcccgcgacccacaccccgcgacttcgcaagcacagcaaagagccacgagcaaccgggacgcagacccgacgcccacacagacgggcgacacacaaccaggcgaaacaggagcagaaaaagcagcgtcgagcatcgacgcgacggccgagaggcgatcgtgcgagaccagactagagcacc

SEQ ID NO: 546120 - DNA, 109 bp, Homo sapiens
ggatctgttcttgatttacctcttgacgcatgactcgactcttaggatcaccttaccaaaagtttccattacaacactgaagtttagaatacagtattacttgggagcg

SEQ ID NO: 546121 - DNA, 269 bp, Homo sapiens
  misc_feature (34)..(34): n is a, c, g, or t
  misc_feature (43)..(43): n is a, c, g, or t
  misc_feature (48)..(48): n is a, c, g, or t
  misc_feature (57)..(57): n is a, c, g, or t
  misc_feature (62)..(62): n is a, c, g, or t
aaagaagggagcaagggagcacaccagccggggnagagggaanggctnaggagctcnacagnaggggaccgggaggaaggtcacagcacacgaaaagggaggcagaaagggaggaccaggaacaacggaaaaggagacaggggaacgcagacagcagggaaagaggcgcaaggcgacgagaagaagaagcagaaaaggggcagttggttggcgcctttttctgtggaaaagacagaatgtcaggaaaaaaaaagcacccgggccaaaag

SEQ ID NO: 546122 - DNA, 399 bp, Homo sapiens
tcttagaggataccccggccgcccttctccggccgccacagtcttctcccagtacctcaccagctcgtgggaactggtgcttgtagggaaccttccgcatccagcgagccgggaatgagcggacgctcttcctcttcgataagctgctgctcatcacgaacaatagagatgacacgtttacgtatgatgctcacatcctgtttggcaacctcatgcttctggaggtgattcctatagagccgctctggcttcagcgtcttctactacaagtagtccctagtctgcagtgcacagtccaggccctatcccggctctgacgaacgcctcttggctctgcatctggtgagactgcttctggtgaaccatgtatcctagatttctgcttcggcccagcgtgct

SEQ ID NO: 546123 - DNA, 153 bp, Homo sapiens
tcggtcctcattacttagctcccacttataagtgagaacattcggtacttggttatgttcctgcattcgtttgctgaggatatggcctccagctcccaaccacgttcttacaaaagacaggaggatctcattctttcttacagttacatcgta

SEQ ID NO: 546124 - DNA, 1072 bp, Homo sapiens
aagatacatagatgctgaagtacctatctaacccctttttctcttctgggatatctaccgcggggaactcttcctttgtgagtgtttgtgaaagttgagttacttgccatggtaactcccttcgaacacagaatggcaatgtttggaacactgccaaattgatgggcattaggtaacaataaccgccacggtgtccgcggaatccaagcctgggataaggcaaccgcgcgtgccaaagtccctccggttctactcaacccttcaagggtggtccaaccaaaaaaccctttgggataaaaaataacggttgggttccccaacctttaaggggcagatcttccttaagccctattccgcaccttgggacaaagggcctccattgtcagggttcttccaaccaggccccggcctggaacaccccggggctcaaaatagagggttctgagacccctgtggtgccaacggccggaaaagatgcctggtcggttccattgtttgtttcgttttgtgttgtgttcgccctttcacatggtgatatgatttaacaaagaaagtaagctgcttagaaggccctctggaagggaagtgaggaggagggacaaggaagatgactagttacggaggaatgcagggttgtctttgtgtgccgacaaaagacctcgggtagaagtgatcatgaataatatggcaccttacctgaatggaaccaccagagtacctcctgtgtggaaagggtactctggattttccctaacacccaccctctcccccgtcagccatgctgatggcagagaagataagaacttggagcccatttctcactggagaggtaaacttgtcattctggctttgcggagaaggttccacctacgctcgtaagtacattatctgtactatgtgatcaggatatccatatcttaaaaggacggaaaaaatgtaaaatacttgaattgagcttgtatatataatacattaatattatatgagagtatctgctttccaggctgacagtgactcattcattattctagtcctgctttagtcctcttgcaaattgtggcaatatgccttc

SEQ ID NO: 546125 - DNA, 931 bp, Homo sapiens
  misc_feature (656)..(658): n is a, c, g, or t
  misc_feature (801)..(802): n is a, c, g, or t
  misc_feature (880)..(880): n is a, c, g, or t
agcggtgggggccggcgaagccatgggcgccgggaccccgccgccgccgccgccgccgccgtctggccccaggaagagaagttaaacttctagagaaacctaacagacaatatccacaacaggtggtaacagaaaacaatccagatggggtgcacggtgctgtgcaataatacaaagctatctctttgagtccagttcaaggtggccctcctccctggcgtatgtcacctgaaagtccaacagcgtggcgaagctagaatgaaagacagacacttgagtatactttcacagggcgcatggggccacgtgaaagtctctgggtgcacgaaaaaaatgagacctctagaaggcgacgaggctccaacagaaagacctgtagagacacgcgagcacggagcagacgtgagtccaactgggaagacgcctgtcgtggggctctaccacaggggcgcgcagtctccacacggggggacagctcgggagcggcgaaacaaccactggccctgtcgggagtgctacacggggcgatctggcgcctgtggtgtgcacatctccacagagccacatggtgcaaatttccagagacccacaccaaggagtgagcacgtgggacgtcctggggcgcacgtgactgtgcaactattctgtggtccccnnncaaatctaaaccctttccctgtgagagggagggggggcgacccacggagaaccaccggagctgttggtgcgtgcgtgtgcgctcaagaagaggggagccccacagtctactgagacaaattgcgagaactctcagaagacgtnnccttctgaaggcgacgaacagtgtttgcggcttgggagcagttcacaggaccacttgtgctctcccagaatatccaangccccagaattacaccttctagcatttggggggcgcacgctgtggagacaa

SEQ ID NO: 546126 - DNA, 522 bp, Homo sapiens
cggcgtcccctcctctaccccaccccgaccccgggcgagggtggtcggcccctcctacctgcaaacaccgcggagcagtaggcatcgctgatgtcggtgtcgggtgtgtggacgttctcggcatagaggatgaagaccctcagcatgcttggcgcgtgtagggccccgtgcgcccagggcgcaaagagggctcggaaaggtcgggagggccgaggcgccgcttgtgggtcccctcgctggagagggctggctgggcgaggccggctcgaatctctggctcctggcttagagcagttgctcttaaaggggaacgggccacccccggctgctccagtgggctaggctgggtccccgccccggctgcgctcaccccgcttgtcagccggcgttccgagaacaggggcttctgctcatcttccacccccgccgcccttcccgagctccgtcgagctgtaatctaatgctccggctgcggagtctcccaatgacacggcattttgcacctggctgggcggcggccgc

SEQ ID NO: 546127 - DNA, 146 bp, Homo sapiens
ccaggcccacacaggctgcactcaatcatggtagaatcaggtgaggtctcatgggatctgatcacatgttactgtcggaggccctttgcagggcggcccatgattgactgcagcctgtgtgggacgtggatccacctctccttcag

SEQ ID NO: 546128 - DNA, 272 bp, Homo sapiens
  misc_feature (56)..(56): n is a, c, g, or t
tgctgggattatagctaccgcccagccctaatttacattgcaaatggcgatgcttngcctggctcaaaattctgaaggaaccgaggattgtgtggaggagacgccagctgagcgctgtccatgcaccagcaacgggcaggggccaggtagccgccaccacggtgagcgctgtacacgcacagaacctagagctgcttcccacagcaaagggcaggggttgggtagccaccatgatttcccctctacacggaggacacgcctgtgccttgacc

SEQ ID NO: 546129 - DNA, 795 bp, Homo sapiens
gagaattcctgagtgaacgaacagagcagttcctcttccatctccagcaaatgatctcgaacttcaatccccgagaatgtaaactggtccagaagtcaagtaaggtgcaagaactagtgagtcttcttcctgtcgaaattgagacggacaccgtaggtgccacctggtccgtgcgtggttgagaatttgtagaccagcagtagaaggctggacgcttcataggatgtgacgacagagattcgtgtgagagatcaactgggttgtcttttgtggacaacacgtaacgaacatatgtcgaaggttcgttggagtcctgtgctctacgaagaggagatggcgagatttcagtgaccatttcactagattgctggaatggaggatttcctatgcagaatagcaagtgcacaacaccacgggatggactctgaaatagcagttgtgggtcaatagctcagcaaaggcatgacaaggttgtgaggtgaataggctatacgtttcccctgtgcatgagactggaggtgtgcatcagatgtggatcccgagcgcccggctctgctactctcggtgacagcgataggacgtgccagctaatggctggctctccctgtacaagactgtccaagactcaagagagggggtgtccatgacttggatattcacacctgcaacggtggtgtctgtgcagacgcttgggagtactgcctgatggatgcacttgcaattggacgtgaactggggaagggattgttcacggatgcccggctattaagggaagtggtttgaccccggtgcaca

SEQ ID NO: 546130 - DNA, 626 bp, Homo sapiens
  misc_feature (597)..(597): n is a, c, g, or t
  misc_feature (600)..(601): n is a, c, g, or t
  misc_feature (603)..(603): n is a, c, g, or t
  misc_feature (608)..(609): n is a, c, g, or t
  misc_feature (613)..(613): n is a, c, g, or t
  misc_feature (617)..(617): n is a, c, g, or t
cagacgaagtcaggaggtcagcaactttgcgggcttaccaggaggcctgtcctgcctctggaagccagcgacagagagggatgcccccgacccagccagccggagaaagggatggggtggtcacgaaggtctgagctgggtctgggtgtaggctgggaagcaggctggggtgtagactgcgaaggcggccctgccgggacttctttccagtccccggcgacctcttcgaattctctgctatctctggggagcctcgggtgggagggggtgtaagagacgcagggacgtggggagaggagacaaggcaggcaagaaccacaggggacggcggacagacgggcgacatcctgcggaggacgccgtcagtaccaggaagtgcaggcgatgaggaagcgcacgtcgtccagcggcccccacgggctgggctcgggctcgggctggggctggggctggggctggggctggggctggggctggggcggatgccggggctgttccgggccctccggcgccgcaggctggggctggggctggggctgggtttgcgcaggctccggggcgccgcggccgccgcttagctgagcccccatggtctcngcnncnagacnngcgngtcnccccaccgc

SEQ ID NO: 546131 - DNA, 144 bp, Homo sapiens
atgaggtagccactctcctgcctccgcttcatcaggcgatcgaggaacagggaatgcacctcgataagctcgtccaggctggggaaagatgttctgcagctcctccatgggggaagaaacaggcgattcttgcccattgggctg

SEQ ID NO: 546132 - DNA, 294 bp, Homo sapiens
atagtctccaatggaaatcttgtccgaagcatctgcaggtcatcataaacatatacttgtggcgggtaggcatgtaacaagccttgagccataatatacggattaggcaacaacggcgggacccccaggagggaggttgggaggagcttttcctgaagtcgtagcaactgagcttcgagtcgaggctgtgacagtggagttgctgcctaagctgaggcccaggctactggcaatattggagactggagggagacacttgacaaagggctgtgtaccgaggctccgaattctgta

SEQ ID NO: 546133 - DNA, 586 bp, Homo sapiens
  misc_feature (9)..(9): n is a, c, g, or t
  misc_feature (19)..(20): n is a, c, g, or t
  misc_feature (35)..(35): n is a, c, g, or t
  misc_feature (43)..(43): n is a, c, g, or t
  misc_feature (56)..(56): n is a, c, g, or t
  misc_feature (59)..(59): n is a, c, g, or t
  misc_feature (76)..(76): n is a, c, g, or t
  misc_feature (93)..(93): n is a, c, g, or t
  misc_feature (110)..(110): n is a, c, g, or t
  misc_feature (112)..(112): n is a, c, g, or t
  misc_feature (116)..(116): n is a, c, g, or t
  misc_feature (146)..(146): n is a, c, g, or t
  misc_feature (149)..(149): n is a, c, g, or t
  misc_feature (166)..(166): n is a, c, g, or t
  misc_feature (172)..(172): n is a, c, g, or t
  misc_feature (180)..(180): n is a, c, g, or t
  misc_feature (182)..(182): n is a, c, g, or t
  misc_feature (190)..(190): n is a, c, g, or t
  misc_feature (199)..(199): n is a, c, g, or t
  misc_feature (202)..(202): n is a, c, g, or t
  misc_feature (204)..(205): n is a, c, g, or t
  misc_feature (212)..(212): n is a, c, g, or t
  misc_feature (215)..(215): n is a, c, g, or t
  misc_feature (223)..(223): n is a, c, g, or t
  misc_feature (227)..(227): n is a, c, g, or t
  misc_feature (231)..(231): n is a, c, g, or t
  misc_feature (242)..(242): n is a, c, g, or t
  misc_feature (252)..(252): n is a, c, g, or t
  misc_feature (254)..(254): n is a, c, g, or t
  misc_feature (263)..(263): n is a, c, g, or t
  misc_feature (277)..(277): n is a, c, g, or t
  misc_feature (280)..(280): n is a, c, g, or t
  misc_feature (282)..(282): n is a, c, g, or t
  misc_feature (286)..(286): n is a, c, g, or t
  misc_feature (300)..(300): n is a, c, g, or t
  misc_feature (303)..(303): n is a, c, g, or t
  misc_feature (309)..(309): n is a, c, g, or t
  misc_feature (312)..(312): n is a, c, g, or t
  misc_feature (314)..(314): n is a, c, g, or t
  misc_feature (336)..(337): n is a, c, g, or t
  misc_feature (339)..(340): n is a, c, g, or t
  misc_feature (342)..(343): n is a, c, g, or t
  misc_feature (346)..(346): n is a, c, g, or t
  misc_feature (349)..(349): n is a, c, g, or t
  misc_feature (370)..(370): n is a, c, g, or t
  misc_feature (372)..(372): n is a, c, g, or t
  misc_feature (377)..(377): n is a, c, g, or t
  misc_feature (381)..(381): n is a, c, g, or t
  misc_feature (394)..(394): n is a, c, g, or t
  misc_feature (404)..(404): n is a, c, g, or t
  misc_feature (406)..(406): n is a, c, g, or t
  misc_feature (409)..(409): n is a, c, g, or t
  misc_feature (429)..(429): n is a, c, g, or t
  misc_feature (432)..(432): n is a, c, g, or t
  misc_feature (448)..(448): n is a, c, g, or t
  misc_feature (460)..(460): n is a, c, g, or t
  misc_feature (469)..(469): n is a, c, g, or t
  misc_feature (475)..(475): n is a, c, g, or t
  misc_feature (564)..(564): n is a, c, g, or t
tgaggccanacatgtttannaggccggccccgacncccccccncggggaaggaccnccnaaaccaaaccccggggnccaaggggggcaggganaaaccggggcaaggcancngccncccccacccccccccccaaaaaaccccaancanaccgggccccaagggcncagggnccgggcancncagggcanccgaggccnccncnncccccancancaaatccncaantccncccccggccanaaaaccccanangaaaaaccncaaaaaatggcagnccncntccnccccccccaccccnaancccccnaangngccccccccccacaccccaacnncnncnncangcnaaacttaaaaaacccggccancncccanaccnttttaaaccccanagggctaaananaanaaaacgtccaaaaaaaaacntcnggaaaatccccaaaangttggggtccancggggcacngggggnaaaactgggggcgtacggccctgctgccgaaaaccgctgtacacggaaaaaatcctcttgctggagtcgctgctctgggccttgcgaanaccctcttcgtacaggagcccc

SEQ ID NO: 546134 - DNA, 128 bp, Homo sapiens
gtacgagcatagggtgattcaggagattaactttcaataacgctttaccaaccacctgcgcacgcttgtggcgcgcgaggaggtggctatacgactgatgcatctgtgggaatttgttagcgcgctgg

SEQ ID NO: 546135 - DNA, 592 bp, Homo sapiens
  misc_feature (563)..(563): n is a, c, g, or t
  misc_feature (566)..(567): n is a, c, g, or t
  misc_feature (569)..(569): n is a, c, g, or t
  misc_feature (574)..(575): n is a, c, g, or t
  misc_feature (579)..(579): n is a, c, g, or t
  misc_feature (583)..(583): n is a, c, g, or t
cagacgaagtcaggaggtcagcaactttgcgggcttaccaggaggcctgtcctgcctctggaagccagcgacagagagggatgcccccgacccagccagccggagaaagggatggggtggtcacgaaggtctgagctgggtctgggtgtaggctgggaagcaggctggggtgtagactgcgaaggcggccctgccgggacttctttccagtccccggcgacctcttcgaattctctgctatctctggggagcctcgggtgggagggggtgtaagagacgcagggacgtggggagaggagacaaggcaggcaagaaccacaggggacggcggacagacgggcgacatcctgcggaggacgccgtcagtaccaggaagtgcaggcgatgaggaagcgcacgtcgtccagcggcccccacgctgtcccggctgctgctggctggctggcggatgccggggctgttccgggccctccggcgccgcaggctggggctggggctggggctgggtttgcgcaggctccggggcgccgcggccgccgcttagctgagcccccatggtctcngcnncnagacnngcgngtcnccccaccgc

SEQ ID NO: 546136 - DNA, 198 bp, Homo sapiens
ctctagaggatcttcgggagccttaccctacacacaatctgatatactacttagtcactttctttttttttttggaagagggggtccttgcccttgtcattcatgattgggagctgcaggggttccatcacgggttcattggcagccttcaaccttccacagtggttaatgggctcccgggacgggtaaacggggctc

SEQ ID NO: 546137 - DNA, 534 bp, Homo sapiens
  misc_feature (100)..(100): n is a, c, g, or t
  misc_feature (131)..(131): n is a, c, g, or t
  misc_feature (160)..(160): n is a, c, g, or t
  misc_feature (170)..(170): n is a, c, g, or t
  misc_feature (172)..(172): n is a, c, g, or t
  misc_feature (175)..(175): n is a, c, g, or t
  misc_feature (181)..(181): n is a, c, g, or t
  misc_feature (184)..(184): n is a, c, g, or t
  misc_feature (186)..(186): n is a, c, g, or t
  misc_feature (190)..(190): n is a, c, g, or t
  misc_feature (195)..(195): n is a, c, g, or t
  misc_feature (203)..(203): n is a, c, g, or t
  misc_feature (217)..(217): n is a, c, g, or t
  misc_feature (227)..(227): n is a, c, g, or t
  misc_feature (263)..(263): n is a, c, g, or t
  misc_feature (309)..(309): n is a, c, g, or t
  misc_feature (312)..(312): n is a, c, g, or t
  misc_feature (413)..(413): n is a, c, g, or t
  misc_feature (417)..(417): n is a, c, g, or t
  misc_feature (427)..(427): n is a, c, g, or t
  misc_feature (440)..(440): n is a, c, g, or t
  misc_feature (512)..(512): n is a, c, g, or t
tactttccacaggggaagcttttgaccttttcacctttaaactttgtttgaacttggaaagaagacttttgaattgtttaacaaaaaaaaaaaaaggganaaaaaggaaaaaaaaagacaggggaaaaaantggttaggggggctgcaaaaaaaatgtgncgactggggnanccngccggnttntntgtnagctnaacagtantactaggaaaatantcctcctctngtctaggagtttctgctacggggagccacagggtantcagctcacatgacatacccagaggcgaatgctagcctgtgctgtnttngaacatactcaaacaaaggctgattatccaaacaagaattgggactgcagcagtcggaccagttaaattatagttagtaaaactgggtgccttgtgagctnggantgttacaatngcagctggatctncgttggtcaggcagccttactgcacaataaaaccagagatttttatctccgcaggactcagtttaactcctngggtgcaaacagaaaagtgcca

SEQ ID NO: 546138 - DNA, 198 bp, Homo sapiens
tgggagagaactgatcccacaggttgttaagtatgcacactgtacactgttaagaagttgagcttttatcttagaggcagcagaaggtatggagccacaggaatgaaatgatgatggcgtacttcaggtaaatgaattccagctgcagtgtgaacacaggggcaggaagactggcagctgtcaaaactggaacagtcc

SEQ ID NO: 546139 - DNA, 335 bp, Homo sapiens
tggcccccccccccccgtaagggggggttgcgggggggggggggaatttccccccccttttggccccactctcctgcctggccattccccccccccgaaaaagggggccggggtttttttgggggggggggggccttttttccccttgaagccgatttttcccccccttttttttttttgggaaagggggggaaagggcggggggggcccccccctttcccccccccctcccttgggggggggggggggccccaaatttttttcattcccccccccctgggggcttttttggggggaaggggaccccccggggaaattatttttttttaccccca

SEQ ID NO: 546140 - DNA, 1029 bp, Homo sapiens
gtattgtatcttctgcatttcagtttactgtaagaacatacatttgaaattatgaacatattttcataaaaattaaatgctttaagaaatggagaaggaaaaatagctttatcaatttttttctcctcaagattctgtaataaacctcaaagtctggtgtagaatggtattttcccgtttgaggtcttggtagttttattattatttttttaaacatggtgccatttttagaattaactaaatgttacaaaattctcagcattggttttggtctggtagtataatggagtcttttcatacacttcttaaaatgtgaaaatctatgtttcagtattatgacagtatctgcagatacgtataataatatgcttgggccaaattagctgttgactagagtgaaccacgatgtcagtatggtatgtggggatatgtctacataaatagaactcatttaacaagtatggtctcaagtactgctcttctaaaatggggaaatggattttcaaggagccgatccttatcctatataaaacgctatggacggctatagcttaatccactacagtgacggtgaacagggcaagtacactcaatcaaagattctaactcttgaaatctgagcaccaagtatcaatatccaagaactaagatctatagaatacactccaatgcaagggtgccgtgacaacaagatcgcagggaacaaaagtgatcagcgaaaaattttcagaccaaatgaccaaagaggtaaacagctaaacgcaggcaacagagatggcacaaaacctcagggccaaagcgagacttcagagaacctaaaagaacagacaaacacgagtgcaaaaaactgcgaagtagccacaaagagagaaaaaaacaccaagagaaatcaccggcgtgacacgggggcaacggaaacaatgatcgcgaacgagggcgtcagaacccgtcagaagcgcggaggggtgaggcaactgacgagcagcgcccacgaaaggggacaccatgaaccgaaagagaggacgacca

SEQ ID NO: 546141 - DNA, 974 bp, Homo sapiens
  misc_feature (523)..(523): n is a, c, g, or t
ccacgcgtcgagcggaggcaggttgctgtgttgtgcttccttctacagccaatatgaaaaggcctaagttaaagaaagcaagtaaagctgcatgacctgccataagcggtataaaatccaaaaaaaggttcgagaacatcatcgaaaattaagaaaaggaggctaaaaagcggggtcacatagaagcctaggaaatgacccaggagttccaaacagtgctccctgttaaggaggctctgtcttagggaagctgagctaaggaaacagaggcttgtaaagcaactataaaaacagacagcagaaacttgacaggcagaaggaagctagaaaaagaacaactgaacatacttgaaactaatcctgatattaagccatcaagatgtggaacctactggcaaacaggaggttggggcttggcaaaactgagaacaagagccagatgtcggggctacaaagcagaattcaaagaagctgtactgccaagaacttagaaaggtgattgaagcctccgatgttgtcctangagcgtgttggatgccagagatcctctgggttgcagatgtcctcagggtagaagagggcattgtccacagtggacagaaacagctggtacttatattaaataaatcagatctggtaccaaaggagaattcgggagagctggctcaaattattgtgaagaaagactgcgaacagggtgtgcagaaggctcaacaataacaaaggatgaacgggacgataaccaagcggggtgagggcaccagaagaatgctgctccatccagacgtgacgccggttgcgaaacaggggcgggagaactcgggaaggtcaggaactgcggacgcctcggtggacactcgggcccagggggaaccgatcaacggcgctaaacagacaaaggcacggggctccacgggcaaggaccacttcctggaacgcacaaaaacgggcagcacaaccccggggccaaaaga

SEQ ID NO: 546142 - DNA, 161 bp, Homo sapiens
ctgtggcaagacaagtacccaactatagaagagaggctaactagcgaacaataatagatgattcagccatggtatgagtagatctttaataaaagattggtatagattttattaactgagcgtgagtccggccctttcaagcatggaaggagccgggcgat

SEQ ID NO: 546143 - DNA, 269 bp, Homo sapiens
tacttctggcatactggaacctctctggacattaatgcccatactactaatagccatataacacatattagtggctagggcacagcatcaacctgtaatcctagacacttagggaggccaaggcaggaggactgcttaaactcaggacgttcaaggccagcctcagcaccatagcgaaaactcatctctacagaaaacttcaaactcaccaattagaccaggcgtggtgatgggcgcctgcagtcccagactactcgggaggcagagga

SEQ ID NO: 546144 - DNA, 1850 bp, Homo sapiens
  misc_feature (770)..(770): n is a, c, g, or t
  misc_feature (811)..(811): n is a, c, g, or t
tcataaacagaggctaacaaatcctgcctcaggttaattggtccaaatagcacaggaggaccccagccccatgcaaattggttaccccaggggcgggggtgtggggggttcgcaccagttccttcgtgtcctcatgtgttgggcagaaaaatatctatactcgtaaagcctttggataggggccgtgggatacgtttgtgggagccgtgagcgtggaacgtgaacgctgtgggagcgtgaacgcctgtggcgccagtgtgggttagagactcctgtgtgagcctgtgtgagccctatgtgcgcctcttgtgcgccgaggcaaaaagcctgtgacgcccctgtgtggcaaatatacgggcgccacaaagcacgcgctttcccaaagccgtgtgggaggtgtggtgcgccaaatgtgttgaggtgcacaaggctcagacactcggacacgcctttgtgacgtgaggtgtgtaacacaccccttttgtgggggaaatctgtgatgaggggactttataacacactcttcctgtgtggggggctatttaaccacgaagaggggggcgctttgtgagagatacgccctttctagaggaaaacagcagtagtgtaagaccctcatcataaggtgggcaccctgttgtgtgtggcaaaaagttgagtggtggggcacaggtggcaaatatccttctcttctattatataagggggcccccatataatatagttaggagatgatgaagtacgactatcactctttgggtgaggcaaanaaagaggtggtcgcaaatgttgttatttcactctaccaagngagaaaatctttgttgaggagtgagatgttacacgaaccaccgcccactcctttttcaagacgagaagaaaacttctgcgagaagaccacttccatcgagaagaggagaaaaaatcgcgcgggagggagaattctctcatatgttgaaaagataaacccacaaagtttacttccgttggaggtcgcaccccaatatttatagtgcaggagaaggagaaacacgtcgggcgactgtcaggtcggatcgacatcagaggagtgggcgatggaggatcaacccattggtggggcacatgtttgtgtgtgccccaatagtgattttctgtagtgacacacaaaaataaaagagcgcatgaggggaactcacccagtaaaaagatgcgacgcccgcgacgtagtttttggtgagaaaaagaacatattattggagggtgcccatacaaaaaaagaagaaaatttacaccatctccgggaagcgggagggcgagagatgaaagtgttagcattcggtgtgatataataaccagcccgagaaataaacatttcccctaaaagtgtgttcactagtaatgaaatccgagcggtgtgaaaaacacccaacacacttacccagcatgtgaccacgtgacaacacgaaaccgggtggtgccaagaaaaaaacacgcatacaacaaggggcacccacaaagaaaagggaggcagcgggtaatccagccctaacacgcatataaaacgggaggcaacaacatatcatcgatcacacgagggcaaacaagaatatcacagagaaaagacacataagaaatggacagatatacatcaacagaagaaacgagtgctagaaaacacaagacgacgcaaagtttgagcgagcccaagacataccacgcgggaaagaagcaaacgagcaagaagcaaagaatggcacagaagaacacgaaccaccacaacaacatcgcaacgaggaacgaaaaaaacagtaagaagaaggaaacggaagaaacacacacagaaaacaaacgaagaagactaacacaaa

SEQ ID NO: 546145 - DNA, 156 bp, Homo sapiens
aggctcccttgcctgactgtgacttgtgcctctttcctgcccccgtggggacatggcagcccaaaaccaaggctgggtgggcaggtgacccaaggaacctttttgggaaccccttctccccgggctgggaacaataaatgcagccatgtttttgca

SEQ ID NO: 546146 - DNA, 191 bp, Homo sapiens
aaaagggaaaaaaaaaacccccgggttttcccccgggcgggggcccccccccccccctggaccccccttgcccccccccccccttttaatttttttgggggtttttttcccccctattttttttttctttttttaattttccctttgggttcccaaaaaaattccaaaaaatttttggggtttggggccca

SEQ ID NO: 546147 - DNA, 384 bp, Homo sapiens
ctgtaggagtttggaccagggcgctctctaagttctctcacgagagagccatgttcagagcgcgcgcgaagatcgtgaagcccagtggggagaagccggacgagttcgagtccggcgatcttccaagctcttctggagctggagatgaactctgacctccagggtcaactcaaggagctgaatattaccgcagcttatggaattgaagttggtggtggccggaaagctatcataatctttggatccgttccttaactgagatcttttcacgaaaatcccagtgcgggttgtacgccaattggagaaaaagttcagagggaagcatgtctggctttatcggttacaggagaattctgcctaagaccttgagccgtaccagattgc

SEQ ID NO: 546148 - DNA, 290 bp, Homo sapiens
tgaaggggaaccccggggggcccccaggccgccctgggggtgaaaaaaacagccccgaggggcaacaaggtcctttgtcagtcccagccccccctgagatccggcaacatcaacccgagtcatttgttttgtggggggacaagtggattcagggcagggccagggtgcccccagcccagccaacaggcccctgccttagggttgggacgaaaccgggggggggggttttgtaattgggggtgatgggaagcccattcagacaggcaaaaaaaagggccctttttccctga

SEQ ID NO: 546149 - DNA, 481 bp, Homo sapiens
  misc_feature (150)..(150): n is a, c, g, or t
aatcagctcggtccatgtttgaggcagggcagttcttaaaataagacaacaagagttgttgcatcagttaatgctgttttcaagaaagatttctctgtagcatgcaatgctgtttgatagcattttacccaaagcagaatttatttcaanaattggaaccagtcctcttaaaccctgctgctgctcaagtaagtttatgtaaactcaagtaagtttttgtaattttctaaattgttggtgtcatttcaacagtattcatagcatcttcaccaggactagattccatctcaaaaaaaccactttttttgcttatccataagaagcatctctttatccattagtttgatcatgaaattacagcagttgtcacatcttcaggctctacttctaattctagttctcttgctgtttctaccacatctaaggttacttcttcctccaaagtctcgaacccctcaaagttttccacgagggttggaat

SEQ ID NO: 546150 - DNA, 367 bp, Homo sapiens
gtgcatgcaactagtgttttcacttcatctggcagtctcattcccactttttcccattctttgtcacttttttaacagccactccacatttcagcacatgcagggcttatcatatctcttgtactttttagcatagatttactttcacatacataaaaatttctcacaaaggccaatagcttcacctcgttctttgtaaatacaccaccatcattcccatttgcttcaagcctcatgcagtacacttaatcatttctcttcccacccccacatgtttcaatctcatccactgatcctttaggccctcacctctaaactcaaacccaaatctgtcccttttctgtttccactgctggctgatgcaatt

SEQ ID NO: 546151 - DNA, 199 bp, Homo sapiens
tgtctccgacatagttgtcgcaagaatccatttaggtaaaacataagaggggctggtcacaggggctcatgcctataatcccagcacttgggcaggccgagccgggtgaatcatggggtcaggagatcaagaccgtcctggctaacatggtgaaaccctgtctcgactaaaaaatacaaaaaattagccgggcgtggtg

SEQ ID NO: 546152 - DNA, 422 bp, Homo sapiens
gatagttatccaatcgagaacgagatcatatgtggggagagtttacacgagtcatgccgttataattgcaagacatgatccactgagtgaagcctgcgcccattgagccggcgccatcccagcagcagcagaagccagctgagggcagtctacagaagcgcagccgcacgagacgtcaccctagaaaaggggctgcagaacatggaggtcaccgatgcttgaacattcctgcctccctatttgccaggctttcatttctgtctgctgagatctcagagcctgcccaacagcagggaagccaagcacccattcatccccctgcccacatctgactgcgtagctcagaggggaacagtgccatgtaccacacagatgttcctgtctcctcgcctgggcatagggacccatcattgatgactgat

SEQ ID NO: 546153 - DNA, 178 bp, Homo sapiens
tatgagtgcggtggtgcaaactcggttgctgagcctccgcctcccaggttcagcaatactcctgcctcagcttctcaggcgcgcaccatgcccggctaatttttgtattctcagtagagacggggtttcaccatgttagccaggctggtctggaattcctgacctcaggtgatccacc

SEQ ID NO: 546154 - DNA, 578 bp, Homo sapiens
  misc_feature (162)..(162): n is a, c, g, or t
  misc_feature (331)..(331): n is a, c, g, or t
ccaacggaagcttcaaaagcctgtggtgtaggaggcctggcgggaccaccctccttcatctttgctaataaccaggacctgcctggagcactgtcctctaacgccatcccagaggtcttggagttggactccatccgcagccaccactggtgcatccagggntcaagcgccgtccccggggagaaccttctgccgggcattgactggctcctggatgacatttccacccgcatttttacagctgaatgaaccactccaaatgccccccccctaacagttcaggttcctcaaccttttcccaaccctacccatggggggttgggagtaagcnggcaaaaataacactccccctcctcccccccagcctggtggtggtaatgttgcccgctgttgctttgtggccccccggctcccatggcgggagggctgtgccctggctgtctttttggctcctgacctggcctttggctaccataccaaaaaaaaagggctgggcggggaggagctgctacttctgctacccaggctgtgggcctcatccttcactcagttgtgaaataaaccgctccttgccccca

SEQ ID NO: 546155 - DNA, 185 bp, Homo sapiens
ccgttgtaaaagaatctttttcagtaactaaagggtagagtatatattttattgaaattttacaatgtaaaaccggggactttttaattagtaactttttcaaattcagttctaaaaaatgataaaagaagggaatttttaaaacatgttattcgacaggacatttaatttttaaaagatggtaa

SEQ ID NO: 546156 - DNA, 951 bp, Homo sapiens
tgcagcgccaatgcccgagaagctcgaggcttgcttcatggcggaagattaattggagcctcgtacgtccatgaacggaacgtgctcctctctacccaacacgtagtggagcgacttctcgagtctccactttccttgtgtgtacacgactgatgtgctctttcgtgtaccatcatctgtgtatcacatatgagaactgcgcaaggcgtggaggatccacacgtatagagctgccgacctggcagcccctcataagaaccgaggctcccggagtcgaagccaggctccagctccagcctctcccttcgggaaaggtggacagtgttcaagggtctgctgtggtacagttgttcccttggtcgtacgtttactttgccgagtatttcattaaccaggggactttttgaactcctctttttctggaacacttccctgacgtcacgctcacgcaataccgctggtagccagatgctgtaccaggctggcgtctttgcctcccgctcttctctccgctgctgtcgcatccgtttcacctgggccctggtcctgctgcaagtgccttcaacctggtgttcctgctggcatgacgtgtggttcggctttctgcctagcatcttacctcgtcttcctgatcattctgtactgaggggctcctgggaggcgcttgcctatctgctgattcctcttccacaacttctgtccctggatgaccatgtgatgagcaccgggagtttgctctgtgcgtgccacctgcatctctgatctctctggggatctccctgtctgtgctcctggctttgcctctgctatgagttcctcttggccagctctccgtgatcgtcgcggatcctcatgacgcaggtcgacattcacctgtgggcagagcggacgggtcgagatacccagggcccactcctagagaccctccttgacttgtgctcccggccttcc

SEQ ID NO: 546157 - DNA, 145 bp, Homo sapiens
  misc_feature (20)..(20): n is a, c, g, or t
gacctggattatctacaggnggagcagactttaaatgggaacaagaaaggttatggggccaaaatgatggaatcattaaacctgaagtgacttggacctgggggggtccttaatagggatctatatatctaggacaaaaaataga

SEQ ID NO: 546158 - DNA, 239 bp, Homo sapiens
  misc_feature (33)..(33): n is a, c, g, or t
  misc_feature (43)..(43): n is a, c, g, or t
  misc_feature (48)..(48): n is a, c, g, or t
  misc_feature (70)..(70): n is a, c, g, or t
  misc_feature (72)..(72): n is a, c, g, or t
  misc_feature (76)..(76): n is a, c, g, or t
  misc_feature (96)..(96): n is a, c, g, or t
  misc_feature (100)..(100): n is a, c, g, or t
  misc_feature (116)..(117): n is a, c, g, or t
  misc_feature (120)..(120): n is a, c, g, or t
  misc_feature (130)..(130): n is a, c, g, or t
  misc_feature (142)..(142): n is a, c, g, or t
  misc_feature (151)..(151): n is a, c, g, or t
  misc_feature (194)..(194): n is a, c, g, or t
  misc_feature (208)..(209): n is a, c, g, or t
  misc_feature (222)..(222): n is a, c, g, or t
  misc_feature (228)..(228): n is a, c, g, or t
atgtatttaagtatttattagtaaatgcaaggngatgttagtnatgancagttatactctaaatattcantntgtnttataaaggtagtgaaaaantganaatttgctatttattnnaanacattaaatntcattccaaatnagataagtnatattactataacatctaagcatcatctgatttgatattcccnaaaacacatttggnntatatgctcatcnatagantcagtatctac

SEQ ID NO: 546159 - DNA, 351 bp, Homo sapiens
gggcgaagacggtggcatcttactctctttggtagttctctctggtgagccccagcccagattggcaatccaggacccaagggatactttcctaggcagctccgtgcctatagtttggggaaagtaaagtcgatgtttggtatgtcagctcacagttataattcgatgcagtctcagatctggtttttttttttaaatctcggccagcctcattccccctcttcttaaatatgtgcatgtatatttaaacatggtatgtatgcttatgtatctagatatgtatcgagatgccttatgcttttttttaaacagggattccttaaattccaaaccccacagtcttcgccggag

SEQ ID NO: 546160 - DNA, 975 bp, Homo sapiens
tgttttctggctcttctcagctttattcaataaatttgcattttaagggtgtatgagaaattttaactaaaaatgtgcatcatgatggaaggtgcagacttgtttggaagtttccagatgaggagggtctataagacccatgtgtctagaaatcgaggatcaagccctcgaaacgaatggggtcatgtgggcttgagtccaagaattaggaataaagcgtttttgtagaacatatcccactgaaacctaatacactgtgtttgcaacacaataattgcaaagttaccaactttggccagattgttggtggtgagttgcggccctcaaggaaaaaagatttataataccaaattgttgtggaccgtccggggcccgagacgggtatatccctgagggcacagctgtgtagcacgaacgagacaagccggtcgcgaggtgggggaccgagatctgccggaaattataaaaagcgcgagggcgggaaatccacgagggcggttctgaacaatgctcatatgtgggagccgggagagggatcaaagtggagattcccaaactaggaggccgaacagaggatcaaaagatagatgcgccaggggggtcgaccccagagaggaaagaaaccagggcaagaaagtagacaacgaccgaaaaacatgagattagaagctgctataggggataatgaaatctagaaagagatgcagccaaggttatagtagcggaggtaatcagacggtgaagggcgatcttccagtcagtgtattaagaagtatgaaggattatgaaagatatggtgaacctgggttcaaggttacatttgataaggtcagagtggatattttgggacctcggggggagtttaataattaaaaccttttaaatagagtttacgtgaattcctgaatcacagtagggaaatgcgaataacaggggggattaagaaaaaaagagcctaggaataacggataacgg

SEQ ID NO: 546161 - DNA, 240 bp, Homo sapiens
ctaaggcaggaggatgacttgaggccaggatatcaaaggacatcaaagctgctgcagtgagccataatcttatcacagcactccagaagaaaggaagtggaatcatacagaatttgtctttttatgactggcttatttcactctatgtaatgtcctcaagacttattcatgttgtagcatgtgtctgaatttccttttttttttttttttggagacagggtctaattttgccacccaggc

SEQ ID NO: 546162 - DNA, 399 bp, Homo sapiens
gcggactttttgggtcgtaggaacctggtattagggcccgtccaggtgtagatggggaagtggagttaatacgttagcggtttggagtcgggcccgctgttccacgcgattttgtggagatttcctgagaaactctgctctgattaagagtcgaagtcgactggtgagcacgggtcttggaataaatgcgaggctcggagggctcccatttcggttaagacttgtaaggttgtttgggaatcgtcgatgtccgacgagaaggatttatggtgctcgcctgaaggtaatgtttcgtcgtggtggtcggcttgtaccggggcgtcggacgagggtaagacgaagtcggaccatacttcgggttcggacagaggaccctccagagagatgttcgtagatttg

SEQ ID NO: 546163 - DNA, 177 bp, Homo sapiens
tgctgcgtttttttctgttgaacaagaccccttccttcccagaacatcgaggtgacgggaagtgcccagcagattaagtctgctgttccactaaacaatggactgagagaggcaacccttagccatccacagaaaagctacatgagcaaaagcaagagacaggaagattgctcttca

SEQ ID NO: 546164 - DNA, 182 bp, Homo sapiens
ggtgccgcacactgatatggaaggattggtgaagagatgtcagaatttcttgggtctgctcttaggggaggacgagcttttgatttgtgactatccagtccccgttgaaaggaggctccttggctgtatagcaaagctttctcggatgggagagttcttggagtaggattgctcgggataac

SEQ ID NO: 546165 - DNA, 1401 bp, Homo sapiens
  misc_feature (231)..(231): n is a, c, g, or t
  misc_feature (364)..(364): n is a, c, g, or t
  misc_feature (425)..(425): n is a, c, g, or t
gggagggcgagcattagctctcgggtacagactcgcatcaaggatggagagcgggcagagcacagacgtccaagctggtggcatggctcccgtgatcgcccgagcagcaggaggcccgttcagaaggccaggaagtacgccatggagcagagcatcggagagtgtgctggttgaagcaggaccagtcgcgcagcatggagtcatgcagacatcaccaagcatgcagatggncggacgtcagtcgggcatgcgggcggcctgggccagtcagtggtggccgtcggtcgtaacgctggtgactgcatagtctagctacttgatactgggtggagggaacatccagtgccgtcgcagggcctgttgncctcccttgttggctccgcattcaatgagcgatcggacattgtcacttgggagcgtccggntcgacacattgataggcaacagatgggacttatgccattactgtcggaggatatgatggtcgcccagacaggctggcatcacgtctggtgggctttgcgaggacacgcactagagagctcggggtcgactcgcgtcggggctgcgccagggaaagccaattcatgaggttggggggcaggaatacccatgacaaaactattacggggcgatgggtccccaagccccaattccattaggtacgcgagggttgggaacgtgtgaagggacaggtctgactcgaggtcccttatcctgaaagccggacatccatagcggttgggatccatcctgcatgtcgaacccaagtgggatacccgtctgtccatggcaaccgtaatgggacaacttcaaaggaagacggatggtttgggacgggtcgcccttttgtggcgcaaacaggaattccacacggtctcgttggacaaacaacttagtggccccggggggaacaccccgcacaagatttggggggggaaaaggcaaccaaaagggggcctaaccggggtggttccactatggagagctaaccgcacagacaaggggccccacaggttccggtcccgcacaggaattgccttggggggatactgtgacaccaaaatggagagaccccgtccatttttgagaccccttggggagttggggcgcccaaggggacccatatgcgacaggggggtgggggaaaagcgacgggggcaaaccacaccaggggccccaatgaaggccccataatgatatggaagcccagggccacaagggccctttgggaagggggcctcccccaacacgtggcaccgaacgcactggatgggacacccgctcttggtcaagccacaacggctgccagagaacaacacaggcccagcgacagacactgggcggcggaacaacaccggggcgtgggtgtaatccccggggcgcacaccagggaaacga

SEQ ID NO: 546166 - DNA, 179 bp, Homo sapiens
  misc_feature (179)..(179): n is a, c, g, or t
gtagtaatgatacacaggtaaactagcataacctacaaagcatatatctatagtaggtctagcatctatcttttccgataaggtcctagcgtacatacctacacgtacgcaactaggtccggcgtgtgggtaccagagctcgcaatatcgtaaatacatggtacatacgctagtactcn

SEQ ID NO: 546167 - DNA, 373 bp, Homo sapiens
tcaaccgagacgatttgatgctcacgtcccctcctgagtgagggtcactataagctcttcaggcaggcggatgtgggttgcagcgtccagcctgtgctctaggtgcagcccaccacgttaactcactgagtggtagccgccagtgtgccatcgcgcaggggacaggccacaccccgatgctcagacagcttattcctcatgtaattggtcatcatgtgactatgtgttttgtgtctgtgcaaatttctattaacataatgttctccaggttcctccatgttattgcaaatgataggatttctttccttgtaaaaaataacatgccacattttcttaccaatccgtccaccaatagacacttaggtcgttttca

SEQ ID NO: 546168 - DNA, 751 bp, Homo sapiens
  misc_feature (590)..(590): n is a, c, g, or t
  misc_feature (594)..(594): n is a, c, g, or t
  misc_feature (597)..(597): n is a, c, g, or t
  misc_feature (613)..(613): n is a, c, g, or t
  misc_feature (620)..(621): n is a, c, g, or t
  misc_feature (626)..(626): n is a, c, g, or t
  misc_feature (628)..(629): n is a, c, g, or t
  misc_feature (640)..(640): n is a, c, g, or t
  misc_feature (672)..(672): n is a, c, g, or t
  misc_feature (681)..(681): n is a, c, g, or t
  misc_feature (687)..(688): n is a, c, g, or t
  misc_feature (694)..(694): n is a, c, g, or t
  misc_feature (710)..(710): n is a, c, g, or t
  misc_feature (719)..(719): n is a, c, g, or t
  misc_feature (721)..(721): n is a, c, g, or t
  misc_feature (724)..(724): n is a, c, g, or t
  misc_feature (733)..(733): n is a, c, g, or t
ggtcctctggtggctcgtcgtcgtgtgttgcccctcctgtctctcaccgtgttctctctttctttccctgtttgtgctccctgtctgtgcctccattcacccgttcgggatgttggctcttctcgggcgtgtatggcctcgtgtcacccctctgtgcctctggtgcgtcccaggacagtcatgcccccgagtctgttagctagagagttcgagtgtggacttcatctggagctgctcttcctcgaccactggaaggaccggtacctgccggacacgcttctcttcggaggatatgtggcctcctgcggaaggggacagtgctactggctgactacgtgatctgtcccaggtgcgccatgacttcctagcacacgtgcttctgggagcagctgcttttgagtgcatcacactaccaatcgttcctggaatacagtggtaggtggtggtacggcctggagaacggccatctagcaaggcgcccaggcagcgcagcagggacccgtgactgccccccccggcccccctctcgggctctctcacccagcctggtactgaaggtgccagacgtgctcctgctgaccttctgcggntccnggnctgtgtcctaaatgcnaagcacnnctcgncnngaggcctgcgncctgacatgctaacctctctgaactgcaacanctggattgntctttnntaagantcaatcatgacttctntactaacantngcntagctatantttatcttatataatact

SEQ ID NO: 546169 - DNA, 811 bp, Homo sapiens
  misc_feature (595)..(595): n is a, c, g, or t
ccactagtaccatcaacctctactttggctccaaggtcctgtctcgggtcagtggcatcctgtttaatgatgagatggatgacttcagctcgcccaacttcatcaaccagttcagggtagccccctcaccagccaacttcatcaagccaggtaagcagcctctttcatccatgtgtccctcaatcatcctggataaggacggccaggttcgcatggtggtcggagcctcagggggtacccagatcaccacatctgttgcactggccatcatcaacagcctgtggttcggatacgatgtgaagagagctgtggaggagccccggctgcacaaccagcttttacctaataccacaacggtagagaaagacattgatcaggtggtgactgcaggcctgaagattcggcaccaccatacagaagtcacgcccaccttcatcgctgtagttcaggctgtcgttcgagcatcaggtggttgggcagctgcctcagactccagaaaaggcggggaacctgctggctactgagtgcccggaagaggcaagattgacccgcagccaagggacgagaatgggaacaggagcaagagtgggacgtnggagaacatgccgcctctgggtgggacagagggagcgcaataaatggaggccaccgccaagctgcgggaagcctttgcgggctgaaaaaaaacggacacctccgacccgcccacaaccacacacaacatcaaccaaaacacaggggggcgcccaaaacaccccgccggggcccaatcaaccgcccactttttcacagggccctaggggttaaaaca

SEQ ID NO: 546170 - DNA, 137 bp, Homo sapiens
tgccgtcgctagcccccgcaccaataggatcctcccgaatcaatgcctgactcgcctctccttcataaagttattcaagcttcctacactattaatatgtttaccacaaacaccaccccatcatactgttccggggt

SEQ ID NO: 546171 - DNA, 450 bp, Homo sapiens
aagacctcacggggactgcgtgctccaaggcccagatacacctccccaagactgatatcatggatgagaccctcaagcttccactgacttacagcagcactgccacaacatggcgaccacccggagcttccaggctctaggtgtagtagagcaggaccagtgagccataagaacatgcgcatgatttgcacaggataagaaatgatggatatgtaatgctccagcaagtgccaagagctgaatatggatgccatctaagctagccgcagaccacaagccattcttaactacattgccagcaaatgcagcctctatgccaatgacatagtctgagaacatgccctctttgatatgccatatagaaggtatagccaacattggatgaaaggagcctaattttgccctaatgaccacctgaggaatgagccgcctagcttgccttgtgcaaag

SEQ ID NO: 546172 - DNA, 488 bp, Homo sapiens
  misc_feature (28)..(28): n is a, c, g, or t
  misc_feature (30)..(30): n is a, c, g, or t
  misc_feature (33)..(33): n is a, c, g, or t
  misc_feature (35)..(35): n is a, c, g, or t
  misc_feature (40)..(40): n is a, c, g, or t
  misc_feature (66)..(66): n is a, c, g, or t
  misc_feature (111)..(111): n is a, c, g, or t
  misc_feature (166)..(166): n is a, c, g, or t
  misc_feature (175)..(175): n is a, c, g, or t
  misc_feature (213)..(213): n is a, c, g, or t
  misc_feature (217)..(218): n is a, c, g, or t
  misc_feature (258)..(258): n is a, c, g, or t
ccactcctgatccttacctttgtggcangnctncntgtcnccttatatataaaatgtgggggtaantgtgaggagatctgcccctacaggtgtcctgaattctggctacanttctgtgtggctccctcatcaacgaacagtgggtggtatcagcaggccactctanaagtcccgnatccaggtgagactgggagagcacaacatcgaagtccntggnnggggaatgagcagttcatcaatgcagccaagatcatccgncaccccaatacgacaggaagactctgaacaatgacatcatgttaatcaagctctcctcacgtgcagtaatcaagcgcccgcgtgtccaccatctctctgcgccaccgccctccagccactggcacgaagtgcctcatctctggcctggggcaacactgcgagctctgaggccgattagccagacgagctgagtgcctggacgctcctgtgctgagccaggctaagtgtga

SEQ ID NO: 546173 - DNA, 183 bp, Homo sapiens
cccgtggtcttgtctggtgacgtacaaggcgcagcttgagctggtggcctcccgggccaagaagcccaaggtccagtcgggatcagagagtgtcatccaggagtacgtggacctgcgtacgcactacagcgagctgaccacactgacgagccagcacaatgaaccacacgagcacaagaacct

SEQ ID NO: 546174 - DNA, 208 bp, Homo sapiens
gcttagggtatgtgattatttcttgaaagtcaccagtgacgtgaattgaaggggtcgtgggtcaaaaatctggcacatttctttctatgtgtgtgcgtgtggtgtgtgtacctgttttttctataacaaaccaagtagtctcctgaatgccttgtgtcagtttctttaggaggcaagtcagcctttgattacttacctcgttaagctt

SEQ ID NO: 546175 - DNA, 363 bp, Homo sapiens
gggattacagacgtgagccaccacgcctagccaaatactgtattttctatctgcttttagtaaaaagacatctgcatataagaggacccatgcagttcaaacccatgtcgtttaagggtcaactgtataatcaatatgccaagaaaagggagaaaatgaaatcatataatgtgctcagttaaaaccacaaaaggcagaaaaagtgtaaaagacggaaataggaacaaagaacaggggccacacacagaaacctgtaataaatatgatagatactagtccagactatatcaataatcactgtggtaaatataccaattaaaagacagagattagtagagtgaattaaaagcaagacccaactat

SEQ ID NO: 546176 - DNA, 281 bp, Homo sapiens
gcttctggcaaagggggtacccacttactttccctgtagactttgctagtttcccaggctcctttttgtgtatttataactgtcaccagttagccactgtattaaactggtatatattgttctagaggacgcctggcctagtacccttcagtgagccatgcccacccttgtagttgtacgtgagaacgctgtacgtacacgcactaaccttactagtctctgaaatacgtacagcacgcaaactaacagacgcttacaaactcgaacaaaaaaaaaaacag

SEQ ID NO: 546177 - DNA, 849 bp, Homo sapiens
aagaccagcctgggcaacatagggagaccctgtctctaaaacacataatttaaaaaaattagctgggctatgtggtatgcacctgtggtccctgctactaggtgtgtgggtatgcacctgtggtccctgctactacagaggctgaggtaggacgggattatttgagcccaggaggttgaggttacagtgagcaactaattatgccttgcacactctagtctaggcaacagcatgagaccctgtctcaaaaaaacgaaaaaacaagaaaaaacaaaacaacaacaaacacaaaccctgtgggttcgggacggcgacgagcgcccgttggaaaaagcgctctttctagcacacacattcgtgatggggcggcgagcggggacccagcagtagggtacagggtgaccatggggctcgatgcgcgggtacccaagaagaagaaaacccggggcgccaagtggaccacagcgcgtgacggaggacttcccagcgacaagtaaagaaaacgccgccggggcggacacaacccggcgcgccgttctgggaacaaacccaccaagagggggggtcacaggagggccccaatcaggggggccaaacacaaaggggggcgcccccacggggagcccctgacatatcaaaattaagcccggccggggggggagaaaacccaccaaaacagcagacaccaacaacacaggagacacagaagaacacaacgagctaacatcgaccacagcacacacgagactacagatcacacagagaacaccacaagtacagaacacaacacacaccaagaccacaagccgcacaacagtcaagcgcagacagcagactaccaaaacaaga

SEQ ID NO: 546178 - DNA, 970 bp, Homo sapiens
  misc_feature (970)..(970): n is a, c, g, or t
cttcatgatgacgcatggactaaggcagagactgaccacctatttgacctcagccgccgatttgatctgcgcttcgtagttattcacgatcggtatgaccaccagcagttcaagaagcgttctgtggaggacctgaaagagaggtactaccacatttgtgccaagcttgccaacgtgagggctgtgccaggcacagatctcaagataccagtgtttgatgctgggcatgagagacggcggaaggaacagctagagcggctttacaaccgaaccccagagcaggtggcagaggaggagtacctcctacaggagctgcgtaagattgaggcccggaaaaaagagcgggagaagcgcagccaagacctgcagaagctgattacagcagcagacaccactgcagagcagcggcgcacggaacgcaaggctcccaagaagaagctaccccaaaagaaggaggctgagaagccggctgtccctgagactgcaggcatcaagtttccagattttaagtcggcaggtgtcacgctacggagccagcggatgaagctacccagctctgtgggtcagaagaagatcaagggcgctggaacagatgctgctggaacttggtgtggagctgagcctaccccacagaggagctggtgcatattgttccatgagtgcggagcgacctggtgttactctacgagctcaaagcaggctgggccaactgtgaatatgagctaagatgctgggggagcgggacgaggcctggtctgggcagagtgctgggggcctgcgcgaacagtgggcaaccccggtctgggggcaccgggtctggttctgggtgttgtgggcccccaggacaccttgtgtggggggcccccacaccatccgggaagaggagagacccccctcttgagaagacaaacacaggcgcggtgtgtgggaacacgcggggcgcacacaacacaaaaaaaagggggggtcn

SEQ ID NO: 546179 - DNA, 396 bp, Homo sapiens
cctttgtgataacaatcaattactagatgcagtggatggatgcagcacaaatctgggctgagccaaagtcccttttggcaatacacgccataacattcgaaggacatcagcgaccttggcttgtataggtgcatattatacttccagctgcaggtagtcttgacaaggagtgtttaaacagaaggctcaagatgcattccttgtgtacggtcggagagagcacttctaatgtaacgtggggtacagatcagctgcccccccaagtagcctggacatcgtcttatacccataataccttgccatccctacaaggcccatacgccaccaccttttcccaggtttattgaggtatgatagacatccagtaaaattcaccctttggaaatatacagctct

SEQ ID NO: 546180 - DNA, 397 bp, Homo sapiens
ctaaataaaaacagttatcagtaaaataaaatgggcaaaggaaaaagttggacaatcaaaacaggaatggaatagaaatagggataaatcaataaaatgggcgagggatataaatcagcaaaacaaggggagggtaaaaagaccaaataatagatgtaaagaggcgcaaattcagtcatgattaaatgagaatgagcaaggtgggcctaagggattcccaaaacggtaaaagaggaataagagccagtatggggggggattataagcagatatgatatttcagtgatagagacaagcaggacagtctcaatggttaaaatattgaaaagcatgtgtgacaatggtaaataggagtagagaaagaggaaaacaaaaattaataaattgtgtaaagtct

SEQ ID NO: 546181 - DNA, 1048 bp, Homo sapiens
tcaccccacccaaaacaccacaccatacggctaggtacgaggctgggttttaatgcggggtcagtgctgtggggggctgcagtgacccccttctgtgtacagctgcacttatgtgtacactgtcccacaaggcacctgtctcagagtgagggtgccctggcaggcagcgtggaaactcccttcctggagcccatgctccatgctaacctgcccacagcaaccccacagagccacattccctgctgcacctggtctgcagtgggtgtcccagtgacatggcccaatgtcatgcccagcatgcagctgccactcctacacctgaagatgggcagctgggcttatccaggggcgacataacggatgtcaggcctggcaccctcctgtggcagcgaccagtggtgcacaggtccatgaggcgacctggtgcccacacacagtgcccaagcaaccaagcgtggactagcacgatgcagtcggcgttgcgggccaacgtagcgcaagacacgaggcgggacaacgccaccacacgtacaagcatagtggctagcaggttactcgaaccacccgagagggccttcccccatctgtactcagccctatctgacggcgctgcctcgaccactgcccacctgctcactcccaactaccatggccgatactaacacactcgtacaccatcgtcgacactcagcggaggacccagcaagcagctgctcttgtacccacgtgcgcctagactacccctccagtccagaagcagctacaaatcacaggaagctgccaccacccggccagatatctgcacttcgccctcgcaacacagtgttgactgaaacatcgtgtcatattgacaaaacccatcacgggtcaaagacaaaaccgtggccacctaccccaaccaccttactgcgcattgtccaccacgatacaaatgcgacttgcaaaacatgaaccaacttaatcatccccctccctagggtccaacccagcactatggcacacaccactggcatcaaactataacattgtcgtacactgaccaccaccc

SEQ ID NO: 546182 - DNA, 392 bp, Homo sapiens
ataagaaaatgtctactttccatggaataccatgcagccttaaacagaatgagatcattcctttgcagcatcatgaagtttgccagatggccatttagcccaagtaattaacacaagaacagaaataccaaataccacatgttctcacttatcagtagtagctaaacaatgtgtacacatgcacatgaagatcgcaacgatagacacttgggagctactacatagtacagggaggaaggagatcaaaggttgaaaaatccttgggtaccatgttcactatctgggacatgggtcctattgtatcccataactcagcatcacgcaatatacccctataagctttattgtaaaactaggatttccaataagcaactttctctatattcttcatt

SEQ ID NO: 546183 - DNA, 314 bp, Homo sapiens
ggctacgagagagcaacagtattgatatctgatccctctccctttcttcaagtcgacaccatcactgcatgtgacccagaaagaatgggagagcttctggtgcccctcctcttgcattgcctccctgcaaaaacaacaggcgggtgtggtgcctcacgcctgtaatccagcacttttggaggccgaggctggtctcgaactcctgggccttcaaaaagtccacctgcctcagactcccaaaagtgctgggattacaggcatgaggcatcgaacccagcttaatttgttataaataaactgatcccttggactgg

SEQ ID NO: 546184 - DNA, 137 bp, Homo sapiens
gtcattccaggcaccccatcctctccagcccttcttggccccacatccatcgcctgtcgtgccccctctcacccccccagtgcccacagcagcacagcatgggcattgcgggctccagcacatctcccagtccgggg

SEQ ID NO: 546185 - DNA, 612 bp, Homo sapiens
atcagcaggaatccacaactttaccgcttccctttaccctaaccaagcaggacaagcactcatgtcattgtgttcgcccgtgtcctcctctggagaatcttcacagtcacctcattcatcaataatgtaccatatgttctgactgccatcatccaggagctcaacccgcagccacccatgactctgcctgtttgtacccaacttttcaaccaactcacgccattatttcggcgggccgtttgttggcaggccacccagtaaatcaccacactacatcaataatttcgcgggcgttacccactagcctccctgcagtcttcatcctcccgcgaggacttccctcggttgtccctgctattgtccaacgaccccctctttgcagctgtccgcccgtcgaggcctggtgtcatcaccaacatcctcacttttctccatcatttactcattcgttctctacctcgtcttcttctcccctcctggggtcctccagcagtgatgcgatgtagggggggggcctcctctggagttccgctgcatgttgctggttggggcggccgtcgtctacatcgtggttggtgactcgccgggggggcgactgtgggcggggggggc

SEQ ID NO: 546186 - DNA, 834 bp, Homo sapiens
tggcaggtgcttataatcccagctactctgggggccaaggcaggagaatgcttgagcctgggagatggaggttgcagtgagctgagatcatgccactgcactccagcctgggcaacagagcaagactctgcctcaaaaaaaaattaaaataaatttaaatacaaaaaaaaaatagccaggtgtggggtgcatgcctggaatcccagctacttgagaggctgaggcacgagaatggcttgaacccaggaggtggaggttgcagtgagccaagatcacaggagccactgcactccagccttgggtgacagagtgagactctgtctcaaaaaaaatttaataatttattataacctttcagaaatgcggtgtgcctttcatgtccttttttttagcattatgtcactctccctaatgaaatgtacttcagagaagcagtattggttaataaatacataacctcattctgaataatgtccctcatttgactataatgtgcttggtttcaaaagcaaaattaaaccaaattctcagtccctcgaagtgaactttgggttacctgcgtcagaaggcaggtggttacttccattcagatttggaatatgacctgcgcttaggatcacgatgaattttactcatgaaatcttttgaacctgttggttgaccgattatctgaggtgactcctaattttcattcaaaaaaaaaaaaaaaatgggggggggccgaattaaatttggggccgataagaaggtagttgaagcggaggttaaaaagggagggaacggttgtggtagtgactacatccgggggaatgaaaagagagtgtgatagaagtg

SEQ ID NO: 546187 - DNA, 259 bp, Homo sapiens
aagccaaacctctttctaaaattcataaaacatccctatggtggacattaacttctccagcattagatcctatcaccttcctttggctttaagttgtcatataatgagtttgcattgtgctggaatcacatgggagtctacagccagtggatactgtgcgtcagacccagggacagattggaacggtctgcctttcttaccgcaacccgtgcaccctcataaaagctgaattttcaatttgatacaaatgtattttgcc

SEQ ID NO: 546188 - DNA, 306 bp, Homo sapiens
gaactttaatcaaagcaaatgggtttttccggtagtcataaaatcccccttcccccatatacaaagggcaagacccccgtttggcatccaaaaataccatatattaaaattgggttccttggaaaactcagggctgggtaaaaccccctttataacaaaaaaagcaagcaaaaatgcttttaaaacattcagatttataaacagcagcttgatatccccttttcgaagtcaaaatttggcaacatttgggcaatattttttacccagcccaccagctcatttttttgtaggggtatttggccctta

SEQ ID NO: 546189 - DNA, 138 bp, Homo sapiens
gtcagtgtacccgaggctgatgtagaggcaggctagttgcttgacgcataggaggtgtaaggttgcagtgaaccgtagattgaaccactgcactccagtgctgggctgacagagcacgactccctttcaaaaaacaca

SEQ ID NO: 546190 - DNA, 338 bp, Homo sapiens
  misc_feature (12)..(12): n is a, c, g, or t
ctgtgctagttncgcttgccattgattgaatgcggaatgaagtatgaagatgctgttcaatttataagacaaaaaagaagaggagcattcaattccaaacagctgctttacttggagaagtaccgacctaagatgcggttacgcttcagagataccaatgggcactgctgtgttcagtagaagtagaagcaggctggctggatcgtggcattagagggaactcttggtacctggaaatgtgaatctggattcttacctgtgtcatcagagtagtaatggattcagtactcctcaactcctaatgattgagaagaaggcaaacgataaagaaatccctc

SEQ ID NO: 546191 - DNA, 202 bp, Homo sapiens
  misc_feature (134)..(134): n is a, c, g, or t
  misc_feature (157)..(157): n is a, c, g, or t
tataccaggacagatcgaggacatctagctgtatggaaaagccacattgcctggttccggaccattcactgctaaggcacaggctcttcactcttctccatcaggcattaaatgaatggtctcttgggcacccncagcgtgggaagtaacattttcnctgaacaattccagcctgctctattttctagaaggtaccgagctc

SEQ ID NO: 546192 - DNA, 401 bp, Homo sapiens
atcacagaagaatccttagattgacatcatacctagcgagtatacaaagcctatatcccactgtccagcttacacttcattcaacctatgacacataccaacaattgtgaaacattccctaatagataagtacaagggtgtctggtgaaattccttaatttaattaaacaaccaagataccgcaatacgctctttaatatattgtacagggatgccactgacaagtacaccatcagagaacacactgctattttcaaatatacagaactgaacaaaagcattttagcatgctgccttactgtacacagcaaactggtgagcatcttcagacactaaggacaggcaataaaatgggttaatgccattggttgatatgtttatgaatcactcagcagtgttga

SEQ ID NO: 546193 - DNA, 163 bp, Homo sapiens
tcctttcttcctcccttttcccgtctgacccaacgttattgtccaacatgactgacagcagctttgtttcttgacctgtatatgcagtctgctatattgcagaggtcagttttgggtatagcggatttcgttatcatcatattagcaggaaaaatgcttgttc

SEQ ID NO: 546194 - DNA, 143 bp, Homo sapiens
cgggagccttaacctggggggtttgaatcagtgagtgacagaaattccaggcatggttggaaagctcaggtggttgtctcagacatctgtgcattctggaagtaaggacaaacggtgcagcgtaacctcttgtcatttgggag

SEQ ID NO: 546195 - DNA, 1406 bp, Homo sapiens
  misc_feature (871)..(871): n is a, c, g, or t
gccaaatcatttgttgctcctgctgctctcattgtgccacgtttttttttttcaagtgtttagtaatagtataatccagtgtggttggatatcaaaagtagaattactttaaggtagttttcttcattatggtcatggcgtgttcttaagttttacccctattagatggtaagaacaattaaggcagtttggcacaaattatttttacattctgatcattcagttctgtcatggtaatcttgggtggttagaaacaagtgatgaaaccataggggttctgtaaactttggtaatgctatgaattcttgtctaaattttgggctgtctattttctgctgaaaccatgcaaaattgagcttggtggggctgggagggttgtgctttgagggaagttacgcttatttttttttggtctttggttttttttttttttgtttccctttttcgggagaaagggcgtctcgctcatatgcgcccgaggcgaggtctgcgaaactccgcgaaaagggtaaaaagaaaaaaacaaacagaagagagaaaaaaacacacaacaaacaaaaaaaaaaaattgtgtggggcgcccgcccggacccggaagagaagttttcaacaacattgtcggggggggacgggcgacccacgagacacacagcacgatgggtcgccagcgggtgctgcagagagagaacgcggggccacaaacagaggtgcggtggtttccccccaaaaaaaacggcgcggggggcacacgagtcgtctgttcggacacacacccaggaggagattagcaaggaacaaggacgggctttcacaagagcggatgccccacaggaagcgggataataacaatagacccgcgcgcggtggacanacgaacaaacaatcattactactcagacgcacagaccagacagcacatgatcaaccacgacgccacagcgagagacatgagacagagacgagagtcgggaagactgaggcgagcagccgagcgaggcgaagcagagaggaagagctgatagaaaacagagtactagggagccacaccacaagaacgacacgaaaagcgaggcggcatgaagaagcgagcgcagcagctagccgccgatgagagagagccgcagcgccaaggaagcgacgaaatagcagaagagactatagcgctgccagcagctaatgcagaagacaatcgatcaaagtctgacgtagagaagtatagacagcgatgccaatagagcacagcacgacagacgagaacggacaacagctcagaaaccgacaagaggacaacaaaggacaggccgtgcagcagacacgcagagcacacagagaagacagagagagcgatagatataggagagagatgaacggacagagacaacgagagaaaaacgaatagtaaacgg

SEQ ID NO: 546196 - DNA, 143 bp, Homo sapiens
acaggaagaaaggagggtggagatgctgggagtttggagagagtttagtgtagaatagtcactatggagtttcagttatccagttgccgaattcggtgtggcaagccaaggctgtgcaaacctaggccggggctaggctcatg

SEQ ID NO: 546197 - DNA, 791 bp, Homo sapiens
gccaaatcatttgttgctcctgctgctctcattgtgccacgtttttttttttcaagtgtttagtaatagtataatccagtgtggttggatatcaaaagtagaattactttaaggtagttttcttcattatggtcatggcgtgttcttaagttttacccctattagatggtaagaacaattaaggcagtttggcacaaattatttttacattctgatcattcagttctgtcatggtaatcttgggtggttagaaacaagtgatgaaaccataggggttctgtaaactttggtaatgctatgaattcttgtctaaattttgggctgtctattttctgctgaaaccatgcaaaattgagcttggtggggctgggagggggtatgtatccatggggacctttaattggtacagaacacagaacttatttctgtcagttatttaatacatgtgcacactttcgtcgaacatgtctcaacgagaataagatgtttcccaaaacaacaatctttactgttacacacacttagttcttcaaaagatctgtcgtactatacgggggcatatttcttctttaattttcaaacatttacctctgaaagtgtgtattctctctttttaatcttaccctcaatttgaacttacgtggttggttttccaccatcgtgcctgcggattgcctacggaatcatcggtagtttcacagaaccgcgtgtgtggcccaactttggtaagcctatatctcctttcttcaaacaaaggtgttttgggcccagcgacaccgtggtgcaggacc

SEQ ID NO: 546198 - DNA, 792 bp, Homo sapiens
agagactagatgcttcactagggaatgtcttcccacccagcatcacaaatgtggacaatcactgcatccacatctgtaggcatatttctatggaagttaattgacagctatatcattatttatttacaatttcatttttctacaccttttgagatttcatgaatgcagttttttcttaaaatttattttaccttgacagtatgtttttagtcccccaatttaattaatggcccatgtgcatatatatgggagtgtgcttacatgttaataatttacttgcatacttatgagaatttcacattggaatccataatggtaaaacaacatacatctgccaatatacgttttcctgtgggttcaagagaagataactgacagctttacctacttcctacagatgcttctaaacccagatatactgagaagagtgtattgcctctgagtgtaagagcagtatgtgtggggttaagtctgctctagatcataatttgtaacacaaatatacgtcataatctgttacacctaacaattggtcaggccaactttgtagactgaacatgtctggcacttgtagtctcagatcacgtgtcacgtatataatttgcttctcccattttaacttggtaggaaggtacttaacagtaggaaacgcgattaaaccacttttatactgtaaaagggcttttcccttcctaatggttaattgccccagtgtttggccctgaagagctttatggcgtgacttgttcacttgggtgacatggggtgctgcccgggtcacctgttgtcccc

SEQ ID NO: 546199 - DNA, 326 bp, Homo sapiens
tatggggtgcatagccacttctgcagatagaataacgttacccttaacagactatatacggtgatagtacttagaacagtgcgaagtcgcttgcggcgtaccttcttaccatgagatggggccgtcaaatggcttaagcctgaggagtgatgacgacttgagcatcataatagctcagaaatcctccacggtggagcagaaacgacggtagcccaacacgaacaaagatgtagcaggattccatcgagacctcatgtgggtgatgaccagaatgtctggctcccatagcgtggtcaacatgagaatgtccataacaccacacaatt

SEQ ID NO: 546200 - DNA, 1174 bp, Homo sapiens
  misc_feature (15)..(15): n is a, c, g, or t
  misc_feature (19)..(19): n is a, c, g, or t
  misc_feature (89)..(89): n is a, c, g, or t
  misc_feature (117)..(117): n is a, c, g, or t
  misc_feature (157)..(157): n is a, c, g, or t
  misc_feature (174)..(174): n is a, c, g, or t
  misc_feature (196)..(197): n is a, c, g, or t
  misc_feature (222)..(224): n is a, c, g, or t
  misc_feature (266)..(266): n is a, c, g, or t
  misc_feature (318)..(318): n is a, c, g, or t
  misc_feature (367)..(367): n is a, c, g, or t
  misc_feature (377)..(377): n is a, c, g, or t
  misc_feature (525)..(526): n is a, c, g, or t
  misc_feature (548)..(548): n is a, c, g, or t
  misc_feature (626)..(626): n is a, c, g, or t
  misc_feature (671)..(671): n is a, c, g, or t
  misc_feature (700)..(700): n is a, c, g, or t
  misc_feature (716)..(716): n is a, c, g, or t
  misc_feature (752)..(752): n is a, c, g, or t
  misc_feature (799)..(799): n is a, c, g, or t
  misc_feature (817)..(817): n is a, c, g, or t
  misc_feature (819)..(819): n is a, c, g, or t
  misc_feature (1046)..(1046): n is a, c, g, or t
  misc_feature (1090)..(1090): n is a, c, g, or t
  misc_feature (1127)..(1127): n is a, c, g, or t
  misc_feature (1173)..(1174): n is a, c, g, or t
attaaagaaaattantttnaattagttagtgtaattaataatattaattaaggattaaagttggataatgtgatttttttattaaactnttagtcattttattattcattatagtanaatgaaaagaaatttttgtaagttttttttatttaatatntaatattaaaatatttnaaagaagaaattttaatattgnnctcatatttccgaaatatcacaagnnnccactgttccactcaattgtcctcggcgagagagcgcaccgnccataatatataagattatcaataaatagacaaacgtatttatgttctattngtaatttagtttcacggtccttatttttagtttcatttctttaattcgnagaacgaatnccatacactgcatgaactgacctctatagaccataagtacaccaaccacactacacaaagccattcgcgtttccatctcatcaatttgttttattttactacatctctctcttctgttctcttacccatatatgtctcaatagcaatnnaccgataactcattatatgtcncattatatatatatgattttccttttattctacctcactctatatactttatagtcatatgactagagagaataatanataagttatgggtaataaataattaataatattattaaaaaagtnaagatattttatatataggtgtcatagtnatatttatcacagtcntaatattaccttcaatcccatattatatttatgttnctatttatttaataattacaatatttactcaaaaattatgtagattnaaagatgtgtaagtagtntnaaattaatatttcatactaataaatcaatattacaactgtttcataatattcctccattatctataatattattctcactccactatatattcattaacttctcaccgtagtctaacatcacctccatctaacttacatcactcttatagatcacctcaatcttattctataaactgcttataatatagaaaataatccgcgaatagtattaatattatatactacnttccctctagtatctacccaatatgtcttataccgtagaaagtnctccaatcactaattatcaatctcgaatgtataattncgtatgataagcagtatataactaatatatttcaccataaaaggtnn

SEQ ID NO: 546201 - DNA, 295 bp, Homo sapiens
  misc_feature (22)..(22): n is a, c, g, or t
  misc_feature (25)..(26): n is a, c, g, or t
  misc_feature (88)..(88): n is a, c, g, or t
  misc_feature (210)..(210): n is a, c, g, or t
  misc_feature (219)..(219): n is a, c, g, or t
  misc_feature (237)..(237): n is a, c, g, or t
  misc_feature (250)..(250): n is a, c, g, or t
  misc_feature (264)..(264): n is a, c, g, or t
cctggagggcagtgactgacgngannccccggggccatcaacttcaccatgttcctcaccatgtttggggagaagctgaacggcacgnaccccgaggatgtgattcgcaacgcctttgcctgcttcgagaggaagcctcaggtttcatccatgaggaccacctccggagctgctcaccaccatggtgaccgcttcacagatgaggaagtngacgagatntaccgggaggcacccttnataagaaagcaanttaactacgtgganttacccgattcttaaaatggggccaaggtaa

SEQ ID NO: 546202 - DNA, 548 bp, Homo sapiens
cccggccgccgtcgcgacgtgtatcactcctgtgtacgttaagtgacaggtaatctttaacgactagagtagcagaagaaatcatggcatgaaatatgggtatgcagatgaagcacgaagataaggtgctgaataatgagttaaaatatctccttagtcttttattcactcatttggcaaatacataacatacatcataggtcagtcctgctctcaaggcaatgagaagtgactgaaagaatgacaggattccagctactatgggactgtgctctagctgggcaaggcacccagacgattagattagagtgtaatcaacaatgtgtcacaattagcagacagtagctacgtgagtttcaaaatgagtcatttgatgaacagtgtcggggctgtgggagggaggaggagaagggggcttcgtagaaatggttgtagcccaaattagattccgaggaagatgaagttcatttgaatccgtatatatattcacgatatgctgtatggaatgccaggttgtaaaacaggatgtgccggatgtgtactactat

SEQ ID NO: 546203 - DNA, 242 bp, Homo sapiens
attcgcggccgcgtcgacccacaagtaaatgtatctgcaagctgatttaaattgtacattttctcttcattgcatataatctgatgttgaataaagtctgagtattaactaaagtttttgcttcttaaatttgtaagaattggcctgaaaatctgtattgttgagcacagtattaaaaacattgttacatacattgtatttcaagggttctgcatacagcaaccatgttttatcgtaacact

SEQ ID NO: 546204 - DNA, 357 bp, Homo sapiens
aggtcatagggaaggaggaattgttggctgttaaaaaaatactgcaaatggcctttgaaagtctagacatcttcatcataaacacaaacattcctcttcacaaagggacttcaagtaaccttaggctggagggcccacttgagtatgtttttcttctcattctttcttaccttccctccagccaacccaacccacattcagtgaccaagtcacgtgggttttacctcctaaatcttttcagatccgttcactgctcagccactctcctgacaccaccataaaccaagccaccatcacctccagctgtttgactgcaaaggcctcctcactggcctctgtcttcccctggccctgtga

SEQ ID NO: 546205 - DNA, 89 bp, Homo sapiens
ccaggggtggggggtatggggaccattcattccctggcattaatcccttagagggaataataaagctttttatttctctgaaaaaaaaa

SEQ ID NO: 546206 - DNA, 262 bp, Homo sapiens
cactcctatgtcccttggcgttgtcctggccgcgggactggtccacgtgggaaggtctctctccaccccaggctcgtgcttccatatacacacatctcccagtagccaccaaacagctggccactgattagggcattaacttgcctcggatggctcacgtcataccataagcacataacgggctgtttctggtgcttggcattggtaggtgggaactgcgggcaggggctttcactccctggcactggacattaggcctgca

SEQ ID NO: 546207 - DNA, 128 bp, Homo sapiens
cttgctggacatacttctggtgggcactgtgcggcacttgaggataaatcagtgagctgcatgcacttgaaaggcatgcgctgtctcctcacttaagtgcaaggtccatcgaccaaagccctgttctg

SEQ ID NO: 546208 - DNA, 294 bp, Homo sapiens
gtagatcgatcatgagacgcatgacaaaattggcggataatgcataagaatggtgatcaaaatgaagactagcacacgtgagctaatgaaaaatgatactggctattccactgcacttgactataatatttggataattagaccaaggaaaatgacctcatcttacataggtacagagccacaaccttctaggtgatttgacaccttcctagctgtcaggtgtaagaagggcacaaaaacagatgtacttcagtataagttctaactagttggaccctgtttgtaaatagcatc

SEQ ID NO: 546209 - DNA, 184 bp, Homo sapiens
tacagccggaggcaggtttcacccgggaggaggagacacttcggtcgtcacccaaagtgttacaggcttaaaacacaagctagctttgtaaatactgcatcgtgatcagaagtgggtcatgctggttagagatggagtggctgcatttgagtactatggacccagcgaggaccaccttcgacgg

SEQ ID NO: 546210 - DNA, 262 bp, Homo sapiens
ttttcaaattttcaaaagggaattttcccttttggcctttttaaaacaggtgggccaaaatcctaaaggcccgcttttaatttaggggcccgcccatgggccctttgggaacaaaaatttgcagggaaaatttgggtttccctggacccttttgggtttaaacgggttaattttgggggttcaaggttttgaagtgaaaccccataaaaaaaaaaccctgggcccttttttttggttttacatgtttgggatgtttccccca

SEQ ID NO: 546211 - DNA, 552 bp, Homo sapiens
agatagaacataaaaaatatcttagtaaattatcaaacaaggggagattataatattaatagtagtattacgccagtcaaggtggcttacgcctgtaatcccagcacttttgagaggccgaggcgggtgaatctcctggggtcaggaatttgagaccagcctggctaacatggtgaaaccccatttctactaaaaataaaaaaaattagccaggtgtgatggcaagtgcctgtaatcccagctactcaggaggctgaggcaggagaatcgcttgaacccaggaggcagaggttgcagtgagccgagatcgagccattgcactccagcttgggcaacaagagcgaagctccatctcaaaagaaaaaaaaaaaaaaactagtagtaatagtggcagtactaaaagtaggggtatggataataatagctaaagggtatgagatactatatgccaggctttattctaaacactttacttatttttactcatttattctccacaagggtcctatgaagaggagatggagagaagttaagtgacggggggtaccgagc

SEQ ID NO: 546212 - DNA, 186 bp, Homo sapiens
ctcacacgagaaatgaaggcgtctgatgcagaccacgggacccgccggggtagaactcaaaacccaacacaaagaaatggctctggcgcgaataacaccacacacaacttgtctctcacctggacacacagggctgaggcgccagagactcgagtccttccccaccccagtgcttggtggctctgt

SEQ ID NO: 546213 - DNA, 846 bp, Homo sapiens
agttaatgcccatgtgacaaacatgtagatattcatcaaagaccacatgtatatattgtaaaggcatttgatcttctccccatatgtatgtatagctagaatctgcttgcggttgtaaccttttcttctgcatggagcttggggtgaagcaaggccattggtccagtgtgtcatagccttaagcatgtttgcccttcgtttgttgaatgttcaaaaaatgtcaagtgatcaagaaaaagctctaactttcgactttgttaattttatgacatgacactggccacaatatggtcgccaattactgtggacgccattcttatcatttccctgacaataaaatatgcaatgttttacgacagtattctaccaagagtctctcagacactttttacaaaaaactctttttttcattatgcactggataatacacagtatcagtgtctatgtcttaaagtcctttttaattactttttgacaaaacgttctctttgggccaagtaccggtgctcgtgtctcctatatgacacacgtgtccatttcaatatgtattattgtctttacataaccagaatcaacaagcgaagatcacttttaattggttcatcagaagaataaacccctttggtgacagatatggcgaaaacactcatacgagggccggccacggttcgtcaacctcttttcacggcaggaatttctaaggctgggtacattacttccaaatgggtaggggacagcatgcttctcggcgggcagtttacacccgatgtggtacgagttcacaccggtacactgtaccttcgggttttccgcagtccagtaccgtctaaggggacataaacctgt

SEQ ID NO: 546214 - DNA, 1798 bp, Homo sapiens
  misc_feature (1)..(1): n is a, c, g, or t
  misc_feature (478)..(478): n is a, c, g, or t
  misc_feature (713)..(713): n is a, c, g, or t
  misc_feature (1505)..(1505): n is a, c, g, or t
naggttgtgagtagtttgtttcaactagttagctgttcttttgatggttatactgagaagttgtttgcttgtatctagtcgtggtatcctcgctttgtccgccctctttggttgtggctcgtcttctagtagtagtgctcttgggggggtggtttatgcctcgcctgtggggctgcttcgctgagtccttgtgatccctatctgctccttttggtggagagttcccaacagatgggtgagaaattgtgagagagtactgtttgggctgcacacacttatagctcaagggtctccacataaattattttgctccgctggtgccgaccccaaggaagccgtatagagtggcagacctggcgcgggcttaattatcacgaaaagaagagggctgcaacattcgcaaaaggcgtcgtcacagagttggtgtggttcgccaggaacagaattgctccctgccatggtgctgctcttatatccnactagatgtgttatcacaacggggtggcataacgacatgtcagtgttagtactcaaatacttgttgccgggggccgcccacatagtgagtttggtcctcccggttgttggctcttggtctgccgccacgagccccacccaacttttcccggagaaatgtgttttttgtgttgttccacctttggccgccgcaccccgtttttgtggggctcatgatgacacttgtcgctccacgnggggggagacacttctcctctggggggcgaaccaccgttgggaggcgcccccgccacagaaaccaccagtgttgcaaaccgcccgctgttggggaaacatgtttgacagcaccatgtgtggggtgtttgctctgccacgcccacagatgacatgtttctcccggttttagaagagtgggtccgccccccccgacacgacgttctggagtagtgtagtctttcggctccttcgatcatgctgtttgctcctgcacgaggtgtgtcgacgagtctcccctcacagtctcccccacgggtggtcttttgtctctatagagacgctctttccggacagaaccgcccttgtgtgtgcgccccgctcttgggccccgctataattttttgtgtcctccccttcgtgggaatctctggtggagaaaaggagagtttccacgaagaggtttggggggttttggtgtgtaacacactcgtttcccacgagaggggggaaacccctcttttccgcgagtctctctctgttctctcgcgaagagagtatacgcgcccctcgagattgggctctctttgtgccacggtgataccctcggtttgtaaaatggcgggaaagaaagggggggcacatctctttcttgagacacacacccctcgcccctctctgtctccacggcttcccccactttcacacacacacacacccgcgcacacttttgcacaaaccccctcgagacctctctggagacctccacacctaaacacacctcgggaatgttacacctcggaagaagaatatgnggggtatagtgttcttccctctgctggcccacgcggctggaatacccagagtggggaattggggaaagaggccctcctttcttctgaccctccctctcactagagtatgcctcgagcccctccccactacctcttcccacttttcctcttgagtagttatatttgtgtacacagctttttaaataattttttataaattatttaacccctgggggccgaaactgacggagggaggatataagggatccccggactctgtatgaattgaaataaaagagaaattaaccaatctt

SEQ ID NO: 546215 - DNA, 1464 bp, Homo sapiens
  misc_feature (766)..(766): n is a, c, g, or t
ctgaggcttgctagcgggcacggggaatggttgcaaatggcggaggcagaggcaggggtggcagtgtgacggtccgtggactgtccccctgtcgtgtcgcgacgagctgctcattctactacttttgaaataccggcgacgctcctggagaggtggaccatggtgtctgaggctggacaggagacatgggctgatggcgggcgtcctcaccttcagcagagcctgcagacgccgagaagggtcttggccccaggactgaatcacgaagctacatggtgcccagctgagtcctgcggagcagtcgtccgaggcacgagcgtccctgcacggcggtgccgtgtgtcctaggggaagcgtgcgcacctcttgggctaccagcgcgcgcgcgagacggctcttgggacgcaggcgagtgtcgcgaggaaccatctgcggtgcagtgggcctcgggggtctcccgaggctacgaggccttgtcctgatgccctttgtgccatgtccccctcgtgcgcagtatccggggggcgtcctgtgctccaggtatagccccaagggcccccctctatcctggagcggccagtactgctcccggctgtctctgctgtggtatgtgtaaggcaaggcgtcgccaaggatattccttgtgtgtccatgtgcaccgcgcggaggaacacccctcttggctgctctgagattcgcgcctttgtaggaccacccccgggatagatttcccccccccacgaggcgcccccgcaacatcccgcgnctagcttgtctagttcgctacctagcggagtagacgcatgacgtaggcacctccctcgggcatagcgcaactcctctggcccttagaactcggcaattcgacacacagtcttaccgcatcacccatttgcagcacacgcacagctagcactcccaggcctcggcgcatagcgttcgccgattctacagccataggtgcccccactattgatacaaccgtacacccctttgctcaaaatccggccacgattaagcaccgccggtagggtctccgcacattgtacctgccaatccttatgcgatctcgacacacctcccacattttccccacaaccaaaacgattacaagcacccaatctgtggctgaaagcccttaggcgtagtgtccatctgcggctagaaactcacaacaccaaatcgactctacgcaacgcaggcgatacaacaccctactcacaacacgatattgcccagcggcccaattacattcccccttgtcacctacaccgcctcctcacaacctactgtatcgaccctatcctgtcgcagcacttatcgccctattcctacatacttgtgtacccaccatacacgcccccacaactctgtgatatcgagcctactcaatcgtgtgtatcctcaacctcaattctatgtaccatggtgtcaatccaaatcctacgctcacatcagccccag

SEQ ID NO: 546216 - DNA, 767 bp, Homo sapiens
  misc_feature (10)..(10): n is a, c, g, or t
  misc_feature (341)..(341): n is a, c, g, or t
  misc_feature (564)..(564): n is a, c, g, or t
ccaaatgggnaagggaaagactcctattcaccttggccggccttggacacgttgattccgggccagttcacacaataatgggcatctggaactataaactggccgggggcactcgcaaccaaacgaaacccttggaaaaactttgacgaaacgaaggctggctgagaaatgggaaacggggcttcctctccaggtaatgtgcctcggggttctcgggactaaacctggaacaggctgtaagcggtgtaaacgctgggtaatcacaccacttggctaattcttcccttggtgggaacactttggaagaaccacggcaacggtaactaatggtgtaactaatncacattggaatgtgccccagaggaacaccacgaggaactcttaattccaacacaacactgtaattataccgggggaacacttctcacagggctggaactggtggcctggtccctggaaattggttggcctggcatggggtggttggggtgtaacattttgagaaggctggggtaaatctttccaaaggtgggggcacggaaccccgcaaagagagcaatgtgncgcctttcctggggctctatcaccacctggggggtggtgtcacacaccaaactttaatttgggtcggggtgggttcaacccaacaatgggggatttccccaattgtgaaacccaacacccttaacagagcccagcacaacagacataatgtagagggacttgggttccagggggacaagtccagggccttttcccattttggc

SEQ ID NO: 546217 - DNA, 912 bp, Homo sapiens
ggtaaaccactgtgtccctctgccttgttcctcgggttgttgtccccccccttacaactggggagcacattgttccctccggagactgcgaattccccggggcctggtggttttcgatctccccaaccgggcccagatatccccccctcctttatctatggcgggtcctaaacttcaagtcttcgaggatacagtcaatgacccggggcccttttctcctcccacaagcgggattctgggcccacctttgcgaatgtagcacacacttcctcttctgtatgaagacgccgtgcgcgtgaatccgcacatttcgtgggagtctgctcccctccccctctttataggccctctctttaaaaggcggtcctccccttggagtattatcccccccctcaggacgactcccctcttgtgaaagctcccactaaagtggggccctccaacatgccttgtggagcgcggactgatccttgtcaatgatcaccttacaaggtggtgatcgcttctttccgaggagttatatctctaaaagagacggaaggtttccagggtgattggcacttcatggtacctctccacaatagatctcgttagatcgacaatgttcctctcgtacctgtcctggcgtgatttctgtcttccccctgtttcttcaacgcaataatagctcctcactcattggcctcccttttcaccccctcctgctacagagtacgattcatcatttccccatatattgaccccaaccgaaaacatctatatggtcatcataacagcgctctgccccaggaagttggcgcccgcccagctttcctaaatcttgaacaatttattacccggctatttccccctttatgacccgcacctttttccggacctcaaccccaaaaaatttcattctcgacaccacaa

SEQ ID NO: 546218 - DNA, 161 bp, Homo sapiens
aaaaaaaggaatttttttggggataaataaaaacctgcctgataaaccgtagtcaatgttcggttcctccaaaggttttgctgctgtcaggtgttatgccctccctccctcataactgtattaaaccccttttatatgttaataaacgtggggccttttga

SEQ ID NO: 546219 - DNA, 239 bp, Homo sapiens
tgcggcgccctttattaaatatacagagaaataagtaacacctatagtatcagatattaattttcttcagtgttcaggcaattaatatttagaaagctcttgtccatagagatggctctgggatgtgatagatgattgtatgggatatgaaagcaatggtacgtatcataggagcagatcatacataaattcttagatattaaaacgtggttttgcgtttcagattaggagagaaaaat

SEQ ID NO: 546220 - DNA, 848 bp, Homo sapiens
  misc_feature (294)..(294): n is a, c, g, or t
  misc_feature (515)..(515): n is a, c, g, or t
ggccgaaggaggaggtggaggaggaggcggctcggagagagcgagcagcgagctggctggagttgccgagcgcgagttgagggagccgagtccggccgcgcgccgccgtgcgtccgccctccgccctccgcagaacaggagcccgggccaggggtcctcggtcacgctggtgcgccatggccgatccgctcgagcgttgagggccgcagagggctagccgcagcggcagaagcggatcgacggcgggaggagaggaggcaagcagacgcgcgcgagagtaggggaggcaacggnccgagggacccgtagccgtgcgcagccctgccgctgatgtcgcgccgcttgaaggggcaagccgggcgtgggctgccgtggtgcacggcggtgaagcccaaattggcataagaggggcatcctgcatcacacacgtcagtttagcgttaactaacaacaccaacagaaggcagtttcgttcgattcctattaacgggcccctaaccttagaaggccccagnagtcactacaggggaaacgcgttgactgtagacgcccatcatcgtttagttgaagccttccctaggagatcaaagcccctgcattttgtggtacaatgtctgacactcactttgcctacaatttttaacaaaccctatgagcttgggcactgatgtgcccacagcctggtatatcccagtggattcacggagacatgagggtgggaggattgctagaaagccagagagttcgagaccagccttgggtaaacataggctagaccacagtctctttaaaagtagaataggttacatttagccaggcttgatgactatattgccttgtaagtccca

SEQ ID NO: 546221 - DNA, 502 bp, Homo sapiens
tgtgtgcctggcctgtggcactggaatgaccctgacatgctgctcattgggaactttggtctcagcttagagcaatcccgtggcccagcatggcccatgtgtgactggtgcttggcatgtcccccatcttgatgtccacatgacctgcgtaccatctccgcccagaacatggacattctgcagaatccactcatgatcaaaatcaaccaggatcccttagtgcatccatgtggactgcagtgattcacaacggaacaaatctctcatcgaagtgtacatgcggactctgtccaacaatggctatgcgccttagtcttcttcagctgcaggaccgatatgccttatcgctacccactcctcccttggcccaggctgaacttcacccgggtcttgtgatactatcgaggcccatggacgtctactcatggtgacatcactcagtgtgcctccgacgatgaaaccaacttcacagtgatcatcaacccttcaggggtagtcgatg

SEQ ID NO: 546222 - DNA, 119 bp, Homo sapiens
cctggcttatgaaaggaataacaaaacctccaggatatggtctatgtaagaagactgaacctacaggccgagcacagtggctcacgcctgtaatcccaggactattgggaggctagagg

SEQ ID NO: 546223 - DNA, 491 bp, Homo sapiens
  misc_feature (324)..(324): n is a, c, g, or t
  misc_feature (338)..(338): n is a, c, g, or t
  misc_feature (342)..(342): n is a, c, g, or t
  misc_feature (443)..(443): n is a, c, g, or t
  misc_feature (454)..(454): n is a, c, g, or t
  misc_feature (478)..(478): n is a, c, g, or t
tttccgcggcgatggcgattacacgcattgcctggttgtcacggcgaagttcagccagcagatcaagatcatactgacgggtgtaagggtggctggagacaaataccaccaccagcgtttcgtcatcgaccagcgattttggtccatgacggaatccggttggagaatcataaaaggccgccagtttacccgccgtcagttccagcactttcagcgccgactcgcgtgctgcgccctgtaagccaccgctaccgagataaacgatccgtttccacggtgcgtaaccaaacacaccttcgctgaaatcgcccagtgaggtcaggntcgcctggcaacgntccnccacgtcgcggaaggtttggctgttgatcgtctcaggtgcgaaaccgcgaggcagctggccatcatggtggtaatgctgctggtcatcgcaaagccgcggntcgtgcgtttntgcgggcatcagcagggcaaacgngttatcgctgttg

SEQ ID NO: 546224 - DNA, 152 bp, Homo sapiens
ttggttgagcgcgggatcgatgcccaccgagcgcgcatgtgcgcgtgaagagcgtgatcatcagggccttccagcgcaacagcagcaccagcagcgagacgccgccgatgtgcagcagttgcaccgtgtcggccggggtgatcgccaggatg

SEQ ID NO: 546225 - DNA, 629 bp, Homo sapiens
ggtggtgcaggagctcattgtgctgcccgccgtgtgcagctgccggtccgtggtggccatcccgggcccggcatggcagcgctggcgttgacccctgcacggcagcggcggcgtgcggctgctgctctgggacctggcctgaccatctcgctggggatgtgcgtgcaatggtgcttcagcctgcatgcacggacctggttgctgccaccatgtgccactggcacacgggtgaggcggccacacctgctgctggctgatgttgcgtgcaatgggcttctctgcaggcactcgaatctcggtgacgcaccaagcgcatccatcactgggtgcgaagaaaccctagcgcctgtctcctacttgctgccaagccgcttcagctgagatgctctggcgctcgttgcagcaccatgcgcactgcacacctggggacgcgacccttacgccttgcggggacttgttggcaaggcgcttcagctgtctccttccaaccttgctgcgccaccggcgcacgcactcgggcgagcggccctacgttttgcgaggacttgtggcgagcgcttccgacacaaggtgcagattccgccgccacgagcgccagcttcacggcgcgtgccgctccagggggcctc

SEQ ID NO: 546226 - DNA, 144 bp, Homo sapiens
cacgaggagtaatacagcccaacttgctcatgattgacaaagaggccgaacagtccaataaattgatgacaggtagtgaaactccaaattgagtactgatcaaattgagtccacaggcttgcgctttcacaacggcaaaattag

SEQ ID NO: 546227 - DNA, 328 bp, Homo sapiens
  misc_feature (17)..(17): n is a, c, g, or t
  misc_feature (202)..(202): n is a, c, g, or t
  misc_feature (273)..(273): n is a, c, g, or t
  misc_feature (276)..(276): n is a, c, g, or t
tggccctttttcttggnctggaaagaaagttgggccccctgggagtgtagttttctgttttaaatcccccacccctggctgggctcagtggctcaccccctgtaatcccagctaacttttgtatttttggccaacattgtgaaaccccatctctgccaaaaatacaaaagttagctgggattacaggcatgtgccactacgncggctacccggggaggctgaggcaggagaattgcttgaactcagaaggcggaggctgcagtgagccgagantcngccactgcactccagcctggtcaacagagcaagactccatctcgaaaaaaaa

SEQ ID NO: 546228 - DNA, 262 bp, Homo sapiens
gcggcgcaaatcaggctcaccgcaccctccacccctcaggatcaagcgatcctcctacctcagcctcctgagtagagggagctacgggcacacaccaccatatctggcttattttataatatttctcaccagcaatcgcctctccctcgagcgatgttcttgaaagctgaactacaaccacagtggaaaagccggcgtgtcaggcctgcataagtttgtctgttgtggttttgtaaaaattaattgtgaaatacacatcaca

SEQ ID NO: 546229 - DNA, 272 bp, Homo sapiens
ctccacccgacggggtgctccacccgacggggtgctccacccgacggtgttctccacccgacgtgtcgctccacccgacggtgggctccacccgacgaggagctccacccgacgctgtgcatcttggttttatacattttaggaaggcatgagacatcaatcaaatacatttatgaaatacattgatttggtccagaaaggcggtacaactagaagtggtgttgtcagacaaggtggggggcgttatttttgttgttgatgttttttttttg

SEQ ID NO: 546230 - DNA, 83 bp, Homo sapiens
  misc_feature (34)..(34): n is a, c, g, or t
  misc_feature (37)..(37): n is a, c, g, or t
caccatggcagctgccttggctcggcttggtctncgncctgtcaaacaggttcgggttcagttactgtcccttcgagaaaaac

SEQ ID NO: 546231 - DNA, 209 bp, Homo sapiens
gctcgtaccgctctcgtgagactggtgttacttctgtgagtcattgtctactcagcctgcagctgataccacacagagatagaccaatctactcaggcgcacacccacacgaattccacatgtcacatctctcaccttgggaatgagacataatcatctacttgtaacccctgagggctaagagtggggagaaaattaaggatccaggc

SEQ ID NO: 546232 - DNA, 292 bp, Homo sapiens
aggtgcagagaaaaacaaagtgtaagtgtggggaagtgtaaattagttcaaccatgtggcagagaatatggtgattctgcaaaggatctagaaccagaaataccatatgacccagcaatcccattactgggtatatgtccaaaagaatataaatcattctattataacaatacatgcacatgtatgttcactgcagtactacttacaatagcaaagacatggaatcaaccctaatgcccatcaatcatagactggataaagaaaatgtggtacacatagtgacgttcctcat

SEQ ID NO: 546233 - DNA, 171 bp, Homo sapiens
cgagaccttttctggcgtggactccgctgttacctctcctctgcctctatgctggtttctctgtctccatgttgaatccctgctgtggcggcctcaggcaatctcactgagactgtccagcctgcatgacaggcagcacctcacttgcccttgctgatcgcctggggaccg

SEQ ID NO: 546234 - DNA, 350 bp, Homo sapiens
  misc_feature (175)..(176): n is a, c, g, or t
  misc_feature (281)..(281): n is a, c, g, or t
  misc_feature (290)..(290): n is a, c, g, or t
  misc_feature (294)..(294): n is a, c, g, or t
ctcatgcctctggcaccctgcccagaggtgtgagcccctgcctcacactggctcctcccgcgctgagagaggtcagtgtgagcccttgcctcacaccggcccctcccacgcggacagaggtcagcgtgagccccttgcctcacaccggcccctcccacgctgagagaggtcagcnngagccccttgcctcacaccggcccctcccacgctgagagaggtcagcgtgagccccttgcctcacaccggcccctcccacgctgagagaggtcagcccgagcccntgcctcacnccgncccctcccacgcggacagagacaggcgtagtccgggacagggaaatctaggcacta

SEQ ID NO: 546235 - DNA, 1133 bp, Homo sapiens
gattcactgtctccagcgcctcttctttgagaaccacccgtgacctaccataccgctgccaagggtcaaagcaagttctccttgaaaacagcgctgcattgtgcccccaaaagtaagcctgtcctagagcccctgacacccccacttgggtgctccatcgacctcggagatgctagaagttttacccctgggcgaaggaacacagctccatctcctggagccctctgtgattcgccgaggccgcaggcagtctgagccggtgaaggacccttatgtcatgttcccacaagaacgctacgcctggcattcaagcacgctggcagcccacggcggacactctaccctccagaatctcagccaccagtaccaggctctgcaccccctgcaggacctggagcatgctggaccccacaacactgcaccccctctggccacctcaatcacctgaagaaactcctggacactgctgcactcagccgaggcctctcgagatccaggaaccgcaccacccatgacatacccaacgctccccggaacactcccagagcgcctggacgaccgccgacacccctcacataccacagcccatgcccagcccgcgaacatctccgcacacacgacgcaccgaacgcaccagcgacgagcaatgaccacaagcaacagtaaaccagagggacctaccccccactcccacactacaggcccacgcgaccccacacacaaaccacgcccaccgcaaacagcccccaccaatcccactcacctaaccacacaaacccgcacgcgacacaccaacacatcaaccacccacccaacgaccacaaccgaaacgagcacccaccactacccacacacacccgtcacatatcagcccgctaacacgaaaacccggacacaaaaaacacaaagtgtacaccacaaccagaacacctacccaacgaccacatcaccaacacacagccacagagcccaaccgaaccaaaaacaccaccccccacacagcgagcaaaaaaccagacacagaaaacaacagaccggcaacaagacaaaagatcacaacaaacacacacaagaaacaagaacaccaaacgacggacaaacgcataaaaggcacaacacaaacaaaacagaca

SEQ ID NO: 546236 - DNA, 112 bp, Homo sapiens
gaggatcccgaggagatagcaggagcaatgggggcatcaggtgtatgaacatgcagggtgttttctcgtgtgcaagcagggtttcatgttgttaatgtggtgggtgagtgag

SEQ ID NO: 546237 - DNA, 710 bp, Homo sapiens
ccgtgccgttactcgtatgtcaggcggcggcgcaggcggtggggcggatagcgcagcagggcgccttagcagcagcagcagcagcagcatgcatctcgaggtacccccgccgtcgcagcccccgcgctgtggtgcatgcagcctcgactccctctgctcttcctcccttcgctcgcaccatggctgatcagctgaaccgaagaacagattgctgaagttcacaggaaggccttctcccgtatttgataaacgatggcgactggcatccgatcacaatcaaaggaacttggtaatctgtcatgaggtcacatgggtcagaacccagcagaagctgaatcgcaggatatgatcaatgaagtggatgctgatggtaatgggaactcgattgacttacgcaccggaattttatgagctatgagtggctagaaagaatgaaagatagcagatagtgaagaagaaatccgtgtaggctattccgagtcttggacaagggatggcaatggttatatcagtgcagcagaactacgtcacgtcatgacaaacttaaggagaaaaacgtaacagatgaggaaggtagatgagaatgatcacgagagagcaggatattgatgggagacggactaagtcaactatgcaagaacttcgtacagcatgatgactgcccaaaatgaagacctacttgcaagtcctttttcccccctctagaagaa

SEQ ID NO: 546238 - DNA, 141 bp, Homo sapiens
tgaccaatttactgctgacatgctgggttctgctgaagtagctgaggaagtcaatttaaatggttctggcaaactgctccagattacaggctgtgccagccctggaaaaacaggtacaattgttgttcgtggttctaacaa

SEQ ID NO: 546239 - DNA, 281 bp, Homo sapiens
agttttccatttgggggggggggggggggggtgtgttttattaacccccccaaaacggactgcgttttttttccctttataaaagggatcctgaaatatgccaattaaaatatttattttagttaaaagccgctaaaaagccccccccctccctgaaggtttttaatatgttttgaaacccttaaaaacccccggggaggtctggataatttttaaagggcccccccccctaccaaatggcccctcccccccccgattaaacggggtcttgaaggttttta

SEQ ID NO: 546240 - DNA, 437 bp, Homo sapiens
  misc_feature (7)..(7): n is a, c, g, or t
  misc_feature (79)..(80): n is a, c, g, or t
gctcggnacccatccttccctctttcacgacgtcgccccaccaacatactaggctctagacacacaatttctttcaggnntttttagtcagaggcctcgttctctcccaactctacaccttcacatatgccatcacttttctctggaacactcttcccttcccctcacctgggagaacgctatcttcttctggtctctaggaagctttctttgactccacatgtttggttaagtgccctctttgtgctctcaatagcacactgcagactgaatagcacactgtactgcagagggtcatcttagacgtgtgtttcttccagcagtctataagtgtgtcaggtatgtcccccacattcaacgaatactcttcaggcaggttctcctaacagtcagcaagacataaagtctttgcttttaaggagactgcttgcttacca

SEQ ID NO: 546241 - DNA, 481 bp, Homo sapiens
atcaccgaaagccagtttctaatcatcagacgaaggcaatgagaaccagcaaagagataccatctcacaccagtcagaacagctttggttaaaatgtcaaaaaatgagaaacgtggtgaggctgcagaggaaagcagacacttgtacactgtgggtgaaggtgtaaattaatttagcgtaggcacagtcagttgggagatttctcagagaactaagagtggaactaccattagacccagcaatctgatggctggatatacggccaaaggaaaataaatcattctgccaaaagaacatatgtacctgtatgttcatggtggcaccattcacaatagcaaaaacattgaatcaactcatgtgcccatcagtggcggactagaaaagaaaagaaaatatggtacatagccatcatggaatactatgcacccattaaaaataatgaaataatgtctttgcaacaacatgaatgtagctggagggc

SEQ ID NO: 546242 - DNA, 159 bp, Homo sapiens
ttggctagtggggggttggaggaaagtggggatgataatgggtacaaaaaatagaattaataagacctactatttgacagcacaacagggtgactacagtcaaaaataattttttcgttttgttttatttgagatagagtctcgctctgtcacacaggg

SEQ ID NO: 546243 - DNA, 489 bp, Homo sapiens
  misc_feature (407)..(407): n is a, c, g, or t
aatgtatgtaaaaaacaaacagcaaaagtctccacaaccaggactgatggcttcactgctgaattcttcccaatattaaaaaaactaatacaggtcaggcatggtggctcatgtttgaaattccagcactttgggaggctgagatgggaggattccttgaggccaggagtttgagacaagccaggtaaacatagcaagactttgtctctacaagaaatattttgaaaattagacaggtgtgatggcacatttctgtggtcccagctactcaggaggctgaagtgggagaactgcttgagcccaggagtttgaggttacaatgagccatgatggtgccattatacaccagcctgggcaacagagaaaaagcctgtctcaaaaaataaaaaataaagaactaataaggncgggcagggtggctcatgcctgtaatcccaacactttgggaggccgaggtggggggatcacctgaggtcaggagttcaagac

SEQ ID NO: 546244 - DNA, 437 bp, Homo sapiens
  misc_feature (20)..(20): n is a, c, g, or t
  misc_feature (347)..(347): n is a, c, g, or t
  misc_feature (437)..(437): n is a, c, g, or t
cgaaacgcttatgcccatgntcgtcttaccccttcctgctttgctgtggtatccattagtctgttctcgcgctgctaataaagacatacaaaagactgggtaatttataaaggaaagaggtttaatggactcacatttccacatggctggggaggcctcacaatcatggtggaagatgaaggaagagcaaagggactttttatgtggcggcaggaaagagagcttgtgcagggaaactcccatttataaaactgtcagatctcatgagacttattcactaccatgggaacacgtatgggggaaactgcccccatgattcaattatctccacctggccctgccctttnacacgtgggggttattacaattcaaggtgagatttgggtggggacacagccaaaatatatctggcatatgcaatctgatcaccccttccn

SEQ ID NO: 546245 - DNA, 205 bp, Homo sapiens
ggtgtgaggagtccgtatatgttggattttaggtgtggtgttgagctgacgcttcttatggtggctgctttaggctactatggtgtaatttacactctctctacaaggtaaaactagtgtcaagagctgttctctttgactacgtaattcagggttaggggcctggcattaagttactagtctctgcacgttcggcgggtttccc

SEQ ID NO: 546246 - DNA, 400 bp, Homo sapiens
tatcacgtgtctattgggtgtctgtgtgtgtgtctctgcgcgctatcttttattctccctgtgggcatatgttgtctctttctgtgtgtcacgggccagattttatcagtctatgcacaggtatgtgttagcatttacataggctatagtattcgtttatagtggttcaggtatagtatatttctaattttcgctcatgctctcaggtatctccttactttgtctgtagtgcgtcttttacatgttgatatttcttttgtatattctcttgtttggtcctgtttttatgtgtatatagatatttatagatatatatatagagagatagatagatatagagagatagagagagagagagagagagagagagagagagagagagagagagagagagagagag

SEQ ID NO: 546247 - DNA, 271 bp, Homo sapiens
cggatcctgaacggtctgttacccagtgcggtttatcggcgcctgggataaaaaaagctccctttttcagctatatccggtatagtgcgcgccgtgctttaaccgggccgcgtataggtagcgcaattccccgaagtcagcttcggctgcacgtccgcacagcggactcttccttggacggaatctttttccatttcatttcggtttttcgcaaaatcccccggccgaacaaatgcagcccagggcggacttctttggagtctcaaacact

SEQ ID NO: 546248 - DNA, 596 bp, Homo sapiens
aagatgggtcctgctgtggttatgttaacatcttctaggtaacaccccaaccctaagaagtcatgtgaaatcttacagaagagctgctaacaatcaagggcatgaatactgctttccgaatttcactaatattggccagctccttttagagttgccctggaacagagaaatttacagccaactgtaaatcagaaatgtcagtttgggctagggggccatgatccaatagtggagcaagattaatagaataatctatacgtattttaaagtatactcatctataaagaatagaattaaacttttattgttataatattggcctttggttatttttatcaggttttaaaaataaagatgctgcataatagcaaattattactaaacatttatattggccacaactgtcataaatccagagtaatggaaggaattcctatctttgcctttggattttattttatttttttgtcccgaatttgccgttgaaagaatttttgtgaactttccaatgtgcatagtatatatcaagatgcaataaattcaaaagaaataaaagagaaacagcataagattaccaaaaaggagggacccactcg

SEQ ID NO: 546249 - DNA, 1053 bp, Homo sapiens
  misc_feature (158)..(158): n is a, c, g, or t
  misc_feature (226)..(226): n is a, c, g, or t
  misc_feature (233)..(233): n is a, c, g, or t
ggggcggagtgtggaacttcttctcgggaggcagtgctgggtcctttccaccatggcacctaagaaagcaaagaagagagccgggggcgccaactccaacgtgttctccatgttcgaacagacccaaatccaggaatttacaggaggccttcactatnatggaccagaacagggatggcttcattgacaagaacgatctgagagacacctttgctgcccttgggcnggtgaangtgacaccatgcaccgcacactcgactgcaaactgatcacggaggctccgggctccaattaacctttacctgtgatcctcacaaatgtccgggaggagcacaaccttcacgggcacgcggacccttgagcgaaaccattctcaacgcattcaaagtgtctgaccctgaacggcaaaggggtgctgacaggctgactcacgctccgggaaatgctgaccacgcagcgccggagaggtccccaaggacggagcgcttgacccagattgttcgccgccattccccccctgacgtgacctggcaaccttgcgcactaccaagaaccctggtgcacatcatcacccacggagaagacacggactacggagggggcttcgcttgcttgcgccctggggctccgtctttgcccgagtggttccctggcctcatctcctctcccccgaagtacccgctcttgtcctaccttgtctgtacgccatgtggttgcccctttatccactccatcttctttgccgcctggccgccatcggcactcgacggccgcacatccaaaggtggaatcccaccagaaggcatgttcaataaacgcacgccgcgtaacaacacaaccaacacccaccacccaccacccacccacacacacaacaacaacaacgagcacccaagccacacccccaccgcgcccactaaaccatcaccacccgccgtgccaacgctgctacaaaacgccgcggcacacagtccgtcctgagcccacccgcctcacgcgccgcaccaaccaactgaaccgtcacgcgccccacacggcaccccaccaccagcc

SEQ ID NO: 546250 - DNA, 922 bp, Homo sapiens
agcggagctgcatccctaccccgccctctcctttctccgctcctcctgcttttctacccgtcgtcacccgggagagccggagggggctaagttcgggtggcagcgccgggcgcaacgcaggggtcacggcgacggcggcggcggctgacggctggaagggtaggcttccttcaccgctcgtcctccttccccacaccggagcgggcactcttcgcttcgccatcccccgacccttcaccccgaggactgggcgcctcctccggcgcagctgagggagcgggggccggtctcctgctcggttgtcgagcctccatgtcggataatcagagctggaactcgtcgggctcggaggaggatccagagacggagtctgggccgcctgtggagcgctgcggggtcctcagtaagtggacaaactacattcatgggtggcaggatcgttgggtagttttgaaaaataatgctctgagttactacaaatctgaagatgaaacagagtatggctgcagaggatccatctgtcttagcaaggctgtcatcacacctcacgatttgatgaatgtcgatttgatattagtgtaaatgatagtgtgggtatcttcgtgctcaggatccagatcatagacagcaatggatagatgccattgaacagcacaagactgaatctggatatggatctgaatccagcttgcgtcgacatggctcaatggtgtccctggtgtctggagcaagtggctactctgcaacatccacctcttcattcaagaaaggccacagtttacgtgagaagttggctgaaatggaaacatttagagacatcttatgtagacaagttgacacgctacagaagtactttgatgcctgtgctgatgctgtctctaaggatgaacttcaaagggataaagtggtagaagatgatgaa

SEQ ID NO: 546251 - DNA, 339 bp, Homo sapiens
ggccctttttgcccccagggggcctttgggggcctttgggcctcctttaccggggggggggggggcccaaaaaccaatggggtaaccccctgggggggaggggcccagtccccccgggtgtttttgggggggggtttttaacccaagtttggggggggggggttcgggggggcccccccctgccctttgttcgggaacggggccttgttaatgggggggtccccccccaaaggggtttggggttttgggtttttttcggggtttgccccccccccgcccccggggggggggttaatgaaataattctggttttttttaaaaaaaaacacacaacacaca

SEQ ID NO: 546252 - DNA, 1104 bp, Homo sapiens
gggacggggcggggagtagtgggggagaatgggaggacgaaggggaggggaaaggacaggtgaggggagggtaaatagtgggccaggcaggaagatggcggcggtagcggaggtgtgagtggacgcgggactcagcggccggattttctcttcccttcttttcccttttccttccctatttgaaattggcatcgagggggctaagttcgggtggcagcgccgggcgcaacgcaggggtcacggcgacggcggcggcggctgacggctggaagggtaggcttccttcaccgctcgtcctccttcctcgctccgctcggtgtcaggcgcggcggcggcgcggcgggcggacttcgtccctcctcctgctcccccccacaccggagcgggcactcttcgcttcgccatcccccgacccttcaccccgaggactgggcgcctcctccggcgcagctgagggagcgggggccggtctcctgctcggttgtcgagcctccatgtcggataatcagagctggaactcgtcgggctcggaggaggatccagagacggagtctgggccgcctgtggagcgctgcggggtcctcagtaagtggacaaactacattcatgggtggcaggatcgttgggtagttttgaaaaataatgctctgagttactacaaatctgaagatgaaacagagtatggctgcagaggatccatctgtcttagcaaggctgtcatcacacctcacgatttgatgaatgtcgatttgatattagtgtaaatgatagtgtgggtatcttcgtgctcaggatccagatcatagacagcaatggatagatgccattgaacagcacaagactgaatctggatatggatctgaatccagcttgcgtcgacatggctcaatggtgtccctggtgtctggagcaagtggctactctgcaacatccacctcttcattcaagaaaggccacagtttacgtgagaagttggctgaaatggaaacatttagagacatcttatgtagacaagttgacacgctacagaagtactttgatgcctgtgctgatgctgtctctaaggatgaacttcaaagggataaagtggtagaagatgatgaa

SEQ ID NO: 546253 - DNA, 103 bp, Homo sapiens
ggaagtcagattcgggttatcttgaacagaaacaaactgacattctaggcagacagttgtctatgtggtctgagtggtcagcacgtctgttagtactccttcc

SEQ ID NO: 546254 - DNA, 923 bp, Homo sapiens
gggaagcggcgagtctccatggcggtggtggcgtgcagtgtggcgtggacccgtgttctggaggcgactgctgggcctcctgcctggtctgcccagggctggccgcgctcctggtgcgcctgtgccgaatcgcgctcggttgggaactcgggaccgccgagcgccatggtgggtcctcatggctgttgattgcggtccccttgctgtcctccgagtgttctgcccaggtcgagtttccctcatcattggttggctgtgtccagcaatggttgtgctaccggtttcccagtcggcttcatgacatatcctggtttcgcaccaccttggggatgtctcgcagtttcttcaccgtttggggtgctatctctttgcactccgggagcatgttcaacggagcctcgtgcaatggggcatgtatcacaagttagccaccgaagtgccgggttccgtgatgggccaatcccctcttaccctggggggaccagcgtgcctttgaagacagggagctggtggtacctgcctggagagtactctagcaccaaagtcactcacgagcatgggtttccttcgaatctcacggtctgccattctctttagactgtcctcgcggggctgcacgaaggcggaagaactcccgcgattattgcttgttccgactcctgcggggttccgagacgggggtccgggtctccctcttgccaggccggacttccggggtggtggggtccctcttgcctggagcggcttacgagacatcgcgttccggcacttaaggtgtccccttccggaagcgcctcttgaggggggactggagggacctgcttccccacgcagggcggaggtgttgcgacgggggagccgctttccgcggggccgggatgtctccctgggggcacgggggggggtcaaggggctcgcccctg

SEQ ID NO: 546255 - DNA, 990 bp, Homo sapiens
agcggagctgcatccctaccccgccctctcctttctccgctcctcctgcttttctacccgtcgtcacccgggagagccggagggggctaagttcgggtggcagcgccgggcgcaacgcaggggtcacggcgacggcggcggcggctgacggctggaagggtaggcttccttcaccgctcgtcctccttcctcgctccgctcggtgtcaggcgcggcggcggcgcggcgggcggacttcgtccctcctcctgctcccccccacaccggagcgggcactcttcgcttcgccatcccccgacccttcaccccgaggactgggcgcctcctccggcgcagctgagggagcgggggccggtctcctgctcggttgtcgagcctccatgtcggataatcagagctggaactcgtcgggctcggaggaggatccagagacggagtctgggccgcctgtggagcgctgcggggtcctcagtaagtggacaaactacattcatgggtggcaggatcgttgggtagttttgaaaaataatgctctgagttactacaaatctgaagatgaaacagagtatggctgcagaggatccatctgtcttagcaaggctgtcatcacacctcacgatttgatgaatgtcgatttgatattagtgtaaatgatagtgtgggtatcttcgtgctcaggatccagatcatagacagcaatggatagatgccattgaacagcacaagactgaatctggatatggatctgaatccagcttgcgtcgacatggctcaatggtgtccctggtgtctggagcaagtggctactctgcaacatccacctcttcattcaagaaaggccacagtttacgtgagaagttggctgaaatggaaacatttagagacatcttatgtagacaagttgacacgctacagaagtactttgatgcctgtgctgatgctgtctctaaggatgaacttcaaagggataaagtggtagaagatgatgaa

SEQ ID NO: 546256 - DNA, 680 bp, Homo sapiens
  misc_feature (84)..(84): n is a, c, g, or t
  misc_feature (259)..(259): n is a, c, g, or t
cttggcgggccgaagaacaaacggttggggggtcttgctctttgtagagaaggcagaaaaagcctgccagaagctgcagagcgnctggcggattaatataaagatgcccaatatcgtccaggagccctcatgtacacagtaaaaccggttttgggaagtgtgcggagtccacctcctgttctgtcagccagcgagaaaaacatagagaaggaactgccgcccctcaatgatcaggtccgtcccctttccaacggcatcnaaccggtggacattaagaaagatttcccgaaaaagcagatggacgcgggagcatttccgggtccctccagcctcccttttaacgccccccaaaggaagtgtttgcagggagtgcttaaaaaacaaggagagcccctcgctggccttattaagcagatcaagggcctccaaaaccctttcaggttttggccatccacggttcagagggccttaccaacggcccttgggcaggttttcttgaaatccccgaagaacccataagccactctatagcccatgaactttttttaaaaaaaggggttggcccccccccctcccctttaggtgccaatttttggatgaactaattttgttttttatttttatgaggggatatggccctggtttatttttttgggcaaaaaaggggtttggtcctttga

SEQ ID NO: 546257 - DNA, 914 bp, Homo sapiens
  misc_feature (176)..(176): n is a, c, g, or t
tggaccccccagcctgctggtctggccagtggggctgaaactggcagctggccggcccatttaacacctaccctgattgtgctgacactggaccacccatccctggtggtgcccagggtgtgagcctcatgactgtggcccctaactgggccatcatgcggtggggcctgtgccantcccgccagtcctcctccatcctcgctccctggctccgcacaccgagcccagaggtgccacccatgccctggagtgcttgcgacgcccactgcctcagagccccatgtctggtctccccgatcctagtggagcattggatccgaccccgtctagccgcgagtgcgtagagggcgctggacctgcgcacccgatgcacggcagtcgacctgtacggcggagccgctgctgccgatcaccccgaccgcgactacaggccagacaccggcgtgtccgtctgcgtgccagcaacagcgcccgcgatgggtaggtgcgagcggcctatgtctccacctcgcggtacctccccccacccctgcctctgctcccttctgacaccaaccgtagacggcccgctccgctaggcgcctctctccgcccgtcccgcggccaaccccaccctcctactctggtgcccgctgccccctgcagcctcgcactcctcccgtcgcgccccccgtccccgctcggaccctcgccacccaccacacacagcgcagtggctactcccgccggccgcgtcggccagcagcaacgcccggccgcacggccgcgcgcgtcccgcccgcgcgcccatcgcccggccctcccggcgtgctcccgcgcgccggggggtggggcggctgcgcacggccgcgcccccgcgactgctgctcctggactcgcgctcgacgggctaggcgccgtcgcgcgggtcgcgc

SEQ ID NO: 546258 - DNA, 124 bp, Homo sapiens
gacagttatgcagcagactccactggttcagcccctatgtagctacaacctaaagccttctgacatacactacactctccccacaccttctggttctctggtccccaaaaactacacagcttcc

SEQ ID NO: 546259 - DNA, 555 bp, Homo sapiens
  misc_feature (14)..(14): n is a, c, g, or t
  misc_feature (20)..(20): n is a, c, g, or t
  misc_feature (28)..(28): n is a, c, g, or t
  misc_feature (43)..(43): n is a, c, g, or t
  misc_feature (65)..(65): n is a, c, g, or t
  misc_feature (75)..(75): n is a, c, g, or t
  misc_feature (140)..(140): n is a, c, g, or t
  misc_feature (199)..(199): n is a, c, g, or t
  misc_feature (288)..(288): n is a, c, g, or t
  misc_feature (312)..(312): n is a, c, g, or t
  misc_feature (400)..(400): n is a, c, g, or t
  misc_feature (522)..(522): n is a, c, g, or t
  misc_feature (541)..(541): n is a, c, g, or t
aacgtgggtggggntccctnctgggtgncgaaaatttcccggnattttcccttggggttcttccnggttaggagncttgtaaattcaaattgttgcctgaacaaaccacagggaagcccaaaaaacctgttatattcatncttccgtggaaagggggattcaaaggggacgggctgaaaccaggactttcccccgctgnctgggtgtgggtgacatggtgtatgggccacagttcaaaggaaaagggcaaaaacccaggagcttcaggaaaaaaggtacattcccagncagtggttcatttcgaccaaacgnaaaagttcattacccgttaggaaaaaaggatgggcgtgtttctttattttgaaaggataaatgccagggagttcattagtgaaaccanattataaagggcgaaggatgaaaaggttctgccccattaccagggacccagttaggccaaaaagggagtgtgccagacttgtgggcccccccggattgcatcccaatgctggccagcatttncattgattcttccagtatnatttgtaaaaaaaa

SEQ ID NO: 546260 - DNA, 150 bp, Homo sapiens
aaagagttcctgaggaaaggcttcaggacaatttagatcttaaaagagctaagaagggaaagcctaaaagagaagaccctcaaaggcattcctgcctattggctgattgttttaagaatattacaagatcgggcctctgattcagagtat

SEQ ID NO: 546261 - DNA, 443 bp, Homo sapiens
acattgttgaggcagtgagaaggataggttccctttattgaatgttttttgtggaaacttagtttttcaatgcttcataggcctaaatcagtgtgcactactttggacattatccttggaagaaggaacagcttttcttcttctggcaccacagtgtatctgcatttgaatttctcccattgtgcatgagcacctcatgggccacaaagatgcgctttgagagcaccctgagatgaagtttattttaaaaggaacaacaaccaacaccaccaccagctccacaggggctgtccagtgtacattattctcatcttcttgggttattagtcttgatttttagaacacagtttggaaagtgctaatttagaatattaatgtctttatctttaatttaacttttcattctgtacacataactagcttataaacaattttgtttcaaa

SEQ ID NO: 546262 - DNA, 297 bp, Homo sapiens
  misc_feature (133)..(133): n is a, c, g, or t
  misc_feature (139)..(139): n is a, c, g, or t
  misc_feature (250)..(250): n is a, c, g, or t
tgctgacaggatgcatgtgattgacgtgaatcccttcttctaattcccttccctgtgtaaaactgatgtggcagattgtaggactttgtaatggttgtaaatagttggtttcttgaaaaaaaaaaaaaaaaantatttncaatttatattttaaagatgctgaaggaaatcctgacagtttacaacatggatgacctttgaatacgttgcgctgaaacaggccagtcacgaagggacaatttttgtatgntccctcttgtatgaggtccccagagtagtcagaaagtaggatggtgg

SEQ ID NO: 546263 - DNA, 324 bp, Homo sapiens
  misc_feature (37)..(37): n is a, c, g, or t
ggtgcattgtgtgccttcgtgttactgcttcaccttntcatgtatagggcctaactgtaatacatttaaatgttaagcctccaccccaaggtgtaacatgcatgcatcaggactgccttcatgaatattcatgaatccacctgtagcctgttgaatatgtatacttggccaacccattcaatttaaatttctgtcttactcttccttccctagaagtgcctgcctccggtctttgctggaggttacgctttctagcctgcagaatgaccaccttgtaggctgtaaccctttgtaagaaataaagtatcctttccaaatgcaaaa

SEQ ID NO: 546264 - DNA, 1033 bp, Homo sapiens
gacaagtaggtaggagtcaactaatcccctccttcccctttacccttcccttcccgggagaggctgggagccggcaccaggcagtactgtggccgctgaggactcagctaccgactgtagtcaggttgcggagactccaggccgattaccagggcgagtactcctgattgtgacatcacattcatcccctgttgcgatggagcttgtccactgggaaggaatactcagacggagaatagccaacaagatgggttcactgggagaatctcttcagatggcacctgagtggagggcaatcagggggttggagacttgatgaacatggaacctgacccccaacacttgtgaagggccctggagtaacagtgatgagacctggggtatgatgtaacccgtttcaagggccggattgtagacgcaagcatctatcgtcctgccctatatagcagtggaagtccttgggaagagacagccagcaacagaccagcttatcgatacagccatgcaactctcacactatgctgtgcacgctgacacagcttaataggatcattgctcctgcaagccattagccagaccagagacacgcggtatcatcctggcgcaaagatatcacggaagaagctcacgattacccaggcactacattgtccaacatgattctctgcaaagcatgatccaccaagtggtgctctcaacagcagacatgtcacgtgaaccgaagagaagtgacggaagccatttgacgaccgatagctcggacatgcggagccaggtgacaggatgagattgactgtacaaagctgagtacgagtgtgtgcgtgacggatggcaccgtgatgccaccaaagaaaggagaacacgaaggatgtactgtaaagtgggacggagatcccagagaagccacaaactgattaactgatcagacacaagacataatgagaacatgacaacagtgggaaacaagtaaatgaagaaccctaatgagtagatgtacaagaggatctacacatgtttcagcccatctttaaag

SEQ ID NO: 546265 - DNA, 143 bp, Homo sapiens
  misc_feature (47)..(47): n is a, c, g, or t
tgacactttaagcacatggtactctggggctgtgcagtggcattatnttgaattcctaagctggcagttcttgtgcgcgacagcaggtttgtgtgtggttgatctgcttcacttgagagaatgaagagaaagatagcagagac

SEQ ID NO: 546266 - DNA, 371 bp, Homo sapiens
gctcgaccgcacagagagaccgttttttccttcagcgcctggggagcagccaggttccatgagttaaatgcagatctgaaccaagctgggattggggtacacactctcctctactgaaaagtagctagggattccaactaggtgagaaggagagtggggcagagcagagccagacaaggactgatcacctggaaaaagcctgccatcaaaggtcttggcaaatgctgggtgcagtggctcactcctgtaataccagcactttgcggggctgagacgggtggactacttgaggcggggagttcgagtccggcctgggcaacatggcggaaccacatctctactagaaatacaaaaattagctaggcatgcta

SEQ ID NO: 546267 - DNA, 392 bp, Homo sapiens
ttccaatttctccacgttatcaccaacacttagtattttccattttttgagaatagccatcctaatagatgtgaataggtatctcatggttttgatttgcatttctttaatgattagtgacgcagagcatcttgtcatgtgcttaagtcatctgtatatcttttttggagaaatgtctattcaagtcctttgctcatttcttaattggatttttttgtttgtttttattattgagttgtaggtatattctctatatattctgaatattaactacttaccagatatatgatttgcaaatatttttcatttattctatgaattgctttttcactctgctggtagtgttttttgatgcacagaagtttttaattttgatgaagtctaatttgccc

SEQ ID NO: 546268 - DNA, 288 bp, Homo sapiens
  misc_feature (78)..(78): n is a, c, g, or t
  misc_feature (135)..(135): n is a, c, g, or t
  misc_feature (158)..(158): n is a, c, g, or t
  misc_feature (166)..(166): n is a, c, g, or t
  misc_feature (177)..(177): n is a, c, g, or t
  misc_feature (180)..(180): n is a, c, g, or t
  misc_feature (186)..(186): n is a, c, g, or t
  misc_feature (223)..(223): n is a, c, g, or t
  misc_feature (225)..(225): n is a, c, g, or t
tactactactaactcgagaattctggatcctcggcccgggccgagtccacatcattcctgtctcacacccagcaggtntgggccacctggtcccctgggaaccaaaaaacggccttcaacctcccaaactctagnattcctcaagggcatcaaattcnccttccancctgggctganaanactganctgggatccttctgaggtgcaaccatgccaggcctanancacggttctcaacctgaggatccaaattcctcgattatatatactccacccggggattcccgg

SEQ ID NO: 546269 - DNA, 954 bp, Homo sapiens
ctccctgcttcgctctctctgggttctctcccccccagtggtgtgtgttgtccttcctcctctcttgtctctcttgtcttcatgtcgcgcgtttgtatatttttcctcttcttctcttgtttgatccttctctctcctctgctgtcgtcttgtcctgtcgcttcttgttcttctgttcattctttcccttcctgctcctctggtgtgtttttcttgtcccgctcatgctctcgtgtggtcctcgctcctcgcttgccaccttcttgttcttcttccttccgcttcgtgtggtgcgccgctccgcttctagtttcctatcgtcgtcttttcgttctttagtagtgtgtctcggttggtgctcacctgtgttctgctctgtttgtgtatgcctccttctcgtcacgggttgtgctcacccctttgttggtttttctcctctctctcttcgtagatgtttttttctttgcctcttttttgtttttttcgtctgtcggtacggttcttttttggcatgacgctccttttacgtgcaaccgtcaggatctccttggtcgactccatctcacgccggtgttgaccgttctcttgtattgtcctccggtccgatccaggacttccggccctctcgccttgtctcgcgctgacgtgattacgactttctcctctggttgttgcagtctactgaccacgtttaggtcgctagggtgtagggtgtacagcttattgggcccccacgattttggttctgttcttgcgcacgtgcctggtgctcggtctcgggagatcttccccgctgcactcctccgctccgtcgttctattgtctgtttccgtttctcatagatcttcgtctccctccctgcccaccaacaaaagaaacaaaaagaatatcaaaacagaaataaagataaatataacaaacaaaaagaacaaatcattgaatacaaaaaaaata

SEQ ID NO: 546270 - DNA, 247 bp, Homo sapiens
ggatttgctggtgcagtacaactaggcttaatagggacatggttatgttttattcctcagtttatacatttgattattgtaccaagcagagtacctttgaaattttttttcatttaaagaatatggatcttggctcaggcctgtaatcccagcaaatttggaggccaaggcaaggggatcacaaggtgaagagatcaagaccatcctggccaatacagtgaaacgctgtcactactaaaaatccaaa

SEQ ID NO: 546271 - DNA, 636 bp, Homo sapiens
tcccgcctttacgtatgggtgcacagcctttaggtaggcacgctactgcatattacctgtctgcaggctattcagagtactccaaccattaaggattactcacgtctttcctaagacaacgcacacgtacaacttcatgcacagctaggcgtctcaggacagatacttctcgctacttaagttgactcactcgagaaagtcctgagaacccgcaatgagaagcatgcagacagctccaacagcatcaacgtgctcaagctatctgctgaacgacactagctgtgcctgcaactgtaacagaccatgtatgcctcgcagagtgcacagacgtgactgttgtcatacgtccaagtatagctatagaggtagacgcgacattctgagcgcgagtctgaaaggatgctaaatggcgcatttggacctgttgagttccagatacagatccattgtcgctaatttacgactgctaatacgctaacaccatgtgctcatcaagcttggttttaactagggtcacatgcacatgacctgctggatagtactgctaagggcctagtctccatgtctgatgagcattagcccattgatcaacaggaaggactagggagggtggcaacttaaggctagagtgcacgg

SEQ ID NO: 546272 - DNA, 152 bp, Homo sapiens
aacccatatgattatagaaaaatcatgtggcagctacactagagatgtccagcccaaggctatgggccgttgctcccgttccttttcccccccaaatcccaatattgactccacagaagcgtataggcttagagaagttctagctacaagac

SEQ ID NO: 546273 - DNA, 737 bp, Homo sapiens
gggggggggggggttttcccaaaattacagttttgggggtgtgatccaggatgaccatttcccatttttaaaaaaaggtgtcccagttctgttttgataccggtctccttttcccgtgaagttcgggcaccccatgggttgacacttgcaaaaaatttgggattgatctcacccattggacaattctaaacaaatctcctacaagtcttgggtgtgggaatatctcccattggtaatacctctgattaagttaaggataatgggtctctagaatggaattctcaacagagtcagggcactcatttaaaattaatcctggtatttccagaacaattggtctggtggtgggaaacctttttatcctctatagatccatccctaattgcttaatggtggtccttgggttatatcagattcaaattacagaaataaatgggtggtggggataatggtggtccctaaaatggctccattaaatttttatttacagtttggaaaaagagggaccgtgtaagagaaatggggcacaagtaatttttttgtcaaagacttcttttagtaataaaccagcgagtggggcaaaactcggggtctcatgcgtcacacggaatagttctctaaacagctacgttaaatataggggtggggaaaacaggctagcccttccaatttaattgaatttttccattagtggtggcaagcctataacctgtgttattacaaagaaacccttgttt

SEQ ID NO: 546274 - DNA, 527 bp, Homo sapiens
  misc_feature (226)..(226): n is a, c, g, or t
tagagacgtatcctaacagagtgctggatacaggctgagcactgtgccggctatttttttattttttgctgctgagaaggggatattggtctggtctggaaaaggatgggggaaagaaagatgatggattataaccttgggtgtaggtacactggtcagtattatttattcatcaacacaaagtgtatgccagtccctggaggatgcaggacaggagctcagagcnctatcttggacgcaaaaaacatttggatatcagggccctggagagacaggactaaagaaaatgctttggaggattcagagagaggggaatctagggaagcactgcctggacagaggaagcatctgtagctcagactgggaaacatacacgagtatggaactgcggagtggcggacagggagggcatcacgtaagccgatggactgtggggatgctcagagtgggtttgaggcaatgtgggtggattcatttgactgatgggaccagagagtaggtcaggaggtcttgagaattagactggt

SEQ ID NO: 546275 - DNA, 1311 bp, Homo sapiens
tgggagcagccgagactttcaacagtttcctgcgctcgggcacaacaggagacacagtcaggtccccacagagcgaagtagtccttgtgaagtgctgctcagcaacgcggcagaaagttctaggttcaacgtgtctaatcttacagatcagcactgaggatagtcctggcaggcctgctagcttgcctacagcctggcactctttccacgcactgtacctctgcacttggcactacctctctagcctcctacttctatagccttcgcatgcaacacatacgtagcgactggcacgccctctttcgttctctgctacccgcgcacacgcttgccaacgcacgcttctgcagcctgcccttctactgctgctcctgctccaccccagcccgtctcgcggacgctctatagtacgcttctacagacctctgctgctttatagcgcacacgcagtttcactctggcgcacctcctggcccttacttgctactggcaccgaacctgcctcccgttgcgcccgcacacccctgcggcctctgcgccccgtgccttccccttggcctttctacttgccttccacgtaaccgtgccttcttccccgcatcttcctctcgcacgcgtccgcttgcggcttgcgctcctccttttcgtcgcctcgctacctctattgggtttctccctccgctccaaccccgctgccccccgaccttcgcatacatttcttacctggtcccccagcccagctagcgcaggctccttgcccaccgcccaccggggcagatttttcgcgttgtcaacccacctttgggttcgcccgcggatcgcccttgtccgccccctccttcattgggtccttacttttggccggcgcttttggcactcgcttcctggtcgcctcccgccccttgtatctcttctccccccacgccacacactcgcgcccccccggctctccctgcccgccctggcgcggccggcggccgcgtccccaccccccgccgcaccccctccatcgcccctgcccgtcttttcttgctccctcgctcctggccccctccgcctgttcctcctcggctgcaaacgggctcctctttcccggcggcgtttacccgccgcgttcatgcctcccttggccttgtcccggcggctttctcccttcctttccttgctgctctttttgccccccacatgggtatcctctctgctactgctagggctcaccgccccctcggcttcccttagccttgattgtctgtgccccttgggacatgctcgctgcctctcctccgtctgcctccctcactctctcgcccc

SEQ ID NO: 546276 - DNA, 330 bp, Homo sapiens
gctcttggctaattttggtatgtagggtagagatgggggtttcaccagtgtgggtcagggctgggtctcaaactcctgacctcaggtgatccacctgcctcggcctcccaaagttctgggattacaggcgtgagccactgcgcccagcctgacaaaagtgattttaaagaaacattaaggtgatgattatgtatacaatggattagaaattatatcaactcctaatttatttataatgtagcatagtgtcatggcctaaaggtctggtatcctgtgttcttataaacaatatccaagtgaatgtactaaataaaatgggtctggtgaaaa

SEQ ID NO: 546277 - DNA, 225 bp, Homo sapiens
cccggccgccgctacgtgacctactctacaagcgcacccccgctcgcctaatatctgtctgcagcacgtcgccgctagagatatgcagcgccagagccgaggagaacccccgctccctgatgaggacctgtccaaactcttcaaaccaccacagcacgactgccaggatggactacgctgctcattgcaggccagataaacacttactgccagaacatcaaggag

SEQ ID NO: 546278 - DNA, 996 bp, Homo sapiens
gtaatcagaaaatactgccatcgatcattatttagaagcccttaaaggtcagagacagatcaccccttcgcacaaactgacaagtgctctgaagaaatgtctaccaagagacttggtacaatgctttagatgtgcagagtttaagtgccctagggttgtttacaagctggaaggagaaaagaggaagcgtgtgagtactatgagaaggcacaaaagatagatccagaaaatgcagaattcctgactgctctctgtgagctccgactttccatttaaatacatactctaggaaattagctctaagtttttcccttcatttgggttctcctgttgttgtatttaaacattatttaaaatcccttgtttatttatagagctaatatttattgaatagttattgtgtaccaagcattgttgctcaaatactttatatgcattatgatgaatcttgtgcggtatacttgacttgtttaccttttattaattaaaatacgtataatccatgagaaatagccaatattctagctatgtacctttctaaaaagtggtatggcattagatctggcttgttatctcatgctcttagaattctcatattattatagtcactatatccctaggtaaaccttgataacttagatcagagaatactcttccaggagtaccacaacttacattatgaacagcatcagcctctttctctgtggttcgcctggcaacaccacaggcaatcttccctcacgcatggctggacttgaagaagcaacatcaacacataaacctatagtcaccgtaacatagtcgaggtaggccccagacatactcaacaagtggcacctaggagtatcagaaacatcagagacacaagaagccaaaaagacgaacgggacatacgcaagcaggcatgaaaatactcaacaaaatccagaacaagacttatatgcacaatacaggagagaaacgcgacactaaacgagaaaacgaaaacgcaaagac

SEQ ID NO: 546279 - DNA, 633 bp, Homo sapiens
  misc_feature (14)..(14): n is a, c, g, or t
aggctgtacggtcngagtttaggatcttctctgctcttctcatcctttatcgctctgctgctcttgcagtgtgacgagtccgaatcctcttcccacccagctcggcctttcttcttgtgcctgcgctgcttctatttctccttcggccgcgcgccactgctgcacatagctggtgtcggtgccgctctttaaacccccaagtcgttcccgcatgctatggcccaggccgcttgggtatttctgctcaatgtaaacacagtccctctttaaaaattccgccgaaaaagaggagacgctttacccgactcttatggtgccgattatctcacggacgaactttctgtagccaagtatacaactatcccaggagggcctaggaaacagtgctgttatagagagcagttcgacttcaacgctgagccaccttgtgaacctagctgatgataggggggttccatctcccaatttgtccatttgttgcatattctaaggacccagacataggcttgatggcccgtatcttgtctttgcctggtcttatgacttacggcttgtggaactacggtgcgatgaaaggctggattcgatgatgcaaactactccgttggcctgttggatgaaggaacaaacctg

SEQ ID NO: 546280 - DNA, 869 bp, Homo sapiens
  misc_feature (639)..(639): n is a, c, g, or t
gtcgatgtttcctgcttcaacagtgcttggacggaacccggtcgctcgttccccagcccggcacgaacgcccatagtccagaccctccgtcactctcttcgacctgcaccctcggcattgccacacttatatggtggcgccctcggcgcagccggcatcctagccagaccgcagctaggacaacccgtccgtccgcctgttcggtgcaatctcgcgttatgcgtcgtactggtcatggatctgacaccgcgggtacgaaccatcctcaattgtgctgagctcaagacagcgtatcgcagacatggcacgttcatgacggacccgaagcatgattccagcccaggagtcacatgcgtggcaggcctcgatagcaggccctaccctatcgctttgtactcttagtccaggtgctcatctaacttatcgtatgtagcacacgacggacatgagtcgtaggcatgtatgaaaggacacgtttagctcgataagtaactcttgcgttccgaaccaaagtcatcgattgagggaggaagggagacagtgcttcgaaagacaaactgatagacaagccttggtatcgaatccgaaggcgaaggatgtgacagcaaatccgttcacgttcacgtgtagtagtcgaanggaacaccgagaacgtgttgaatgagcgtgggtagaatgcggggcttgaatgcgagatggaggtcgtagcacttgagctattgttgtgcatatagccattggtgatgttcgatcgtctacatactggggagagttggcatctaacatgtggttaatcttgaggagaaaaagtgaacgacctagttgagtgttgagtccatttgagagacgaacactgtaccctgattgag

SEQ ID NO: 546281 - DNA, 503 bp, Homo sapiens
  misc_feature (354)..(354): n is a, c, g, or t
  misc_feature (365)..(365): n is a, c, g, or t
  misc_feature (416)..(416): n is a, c, g, or t
  misc_feature (443)..(443): n is a, c, g, or t
  misc_feature (489)..(489): n is a, c, g, or t
  misc_feature (502)..(502): n is a, c, g, or t
gacctcctgaacctgggggattgaggctgcagtgagctgtgatcatgccactgcactccagcctgcgtgacagagtcagaccctgtctcaaaagaaacccaaaaaccaaaaataaataaataaataaaaggttccaaaaaaagtttggtctgttagttatgatttatatttaatatgctagttataatttagggagttttatttccttttttttgattgtttttggggtgtgggtaagaacttgtactcagggtttgaatcctagcttccatacatactaattatgtaactttagggaagttatttacagttgagataataatagtattatagtagtacctcctgggaattgtncataaaagatncaaatgaggattattacatcttaacatgttttaacagtgttctgttacaancaattctttttagtttaatatttaccnatttatggattattatattaaattatatttatgggggttttctttnccctaacttaccnt

SEQ ID NO: 546282 - DNA, 239 bp, Homo sapiens
ctggcatccacgcatgggcgactgtcgtaagccccctctccagctgtactactgcgccctgtgctgcttcccatagcaggctcagctatcgtacgtctactttggacgctctgtggattcgcgggctctcggtttgcggaaattccttgacttctcactttgacagcagaccactaattgccttgataagatatctaaaggctttcaaggatctcctgacagtctccttcacctctcca

SEQ ID NO: 546283 - DNA, 94 bp, Homo sapiens
agtttccctttttaatgggcccccccttttcccccaaaaaagcgggggggtgttttttaaaaaaggaaggggaaataaaaaaatttccaagcta

SEQ ID NO: 546284 - DNA, 356 bp, Homo sapiens
caatggaagagataaaagagactggaaggtataaagtccagctgtacttcatacagtgctgttggagataaagagctcttgtgtgtgtagctggatgtacccatcaatcagccaagaataatgtgcaggtgggtaagaggctagcatgaaaggagaggctgaggtacaccaacatagacggaaataggtgtaatgaggagagccatggtaggggtcgtctgagaccataaaggacatacaggatagactaggagtcgctgtgatacaacacttaatacgtactggataccacaatcatagggtacctaacatcatttagtcccatgacacataaataattaactctgcttgatcta

SEQ ID NO: 546285 - DNA, 137 bp, Homo sapiens
tcaatggcatagacgtgaaatgcaggtacacggccgacgagaaagagggtgctgagtatctgcgtaaccctactaattacccggtgttcattcgatttgggcggccccgcctcaattctaaatgagaaagcttacgc

SEQ ID NO: 546286 - DNA, 1003 bp, Homo sapiens
tatggcacatgtttgtcactaatgttgggacaaacgcctcggtgggaacactgggtctcgtgtgttcacgtacggaggccgtgtttgtgaccgcgcgcccgttgtgtaacaaacgcggcggggtgtgacacaacctgctgggtgtgtggttgtctcccgcggccgaagccctcgagttgtaacccgcgacgtgatgttgtggtgcggcagaggagcaccgttttccaaaaggggggacgacgcggctccccgcgtggcaagatggcgcccacagggtggtcacgccgtgtgacagggtgccgccaatgctaccgttgctgtcgattaggcccccccccaaattctccggccccgttgttcactcgggccaaaattattctcccccggggcgaacatatagtattataccgggccgcaaacacccccgcgagcttgaagctgccgaggtgcgggcatgggctacggcggcgtataccctacaagaagcgaacgggttgtatttcacacagggtagcgatggctggacggcaggaacaaggtcgaggcgcccctccaggggaggagccgcctcccgccgaagtatggcgacacaggggaagacacaaaaatagggggacaccacaaatccgtgaggacacacaccccttgggggacgccaaacgcccccacagcgatcctgtggagtatcatattgcacaccactggaggccatcacgtgcggaacacattataaacgggagtccccgcgctatcttctcgcgattcctacaatagttacagtgcccacgtgcggtggtgaatgtccatagattgttgttcccgcgacacctcacctcgagtattcttcgcgcctaattcgcgcccccatagttcatccgcccacaattgcatcaagagcccattcttgccgagaggaaaattatacctacacaagggcactcgctgcatccccccaacgaagcccctcccggggggaccccaaattttttgaaccccaaaacaa

SEQ ID NO: 546287 - DNA, 606 bp, Homo sapiens
aggctgaaggtcaagggggctccaggccatagcatgggccctgcctgaagcctggataggaagctgggattttctcttcaatacgcagtaagtttcttgccccgtggttgccttatctgtagctaggggcaaagacaataagagagctttctcggcggaggttgcagtgagctgagattgagccattgcactccagcctgggcaacaagaacaagacaccgtctcaaaaaaaaaaatttttttttttgggcagagcttggtaacacacgcctgtaatcccagcacttgggaaggccaaggcaggcagttcacctgaggtcaggagttcgagaccagcctggccaacttgttgaaaccccatctgtactaaaattacaaaatttagccatgcttggtgttgtgtgcctgtggtcacagctactcaggaagctgaggcaggagagtcgcttgaccctgggaggtggagtttgcagtgagtgagctgagattacgccattgctttccagcctgggtaccagagtgagactccgtcttaaaaaacaattttttaatgggtgtggctttaactcagcttataatatgggacttcagccgggatccgagctc

SEQ ID NO: 546288 - DNA, 1193 bp, Homo sapiens
  misc_feature (1192)..(1192): n is a, c, g, or t
tggaaatggatgtctcgctctggttgcccaggctgggattggcaattggctcgatctcaacccactggcaacctccgcctccggggttcgagcgatactatctgcctacagcctacctgagtagctggggaccactggtgcgcgccaccagtgcccaacataatttgggatattttaaaaaacagggatttctccagtgttgtggctcaggcgtggttctcaagcatcccaaccgtcagggtgactcagcccgcgtttcggcctcccaaaggtgtttgagaattccagtggtggtgagccaacgggtgcgcgtggccggaataattctataaacctcttacgcctttacgtttgggggactgcacaactgtgaacgtgcgtccagaaagcgaaagcatacctcaaagccaagggctactcccaagcgggacaatctgggtcccagatctcctccagggaagttaagacggggctataaacacagcgggagagagcacgaaaggggctcacggaggcataccggggcccgaggggtacaccgggggaataaagaaggggggaccgagagtggggattaaaaagtcaagtataaggaacttaaaaacaccagggatcccccccatgacccaggcaaatgcggcacagactcccgacggacgataatactggggaccagggagaaacccaagcggcaaaacataggggcgaaaacaacaggttaaggatttccccaaacagcgagaaggagaaccaataatggtgtccacaacgaggggccaaaaaaatataactaaacacggaaaagtgcccaccaagggagacaaagacaaagagaaccccaaggggggaacagaggaagacacaaacagcaaaagacaaggtcgccccacattaggggagaaggacaatcccaagatacactcgacaacgcagaaaggtttgacacccccgagggtgtccagcgggataaaaaagtgtgacaagggatttactgccaggaatcgatagcaaagacacagaggacccaagtgcaaaaaggagagagagcaccacacagaggcggaccgaagaaaaagtggtcgagaggacaagagagacccggagtgaatatacacagaaaaagacaccgatagaaagacagagccagagcacgacgagacgaagcaagcagtgtctgccctgcctcgtcccng

SEQ ID NO: 546289 - DNA, 121 bp, Homo sapiens
tgttcatacaccgtatcccccattctcctcctatccctcaagccccgatcatcattaccgggcttttcctcttataagataaaaagaaaagaaagataagaaaaaagagacagaaaaaaac

SEQ ID NO: 546290 - DNA, 156 bp, Homo sapiens
gacacttaactgacatttaaccaggtatctggggcatccggtggcccagtcaagtggacacataaaaataaccatcattaccaggtttcttaagagaagcctagaaatctatattttaatatagaatttttccaagttttcaatgggctgtagcaa

SEQ ID NO: 546291 - DNA, 202 bp, Homo sapiens
  misc_feature (94)..(94): n is a, c, g, or t
  misc_feature (97)..(97): n is a, c, g, or t
  misc_feature (136)..(136): n is a, c, g, or t
  misc_feature (139)..(139): n is a, c, g, or t
  misc_feature (172)..(172): n is a, c, g, or t
gaggatccaccaaccatagaaaggaaacaacacttggagtgaacccgacccaagccactacaccccagcctaaccgacaggtgctagactaatngtnaaaaacaaccggaaaatagacccggacgaagatcaaagnttntcaatccaaacattttagggggaccaagacccngggatcaaaaacaaggtccaccacacccaa

SEQ ID NO: 546292 - DNA, 1686 bp, Homo sapiens
  misc_feature (256)..(256): n is a, c, g, or t
  misc_feature (299)..(299): n is a, c, g, or t
  misc_feature (319)..(319): n is a, c, g, or t
  misc_feature (366)..(366): n is a, c, g, or t
  misc_feature (470)..(470): n is a, c, g, or t
  misc_feature (541)..(541): n is a, c, g, or t
  misc_feature (554)..(554): n is a, c, g, or t
  misc_feature (600)..(600): n is a, c, g, or t
  misc_feature (683)..(683): n is a, c, g, or t
  misc_feature (799)..(799): n is a, c, g, or t
cacagacacgtgatcagcgaaatccgagacctctagcactacgtcgtatatctcaagtctcgccgtacacacatgtcctcgccttatcgttactgagcgaatacgacgagccgcagcatgagagctagagtcgactacctatagtagtcatttcgttcgaaaggcaaccacgctaatacccaggcctctggacgtactgagtacaccgcggactgacgcgtgacacgcatcctcaccagaccggcccctggatacncggcgaggctgcgaccaattgaacgtgtccgctgactgttgcntgacctacctcgcgtatacntaagtgggcttgctcgctgtccgcctcgtgaccgtcctagtacggcncatcgtcaaagtttctgagcacccttcgaccagaccaacactcttgatggggcttaactttaaatttctagtcccctacactttgacatcaatcctacatgcanatcgtgcgctcctaagagtgagacttgactctcaattagcatcacacttgatcgctccaaagcgcaatctntatgagatttgantaggagcttgcaatcttttgcacaaacgaaattaatcgcactcttnttagttccgctacagacgagagataccgccctcgtctctactgttgagcgatcaccgagaacttgcttcgaccggctctcccntagaaacggcgcctaattgtctccccgaaaggctcctccccaatcaaagcctcgagcgctcgaggaacctatggtaacggtgctgtcaccaagcgaatgttgaacacttccttaanaacactacccgtaaaccgccgttgcgcgtgagtttgggtggacttgaacagttgagcggcgcccaatttcaagagaaacgtgcgggaatgaacgttgccttaaagtacccggctaccctgtggagacacaaagaaccaaaggctagtagaagccctttatagcgccccctttataactcctgttggttaagcgtggagttgccccccgggtggaatgtgggcaacggggcgcacttcaaagaattgtgtaattcccacgagtggggggcgagacaacagcaattaccttatgcaaccgtttttacaccgcgaagggaaatactacaacattggccaacgctcctctaagagggccactgtctccgcagttccagatatttccggcgccagatataaccttccattttcacaggatgccccacccgctagcggaaaagatgtcacaaggcgccgcctatcccggtttaaacggataaaaaaccacggcaccaatgttggcgtaccaatttttccaaaaggagcctcttgcggcgtttggaaacaagggctgttgttccgaacccccggtggcaaggaccccacggcgccagagatgtatacggttcacaactttcacaagtgcctcggaccccccaacatcgggggggccgttttttacaatttccccttccacagttattaccttaaatatacgcgttgtggtcgcgcttatagagcggagacaaacactctctctatgagcgtttcatccggaacaacaggggggccactatcaacacaagaggtcggcgccagagtgttcaatacaaagtttccccgatcgttctcgtcagaagcggggaggaatttccaacaacacggtacatttcgcgcagctaagatatagg

SEQ ID NO: 546293 - DNA, 133 bp, Homo sapiens
aatgaatctataaaacatctagctagagagggtactatggtacagagtatgtactatcatgagcgaccgatcatagtgccacttcacacgagtgtgcgtctgatcgattcatccactattcgtaagttatgca

SEQ ID NO: 546294 - DNA, 777 bp, Homo sapiens
ttttttttgaatctatgaaggggagtttattaggagaattgactctcgatcacaaggtgaggtcccacaatagctgaggagcaaggaagccagtccaagtcccagaacctcggcaagtctgctctttccaacttctgcctgctttattctggctcgtgatggcagctgaagagatggtgcctacccagattaagggcgggtcggcctcccccagcccactgactcaagtgttcatctcctttggcaacaccctcacagacacacccaggatcaatactttgcatccttcaattaaattgacactcagtattaaccttgacagcgcccaaggaggggagggccagacccagcgcacagttccagtttctgccacggaaacactgaccatgtgttgctcttaaggtcggagctccagggcggcgtttccccgggtttctgcgtttataagtgatgttagtatctggtttgcgtgtgcacaggtgacgtctcaaaaggatatggtggctgttttctgtcttcatataagttagaagcttgctttctctctctctggaaaacttgagtaatgtggaatgatctattccctgaaggtttgagtattcacctaagaattgcctttgctgagcacatgaggtgtgctgtgtgcttttcctaatttattattatgaatctgccttagtgttgtgtgcctgaggatttttctgtgtttctgggaaccattatggtaactgagagttttctagaaagccaccatgtttggtacctgtttttctccga

SEQ ID NO: 546295 - DNA, 254 bp, Homo sapiens
cctcggtacctaatcacaggtcgtatcctaagcggaggagcgacatcagcttgtttgtaccaaggtcactctgccctttggcagagtggatggtggtgggtaagaatggagataggaagttactgcaataatacagatggggaaaatgggcttactctagtttcggggtggccaagcttttttgtaaagggccaaatggtaagtatcttagactttcaggccatcctgtccctgtagcaacgacattgtgatga

SEQ ID NO: 546296 - DNA, 739 bp, Homo sapiens
  misc_feature (4)..(4): n is a, c, g, or t
  misc_feature (43)..(43): n is a, c, g, or t
  misc_feature (48)..(48): n is a, c, g, or t
  misc_feature (54)..(54): n is a, c, g, or t
  misc_feature (126)..(126): n is a, c, g, or t
  misc_feature (156)..(156): n is a, c, g, or t
  misc_feature (158)..(158): n is a, c, g, or t
  misc_feature (168)..(168): n is a, c, g, or t
  misc_feature (182)..(182): n is a, c, g, or t
  misc_feature (185)..(185): n is a, c, g, or t
  misc_feature (188)..(188): n is a, c, g, or t
  misc_feature (192)..(192): n is a, c, g, or t
  misc_feature (209)..(209): n is a, c, g, or t
  misc_feature (217)..(217): n is a, c, g, or t
  misc_feature (225)..(225): n is a, c, g, or t
  misc_feature (233)..(233): n is a, c, g, or t
  misc_feature (247)..(247): n is a, c, g, or t
  misc_feature (292)..(292): n is a, c, g, or t
  misc_feature (304)..(304): n is a, c, g, or t
  misc_feature (319)..(319): n is a, c, g, or t
  misc_feature (349)..(349): n is a, c, g, or t
  misc_feature (359)..(359): n is a, c, g, or t
  misc_feature (377)..(377): n is a, c, g, or t
  misc_feature (380)..(380): n is a, c, g, or t
  misc_feature (403)..(403): n is a, c, g, or t
  misc_feature (405)..(405): n is a, c, g, or t
  misc_feature (419)..(419): n is a, c, g, or t
  misc_feature (422)..(422): n is a, c, g, or t
  misc_feature (439)..(439): n is a, c, g, or t
  misc_feature (445)..(445): n is a, c, g, or t
  misc_feature (456)..(456): n is a, c, g, or t
  misc_feature (470)..(470): n is a, c, g, or t
  misc_feature (472)..(472): n is a, c, g, or t
  misc_feature (482)..(482): n is a, c, g, or t
  misc_feature (489)..(489): n is a, c, g, or t
  misc_feature (497)..(497): n is a, c, g, or t
  misc_feature (511)..(511): n is a, c, g, or t
  misc_feature (561)..(561): n is a, c, g, or t
tgtnaaaaaaaacatttattttgcattttaaacaaaacaaccnaaaanccccancatgacttgacagtaacccaggggtttacagtgtgtccaacccaacagtgtggttctgggactgggtatccncacaaacacaggcaggagtttggaggaaanangggggcacancaggagtgtatctnaanccnttcncaaaaaaaaaaaagtanagcattcngagttgcngaaaaccngtgcaaatggggcntctgaaacattgtactgtgagcccccagggaaagggaggaaaaanatgttgaaaaanaaggaggcaatttcntgaggcaggggacgaggagggaggcttacnatttttaatncccccacccccagtcccnganaatcaaaggagaccatgtccaancntgaatcaattcccngtncaaaaaaaggtgccaanaccccngggacaaaacnctcaaaatatcatncnggtcattccngagttcnatcccccncaccatattaaaanatgggggttggtggggggtggggaggtcagaaggtagtggcttttattcngtggaagtaaaaaacttagttcacattaagcactgataaaacccaatgactgggcccacagatctgttgagaggtctctagtagggaccaagagggggaggtccagaacatcctctgcctgaggtgcaacaggtgtagaaagtctgggaggaggtgagttttaaagtaatgggaaaaa

SEQ ID NO: 546297 - DNA, 335 bp, Homo sapiens
tggacccggcgcatgtttagtgccgctggtgcacagcccctgagggctgtgcatggatctctgccttttcatccacccacagtgagctgggcagtgcctgagccagcagcccattggtgggaaggccaggcatggccaggaggtgtggccatgggaccaggaggggcaaggtcttacttcatgcggatcttgcgggccatggctcgaagctcgtcttcccgctcctgcagcagacagggctatgaggacgtggccagtgccagcacccacccgtcaccccagccctccctctcccacttcacctgccgctcatgctcctgatttccaccttgcca

SEQ ID NO: 546298 - DNA, 717 bp, Homo sapiens
ctgacccatgcgttcgcgatccacgcgtccgcggaacgcgtgagtcgaccgatgcgtacgcgacccagtgcgtgcgatctaggtggcaccctaataatatcatttaccagtgaccctatttacatgcttttgctgcgtcaacaacagtgccttatgaggaaacaagcacgtatcgcccatacgtttatacaagatgccgtgggcatctagaacatgagattgacacgaacattgggctcgtactgtctatcatcgagcatactagggacgcacaaggcgaatcgtacggctggtaaccttggtctgcggtggagctcctaggagccacctgcgtttcgaacctactgcgttgtatgctgcgtcgtcaactatgaggggtgttcttgcgacataggacggatgccgctgatgccccgtagtcctaagtagattggtcgatgcacggcatactgagtatgcgagcctggaagctagctatgagcgcggggtcgcgcacgtgacgtaagtggggccctacgaaatgtggcaagacttggtccttggggttgcctacagcccacaagggggtggtgatgtgggtactactgatataccgtatccacggctgaacaacggaagattgcggcttggtccgtggggcgccatcgcacgaggagaccgtgcgccatcctgttgacaaggtgagcagttgaaagaacggcgcgagtacattctccg

SEQ ID NO: 546299 - DNA, 127 bp, Homo sapiens
acgaattgagctggtaccccaccttatgcgtgggcctcggtttctgtctctccccactgaccctgacctctccctcggttcgtctctccccacggagtttggtgtctcccttgcgtttctggttgtc

SEQ ID NO: 546300 - DNA, 232 bp, Homo sapiens
agccatcgaggacatcatagggggattccacctccttgaggatcgctacagccattgggcacgtccaggctgcccgtgtgcgctcagcgtgctgcaggcatctgctcgcaccactgggctgaacgccgtcctgagggcctgaggaatgccctgccaccagcttcagccagcttctcattcttcctccgctctttttgcgaactgggccgacccgaatcggtggcctgtatga

SEQ ID NO: 546301 - DNA, 2678 bp, Homo sapiens
  misc_feature (268)..(268): n is a, c, g, or t
  misc_feature (351)..(351): n is a, c, g, or t
  misc_feature (428)..(428): n is a, c, g, or t
  misc_feature (486)..(486): n is a, c, g, or t
  misc_feature (1206)..(1206): n is a, c, g, or t
  misc_feature (1246)..(1246): n is a, c, g, or t
  misc_feature (1352)..(1352): n is a, c, g, or t
  misc_feature (1361)..(1361): n is a, c, g, or t
  misc_feature (1393)..(1393): n is a, c, g, or t
  misc_feature (1395)..(1395): n is a, c, g, or t
  misc_feature (1679)..(1679): n is a, c, g, or t
aagcgggggtctctgagtgaatttataataactccttccttccttagcatagggttttcaaaatttgatttataattcctatttccagtaaatattgttcatttgtccacatctctccctatgatatgttgctggaggtaagaatttctttcatattcctattttttttttccccatagactaggctcatagaatttaaacaagcaaattttcctgagctttttcttgccaaatgaaagaagactggtaaattctcatagagaggttngtgtagttcttggctcttcctggggttaatgtgcttatattcacagtggcaaattggtctcagactttaatttatttattttngatttgaatttctctttaaaagtatcaatttaaaaggtaactagaattattctttctcattttcaaaagtgattttngcattattaaatttccctgccattgtaatgccatttcacgcagaaaaaaagtcagccngtaattaagaaaaaaagtgatggagattaagtagtattttggcttatttttaggactcatcatgagaagacacagttcctttaatcaggaaattaatatccataattttcactcaaaattgcagtatgtaaagcagattctcaaaaactctcctgaacacttatttatatatatgtttttatataagtaaaatttttctcatatttttatacgatatgcacacacacacatacatgcacatactacttactacatgttctgtacttgtactttgtaccatgcatattcaaatgtttatatacataagtttattataacataaacagtaaaagtaatgaatactgtttaaaataactaatatagtattttttaatttttgtggggatggattctcaaatacttgtgattttaaaagattctaaagctaaaacacaacttgattttaaaaagaatgattctccttacacaattataaatatttgcagtaaatattttccttataatactgttttgaccccatttaaaaagtattagattatattcctttgatccaatgttagaagagtaaagatttgtcctagggaagatggctgacttcggttcccaacatgcgtatgcatttagactgtagctcctcagccctgtggacacaaaattggacagcttattaggttacgttagcaatgcatgacggtttctccacactaagatattcacgtngaaacagatttcctgttcgtcttatgtgtctggtaaaatngtttccccaattacaattgacatatcaatagagggttaacaagagtataattacataacagaattcctcatgaactgtaatcagtctacaggaaaatcattatttnatcttgatntgcagatgaatatactgctaagaaagggagcnantctgacctttgttaaagttgatctttgtaattgaggtataaggtatgaaaagataaaaaaccgaaggccagagaatcaggaaatgaaagatagtatggactgaaggtaacaatattttaatgttatgcaatatagccagagaaatattaaaaattagttgtttgctgtgcataggtggatctcgcaggaagctaatgaaacctaagcttcagtgcctctcacttagacatgttccattcgaggtcctgaacctaactttgtattaggaattctgtactaatttngttgaagaagaccagcaaagttgtgtacacttctacccccacaaaatctgcattgtccatgtgagtaaagtaaaataattcctgttatttttttctgttagaaataagtatggaggatatgtttttaaaaatttatgagttaattgacaatatccatatataacaagtgactttctcacaatatatatgatgtgatatatagggagatagtttcactttcatcatattttatacgttgattctgaactatagaaaaataataaatgggattttaattatagctcttagttgggaaagaaatatagagagatgtgggatttgaatgcccatgaaagacattttattttacttgaatatattcttgcttcactttaccctccataatatgttgtacattagtgctgatcaagtttacagagttacattttgctttcctaaccattcagtcaggaattaaaatatggcattgtataacaactgggaagaagctcatagtggatataaattagagtagataatgggtcaccttgatagcctctgtttacattacttgtatatgggcaaaataattattacctatacgtgtatttaagcttaattttcatataaacagtatttttaatctatgttaaaatagataatatctaaaagtgtgatctctaggtagtccttagtttattagtactgtacttcaaaaagatttttaaataggtccggcacggtggctcatgcctgtaatcccagcactttgggaggctgaggcgggcgaatcacctgaggtcaggagttcgagatcagcctggccaacatggtgaaaccctgtctcaactaaaaatataaaaattagccgggcgtggtggcaggcgcctgtaatcccagctactcgggaggctgaggcaggagaatcacttgaacccaaggggcagaagctgcagttagccaagatcgcatcattgcactccagcctaggggacaagagcgcgagacttcatctcaaaa

SEQ ID NO: 546302 - DNA, 642 bp, Homo sapiens
  misc_feature (628)..(628): n is a, c, g, or t
ggagcagtttgttcaatgatttaatatcatgttctttcattaggtaaaattccaaaacctttatattatcatttatttttaccctgataatgcatgagtagatcagccctgtgaaaatgatagtctatcaaaatgcattttacctaggttgtttccatgaaaaatgagaggtaaccaaatagcactcggaaaatggtgaaaggctgctgagaactgacagccagggaatgttcagaatccaaggagctgagattttcagagatttgataaatctctccagccacaggatgccagtattgaaccactttttgtttgatagcatttctctcttgagcactgctgtctggtccactgctgtaagataatctagaaggagaagttgctgtgacttcaacaggtactcatggtcaaaatcaattactctgcagaagccttcattacgatgaaagtcattcaaatccttatttagaagagtaaagatttgtcctagggaagatggctgacttcggttcccaacatgcgtatgcatttagactgtagctcctcagccctgaaatgttattgccagataatcttctatgcatttttcgtgatatagtgatttcgttaaaccaataagcgatatctnccgtgacaaaaacc

SEQ ID NO: 546303 - DNA, 1183 bp, Homo sapiens
actgctgtaaataactgcagatttttaaacaatcttttatgttaattttataaaaataaaactttcaactagttaaaaaaaaaaaaaaaaaaaaaaaaaaaaaaaaaaaaaaaaaaaaaaaaaaaaaaaaaaaaaaaaaaaaaaaaaaaaaaaaaaaaaaaaaaaagagggggagaaaaagaaagaaagagatcattacactgacacaacacacccctactaatctagagcatgacatctgcacaccaaagagcgtccgccacaatccaagaacgacataccagcgtgaggacaccacagactaagacacaaacaacaaacaaacaagaacaagacaactggggggaacgaccacacacacagaggcaaaaacacaaagagtgagacaacaccaacacaacgacaacaaaaaccacccacagggcaacatacaagcaccaacaccagacaccacaagcgagggcagacagacacaaccacttaaagccagcccgcgacaaactaacactgccgcacaccaaccaacgaagacactccaacgaacacccaccacaactcacaacagacaagacagaccacgaaaaacaacaaaacacacagaccaccacacgcaacacacaacacagagccaacaccaaacgaagaccacgcaccaacccaaccaacaaccaccaacaaacaacacaaaccaagcacccacacacgccgcccacaagtaacacgtagagaaaaggcatcgcgccacactcgacgcagcggagagaccagaccagcccgcacagacacgcacggcaccgaacacgcccaaacagacaacaccaaagacacgagcaaagaacgagcacgccgccagcgcacgagcccaaccagcagccagagccggagcaaccgacgacaaaacgccgacacaagccacacgcgccagcagacgacagacaacgacaacaagagacaaagacaaacagcaacagccagagagcagaagcgcagccacgatcaaaccagcgacggcagacaccacaaacgaggcagcaatagcaaactgccagtgcgaagcaaccaaccagggacctccacagacgaacagacatgcaatacgaccggcacacagacgaagagagcaagccacagccgagcaggcacaccaaccacgaagctgcccaagcgacacagaagcccaaaa

SEQ ID NO: 546304 - DNA, 2140 bp, Homo sapiens
  misc_feature (668)..(668): n is a, c, g, or t
  misc_feature (708)..(708): n is a, c, g, or t
  misc_feature (814)..(814): n is a, c, g, or t
  misc_feature (823)..(823): n is a, c, g, or t
  misc_feature (855)..(855): n is a, c, g, or t
  misc_feature (857)..(857): n is a, c, g, or t
  misc_feature (1141)..(1141): n is a, c, g, or t
ggagcagtttgttcaatgatttaatatcatgttctttcattaggtaaaattccaaaacctttatattatcatttatttttaccctgataatgcatgagtagatcagccctgtgaaaatgatagtctatcaaaatgcattttacctaggttgtttccatgaaaaatgagaggtaaccaaatagcactcggaaaatggtgaaaggctgctgagaactgacagccagggaatgttcagaatccaaggagctgagattttcagagatttgataaatctctccagccacaggatgccagtattgaaccactttttgtttgatagcatttctctcttgagcactgctgtctggtccactgctgtaagataatctagaaggagaagttgctgtgacttcaacaggtactcatggtcaaaatcaattactctgcagaagccttcattacgatgaaagtcattcaaatccttataaatggttagctgaaagtagaccttattcttgtccttctttagaagagtaaagatttgtcctagggaagatggctgacttcggttcccaacatgcgtatgcatttagactgtagctcctcagccctgtggacacaaaattggacagcttattaggttacgttagcaatgcatgacggtttctccacactaagatattcacgtngaaacagatttcctgttcgtcttatgtgtctggtaaaatngtttccccaattacaattgacatatcaatagagggttaacaagagtataattacataacagaattcctcatgaactgtaatcagtctacaggaaaatcattatttnatcttgatntgcagatgaatatactgctaagaaagggagcnantctgacctttgttaaagttgatctttgtaattgaggtataaggtatgaaaagataaaaaaccgaaggccagagaatcaggaaatgaaagatagtatggactgaaggtaacaatattttaatgttatgcaatatagccagagaaatattaaaaattagttgtttgctgtgcataggtggatctcgcaggaagctaatgaaacctaagcttcagtgcctctcacttagacatgttccattcgaggtcctgaacctaactttgtattaggaattctgtactaatttngttgaagaagaccagcaaagttgtgtacacttctacccccacaaaatctgcattgtccatgtgagtaaagtaaaataattcctgttatttttttctgttagaaataagtatggaggatatgtttttaaaaatttatgagttaattgacaatatccatatataacaagtgactttctcacaatatatatgatgtgatatatagggagatagtttcactttcatcatattttatacgttgattctgaactatagaaaaataataaatgggattttaattatagctcttagttgggaaagaaatatagagagatgtgggatttgaatgcccatgaaagacattttattttacttgaatatattcttgcttcactttaccctccataatatgttgtacattagtgctgatcaagtttacagagttacattttgctttcctaaccattcagtcaggaattaaaatatggcattgtataacaactgggaagaagctcatagtggatataaattagagtagataatgggtcaccttgatagcctctgtttacattacttgtatatgggcaaaataattattacctatacgtgtatttaagcttaattttcatataaacagtatttttaatctatgttaaaatagataatatctaaaagtgtgatctctaggtagtccttagtttattagtactgtacttcaaaaagatttttaaataggtccggcacggtggctcatgcctgtaatcccagcactttgggaggctgaggcgggcgaatcacctgaggtcaggagttcgagatcagcctggccaacatggtgaaaccctgtctcaactaaaaatataaaaattagccgggcgtggtggcaggcgcctgtaatcccagctactcgggaggctgaggcaggagaatcacttgaacccaaggggcagaagctgcagttagccaagatcgcatcattgcactccagcctaggggacaagagcgcgagacttcatctcaaaa

SEQ ID NO: 546305 - DNA, 2287 bp, Homo sapiens
  misc_feature (815)..(815): n is a, c, g, or t
  misc_feature (855)..(855): n is a, c, g, or t
  misc_feature (961)..(961): n is a, c, g, or t
  misc_feature (970)..(970): n is a, c, g, or t
  misc_feature (1002)..(1002): n is a, c, g, or t
  misc_feature (1004)..(1004): n is a, c, g, or t
  misc_feature (1288)..(1288): n is a, c, g, or t
ggagcagtttgttcaatgatttaatatcatgttctttcattaggtaaaattccaaaacctttatattatcatttatttttaccctgataatgcatgagtagatcagccctgtgaaaatgatagtctatcaaaatgcattttacctaggttgtttccatgaaaaatgagaggtaaccaaatagcactcggaaaatggtgaaaggctgctgagaactgacagccagggaatgttcagaatccaaggagctgagattttcagagatttgataaatctctccagccacaggatgccagtattgaaccactttttgtttgatagcatttctctcttgagcactgctgtctggtccactgctgtaagataatctagaaggagaagttgctgtgacttcaacaggtactcatggtcaaaatcaattactctgcagaagccttcattacgatgaaagtcattcaaatccttattggggttaggagaaaagactagacaattactatgtggtcattctctacaacatatgttagcacggcaaagaaccttcaaattgaagactgagattttctgtatatatgggttttgtaaagatggttttacacactatagatgtctatactgtgaaaagtgttttcaattcttattcttgtccttctttagaagagtaaagatttgtcctagggaagatggctgacttcggttcccaacatgcgtatgcatttagactgtagctcctcagccctgtggacacaaaattggacagcttattaggttacgttagcaatgcatgacggtttctccacactaagatattcacgtngaaacagatttcctgttcgtcttatgtgtctggtaaaatngtttccccaattacaattgacatatcaatagagggttaacaagagtataattacataacagaattcctcatgaactgtaatcagtctacaggaaaatcattatttnatcttgatntgcagatgaatatactgctaagaaagggagcnantctgacctttgttaaagttgatctttgtaattgaggtataaggtatgaaaagataaaaaaccgaaggccagagaatcaggaaatgaaagatagtatggactgaaggtaacaatattttaatgttatgcaatatagccagagaaatattaaaaattagttgtttgctgtgcataggtggatctcgcaggaagctaatgaaacctaagcttcagtgcctctcacttagacatgttccattcgaggtcctgaacctaactttgtattaggaattctgtactaatttngttgaagaagaccagcaaagttgtgtacacttctacccccacaaaatctgcattgtccatgtgagtaaagtaaaataattcctgttatttttttctgttagaaataagtatggaggatatgtttttaaaaatttatgagttaattgacaatatccatatataacaagtgactttctcacaatatatatgatgtgatatatagggagatagtttcactttcatcatattttatacgttgattctgaactatagaaaaataataaatgggattttaattatagctcttagttgggaaagaaatatagagagatgtgggatttgaatgcccatgaaagacattttattttacttgaatatattcttgcttcactttaccctccataatatgttgtacattagtgctgatcaagtttacagagttacattttgctttcctaaccattcagtcaggaattaaaatatggcattgtataacaactgggaagaagctcatagtggatataaattagagtagataatgggtcaccttgatagcctctgtttacattacttgtatatgggcaaaataattattacctatacgtgtatttaagcttaattttcatataaacagtatttttaatctatgttaaaatagataatatctaaaagtgtgatctctaggtagtccttagtttattagtactgtacttcaaaaagatttttaaataggtccggcacggtggctcatgcctgtaatcccagcactttgggaggctgaggcgggcgaatcacctgaggtcaggagttcgagatcagcctggccaacatggtgaaaccctgtctcaactaaaaatataaaaattagccgggcgtggtggcaggcgcctgtaatcccagctactcgggaggctgaggcaggagaatcacttgaacccaaggggcagaagctgcagttagccaagatcgcatcattgcactccagcctaggggacaagagcgcgagacttcatctcaaaa

SEQ ID NO: 546306 - DNA, 671 bp, Homo sapiens
agctctcgcgagcacgggccagcttccttcaaaatgtctactggtgtcacgaaatcctgtgcaagctcagcttgcgtagggtgatctaagctctacagcccccagaagtgcatatgggtctgtcaaagcctcatacctaaccttctgtatgctcgatgcggggatgcatttagtagaacaaagttttgaaacgagctcgatcgaaggacctagaaggtgtcggatggagtgtcaccatttggtcatactatgtgtagactcgaggacacggagacgatagtgcatcagaagaaccaggaatatctgcactatctgacactaccgagaagcaaggaccaaaatacggagacttgctatcaggcacgtgtaattacagtcttaatctgggtccacctgagaagagggatgatcttaggagccatatatggggacagcatggatctagtatgatgggctgctgagggtgaaagatttccatgaaggggcctggtggaactgaggaggtactctctccattgagcatcatgctggctctcagaaggcaatcaggaggctgagggaaattaatagagttctagaaggaaatgtagaagactgatctggagtaaggagagttattgcagagagatctggtgacttcgaaaaggtgatggttggtcgggaaagggtaa

SEQ ID NO: 546307 - DNA, 988 bp, Homo sapiens
  misc_feature (135)..(135): n is a, c, g, or t
  misc_feature (139)..(139): n is a, c, g, or t
gctgaaggcagtaagctcggctcacagtcgcaggagagttctggggtacacgggcaaaggggcttgagaaggcccggagcgaaccgaagaagaagcaactgtgccccggagaagagaagctcgcccattccagantggnacccagttcagtgaagatggcagggccaatgtttgctctgagtccaacaatcgcgcctcgtgggtgttcctacccaatcgttatcatcactttcttcggtaggatgatcccggccattagtgtttccatccgtgctgcagagcgaaaagaagctcacccaggaaacaggtatcttgaccagtcaaagtcctatttcgaagcagaagtcctcagggaaaaaggtggaaaaatagttttcccaaaacgagtcttttctcttggacacgcgaaaattattattccaagcaaccccagaggatggatttttcaaaaaaaagctaaccggaaggtagtgccaccttttctccatatgactgatccatactattgtttgaccagacttgagtgacaggggaatgtaaacaaagtgtcctccctatgattcttatggggcatggactcaacaatgacaattctcaagggcttggtcacaaccaaggtcccattttccagtgaccctccgtattaaaggcctatgttacacgcaaggaatcggaggctactcacatttaggatgcctccgtgggtggagttctgcatccgtgctacttcctccagtgtattttgcggctcggagcatttacttctctgatttgtggcgcaagataatggcgtagccatcacgatgattgccgagagatacggggacaccatggcatgcccgagaacaaaacgaacgttcagaaagggggacgctggacggggcaacccgggcaattggtacaaaagctctggggagaccctatgagggggctacaggagaaccctttttacagcggcattcaacggggcacccactggggccacaag

SEQ ID NO: 546308 - DNA, 2126 bp, Homo sapiens
  misc_feature (654)..(654): n is a, c, g, or t
  misc_feature (694)..(694): n is a, c, g, or t
  misc_feature (800)..(800): n is a, c, g, or t
  misc_feature (809)..(809): n is a, c, g, or t
  misc_feature (841)..(841): n is a, c, g, or t
  misc_feature (843)..(843): n is a, c, g, or t
  misc_feature (1127)..(1127): n is a, c, g, or t
tgcagactcattaacacacctttatttaaagaaagagtaccgcgggttgattatccttaaagccgaaagactttttcaacatggatgtagacatgacagttgaatgccacatactctgcagctttccccggcaagcaggaagcttccttaaagacatacttgcctctcttgagcactgctgtctggtccactgctgtaagataatctagaaggagaagttgctgtgacttcaacaggtactcatggtcaaaatcaattactctgcagaagccttcattacgatgaaagtcattcaaatccttattggggttaggagaaaagactagacaattactatgtggtcattctctacaacatatgttagcacggcaaagaaccttcaaattgaagactgagattttctgtatatatgggttttgtaaagatggttttacacactatagatgtctatactgtgaaaagtgttttcaattcttattcttgtccttctttagaagagtaaagatttgtcctagggaagatggctgacttcggttcccaacatgcgtatgcatttagactgtagctcctcagccctgtggacacaaaattggacagcttattaggttacgttagcaatgcatgacggtttctccacactaagatattcacgtngaaacagatttcctgttcgtcttatgtgtctggtaaaatngtttccccaattacaattgacatatcaatagagggttaacaagagtataattacataacagaattcctcatgaactgtaatcagtctacaggaaaatcattatttnatcttgatntgcagatgaatatactgctaagaaagggagcnantctgacctttgttaaagttgatctttgtaattgaggtataaggtatgaaaagataaaaaaccgaaggccagagaatcaggaaatgaaagatagtatggactgaaggtaacaatattttaatgttatgcaatatagccagagaaatattaaaaattagttgtttgctgtgcataggtggatctcgcaggaagctaatgaaacctaagcttcagtgcctctcacttagacatgttccattcgaggtcctgaacctaactttgtattaggaattctgtactaatttngttgaagaagaccagcaaagttgtgtacacttctacccccacaaaatctgcattgtccatgtgagtaaagtaaaataattcctgttatttttttctgttagaaataagtatggaggatatgtttttaaaaatttatgagttaattgacaatatccatatataacaagtgactttctcacaatatatatgatgtgatatatagggagatagtttcactttcatcatattttatacgttgattctgaactatagaaaaataataaatgggattttaattatagctcttagttgggaaagaaatatagagagatgtgggatttgaatgcccatgaaagacattttattttacttgaatatattcttgcttcactttaccctccataatatgttgtacattagtgctgatcaagtttacagagttacattttgctttcctaaccattcagtcaggaattaaaatatggcattgtataacaactgggaagaagctcatagtggatataaattagagtagataatgggtcaccttgatagcctctgtttacattacttgtatatgggcaaaataattattacctatacgtgtatttaagcttaattttcatataaacagtatttttaatctatgttaaaatagataatatctaaaagtgtgatctctaggtagtccttagtttattagtactgtacttcaaaaagatttttaaataggtccggcacggtggctcatgcctgtaatcccagcactttgggaggctgaggcgggcgaatcacctgaggtcaggagttcgagatcagcctggccaacatggtgaaaccctgtctcaactaaaaatataaaaattagccgggcgtggtggcaggcgcctgtaatcccagctactcgggaggctgaggcaggagaatcacttgaacccaaggggcagaagctgcagttagccaagatcgcatcattgcactccagcctaggggacaagagcgcgagacttcatctcaaaa

SEQ ID NO: 546309 - DNA, 419 bp, Homo sapiens
  misc_feature (35)..(35): n is a, c, g, or t
  misc_feature (38)..(38): n is a, c, g, or t
  misc_feature (43)..(43): n is a, c, g, or t
  misc_feature (82)..(82): n is a, c, g, or t
  misc_feature (171)..(171): n is a, c, g, or t
  misc_feature (173)..(173): n is a, c, g, or t
  misc_feature (209)..(210): n is a, c, g, or t
  misc_feature (236)..(236): n is a, c, g, or t
  misc_feature (246)..(246): n is a, c, g, or t
  misc_feature (294)..(294): n is a, c, g, or t
  misc_feature (339)..(340): n is a, c, g, or t
  misc_feature (380)..(380): n is a, c, g, or t
gtgagccaccatgcgcggcgtggactctttaatantanccatnctgactcggatgagatggtatgccattgtgggtttgatntgcatttctctaatgatcacacgatattgggctttttttcatatgcttggtggccgcatgtgtgtcttcttttgaagtgtctgtgtatngnctttggccactttctaatgagaattttttttcttgnnaatttggttaaggtcattatcagtgntggacattanaactttgtcacatgcattggtgcaacaggtttctcctattctgtaagntggctgtgcactctgttgacaggttcttctgctgtgcagaagctnnaagaagaaaggttcgtgggtctgtgtctgtgtcttttggnattctcagacttatgtaggcattcatatatggtgattgg

SEQ ID NO: 546310 - DNA, 911 bp, Homo sapiens
gcccgggtcgagcatgtagcggctgctggcggcggggctcccggggcgggccgggcgggccgcgggagccgcacgcggcgatatggaacgaggagggcaagaacgggcaagaagcctggaattgtctcgccatttaaacgagtattcctacacaaggtgacaaacgagtagagataacgaaacgcccactgacgacacggtgacagagacggcgacccatctgacacacatgatgagtgattgtcattgcctgagacgcagtcgagccagacagactgctgagcgactatattgagaacggaggtcacactatcctacggtcagttaaacgtccaataccagtgatacactgaatccactccaagtaaggactgacaatcctgacataatcactagaccaatgccaacagagagcccaccagcttccgggacactctgactcaacaaagcacagatgctcgctgctccagccctgatactgccaatacccacggtccaagccttggcctgcgacagggacggagcgacggcatactcatccctcagcggctgcccatccatgaccatccgaccgacggcacacaccatactgatcccgagacacatgaccgcacgcaaaacccagcgaagcgcaccctgcacagaccaagaccccaggcaacccagggaaatcctacaccccaaagaccaaacaaaccagcggtgacggcacacacggctccgccagaaccggaccatccaactcgccacccgacacccccatcgacacagagcaggaatgatgccacgagggcacacccggagaaacggagacatagctaggccatggggacaatcccacagagccagccaacaagcaacccaacaggcccgctcgccagacacgaacacaccacgcatagccaagcata

SEQ ID NO: 546311 - DNA, 235 bp, Homo sapiens
catcaagtcacaagcacaaacattcgtattttttgctacacttaattagataaaagaaaacacctaggctgggtgcgacggctcacacctataatcttggttgttatttgggaggccaacgctgggaaatatcacttgaggccaggagttcgaggccagcgtggccaacatggcaaaaccccttctctactaaaaataaaaaaattagccaggcatggtggtgggcgcctgtaat

SEQ ID NO: 546312 - DNA, 136 bp, Homo sapiens
attttaatggtcctgcgtataacctaccagctatattagcattatatctctgcacatagcaattacgaatataattcgaatagagcaaatcatattgcaatctacttatccactttttagcagttaatataacatt

SEQ ID NO: 546313 - DNA, 1469 bp, Homo sapiens
cgcgggaaggaggggtctctggtgacgcgcgggggcgcgttgtgccgatcttattttgtggaggtgcccccactgtgggttggcgggacgcggtgtgttgttgcacgctgtgtggctcgttttttccccctgttccaccggggggttgcagaacaaggttttccctgggcgcaagcacccgtgttggcgttagtcgccttcctttgttgggggggggccccccctatagtgccccccccactcttggtatcacttgcttaggtgctctacagtaggatcgtcctttgctcttcccctgctggttgtgctggtgaaacgcaagatgtgcggggatacacctggcgggtgttttcccccccgccgtggggggccacccacggggcttttcccccgcgtgttcgccctagagacaacttggtacggcccccgccgcgcacactcatcgggatctgcgtgtgttgcctccgtgtgtttacagcctcgggttgagagccggggtgtcctgttgtgagccagggctcctctctttcttctgtgaagacggccccctctcttgagtgagacattagtggacgagtcctttttgtcttcgcaccgtgtgtgtttaggtggggggagcccgctcttgtctcacccacggattattccccccgcacgcgtgtttctctgaagctccctctagggcacattagggcgccccacgggccacacgacactcctctcccacggggggttttagtccccctcggggagtaagcgccaccctcttggggccccacacttagacaaccagccctcggattgtctcggataagaaccctctcgcggggccccccgtggggcgcccacacagatggctgcgctctctcccgctggtgtgcaccccgcgggtgtctcactcactcgaccccctgcgcgcctctcacacacgacgtgtgagaggggcgcgttatctcccatagagagaaatattctctcttgtgagcacatctactttttcttctcacggagtactttctctcgtgtgttaggggcccacatctgatccgggggagattcccacaggggaaaagattgttcaccacacccccccaagccaccgatggctctgtgatagataccccccagagaaccccctcgtgtgcggatttttctgtgagaaccacgcttgtaggcccacattggtgatttatcacttcccactcgcggagaaagaaactgttgaatttcttccacatatgctgaagccacgcaccacgctataggaggagtatttgaggagtaccctctcacggaggacttccccggagagattcaccgcccccctgatatggggttgaaatggagggtcccctttgacccctaatgctggggcgatcccggtttggatggaaatacagaggatttccgaaaatttctttttgtagattctttaatttttttgccaaaacccaagggatattaatata

SEQ ID NO: 546314 - DNA, 294 bp, Homo sapiens
  misc_feature (141)..(141): n is a, c, g, or t
aggatcttatatataatgtaggatcagcagcagatagattcacccatctgtgctctcagctgtcacaggcctgaagggaggaggtggcaatggcagcccaaccagccctccactctgggtaccagaggaaggcgcaggcgntggttacacagcccatcacctggaggtgatggagcgcaaccccagccctgcctggaggccctggtgagcttgcccagcactgttccaacccctccctgaacccacagggcagagccaggggtggtccaatggcctgagacgaggggacagggg

SEQ ID NO: 546315 - DNA, 199 bp, Homo sapiens
actagtccacggttggcggggaagcctcacaatcacggtggaaggcaaggaggagcaagtcatgtcttacatgtatggcagcaggcaaagagagagaacttgtgcaggggaacccctctttttaaaaccatcagatctcgtgagagccaaccgtggactagtactagtccacggttggctccaggaagggaggcgggga

SEQ ID NO: 546316 - DNA, 273 bp, Homo sapiens
gcgagttcaggaagagtactgggaagatttagaggaaagggaagtggaggcttaaaccttggtaatttctttgcaagccgtaagggctacagtcgaaaagggtttgaccgccttagcactcagggcagtgaccacgacaaagaggatgatggagtgattcagaggaggagtattcagcactctgcttcgctcgaacttcctctcctgcaaaccagctttgattagattagtaagatttacccgcatgtcagatgcttccttagcacgttaagg

SEQ ID NO: 546317 - DNA, 878 bp, Homo sapiens
gccgggcgcggtggctcacgcctgtaatcccaaaatgctgggattacaggcatgaactgctgtacccggctggttgttgcattttaatgtactgagccaagcaccaggctccaggacactgctactaggtggcctgtccttggtctgatgcaggcgcttccaggaagaatgggctgcagctctgtgcagcctgcctgtgctgggccaatgtcagctccccttgctcgaacaggatgtggccagaacacgctctgtgcctggagcagcttgattgccactgggggatttgaaggtttaggcgtccgttccttgagcaggaacctctgcagaaagggcaatttagacagaacaaagtgcctctccctgaggtctgtctccctcacaccaaaaaggaggtgaaagcttcctttttaagggagaccccttttttaagagccatgacctgcccaatggaactagggtttctattcttatggtgtcagtaaggtgtgaattttcctgtgaatcttgttcatttcaccaaattttcaagtttgtggggcttaaagtttcgataaatatactcttatttgtgtggtgaagtcccttttttatttcttgtatttgtaatgtgtgccttctttctttttttatgtccctttctttttatgagaataaagttccactccagctggtgacagattgagacgcgtttcaaaaaggaatattattttaaaacccaatattttttttttttataaatacctccactttgtttggccttgttaacaaaagcaataaatttaggtttattaccctcaaaactggtggtttcattttggcgtctattcaaggaatttgtgagccggcgcatacaacacagtgggtgacgaattccg

SEQ ID NO: 546318 - DNA, 406 bp, Homo sapiens
ctccaatgcgggtgccgccgaaatcttcgtctaccgcacgccgatcatgcagcatcagaacgtgtatttgcaggagcatcgtgaatatgcgggctccatctacgacacgcacacggatggcagcggcatctgcctctcctcccgtctgcggccgatcctgagcatccgcccgaaatacgaccacttcctggcccaggccccctggcaatacccggcggatctgcatctggtctattggcttgagcatatgggctatgagtatgacgtgttcacggatgaagacgtcacctacgaaggcttggctcgtctcgccccctataatgtcgtcatcaccggctcgcatccggagcataattccggcccgcagctcgacgcgctgcataactacacccagcagggcggccgc

SEQ ID NO: 546319 - DNA, 283 bp, Homo sapiens
tcagtttatacttctgtaaaattgttttaactagaccccccctcccctttctaaaccaaagtataaaagaaaatctagccccttctttggggccgcgagaactttgagcgttacccatctcttggccgccggctaaataaacggatttttttttaaataaacggactcttaattcgtctcaaagtgtggcgttttctctaactcgctcaggtacagtgactataaaagattaggccttcagcagctcacaagggctgtcctgacagtcactcctaataaaaac

SEQ ID NO: 546320 - DNA, 388 bp, Homo sapiens
ccgcaatggtagggtgtgcagagggagatggggaatttatagagcttctgaggaaacacagtaatgataatgtaatcaagtgactctccacaaagtcagtcccacgatgacgatggtcagccagagtattgataacctcagttgtgtgaggcctgagaacgtgatgaaggaggctgtccagcacggacgagtccaggcatgctgtcgatgtccagcacctgctgcccgggcaggtgtggggctcgggctcgcagccacctgcaggagcgacggatgtgtgtcagcgttgcggtagctcatagctgctcaggacctggatgagaagctagctcctcagcagacatggacagagcccggtgccatctgacaggttactttggcgcgtgga

SEQ ID NO: 546321 - DNA, 222 bp, Homo sapiens
tgtctactatatgtgtctctatagattaacctgctgtagacatttcatataaatgtaatcatacaacacgtgattgtaagcgttagggtttaataacttcgtgtaatgtattatcagattgtaaatctcaataacagcgggcagcactctcaacagacgcatggtcttcagtaatgggtgtagcagtaggaatacatgtgccatagtcaactgtgaaactgt

SEQ ID NO: 546322 - DNA, 149 bp, Homo sapiens
aaacagctataacggttactactgatttggtaaaattcacagtaatgttccaggttcatcatgtcaggatcattccttgatgcaaagtttgatgtaaattaagatcaagtggtttcttggtcaataattgcaatttctttcttttaaag

SEQ ID NO: 546323 - DNA, 148 bp, Homo sapiens
aggaagtatataaaataccccaacaagtccaattatattcttaaatattattataataaataagggacaaatttccaaatattgaaatgcagctcctgttttccccaactctggacacataacacatcacaaattcacaggggggtta

SEQ ID NO: 546324 - DNA, 348 bp, Homo sapiens
ggctcgacggtcaaatgaccagttcacaatacaaatcaaggccaggcatggtggctcatgcctcgtaatcccagccagcactttggcagtctgaggcaggcggatcacttgagctcaggagtttgacaccagtctgggcaacatgacaaaacactgtctctactaaaaatacaacaattaacctggcctggtggcgtgtgcctgtggtcccagctacttgggaggctgaggtgggaggattgctggagcccccgaggcggaggttgcagtgagccgaggtcgcacctctgcattccagcctggttgacagagtgagaccccatctaaaaacaaaacaaaaagtcgacg

SEQ ID NO: 546325 - DNA, 600 bp, Homo sapiens
ggatgcaagtgtccataaataagacatagcccctaccccgtactcagctcttcaaaaccagatccagaccctgtcctccccagtcccatctggtgtctgggttacctccgtagccttagggctcctcatccgctcagttcttacagagaccacgttattcatgcactgcccctttgtggctcggttttcacatgtgtgcatttgatgactgcaggtttcttagagtaaaaatcgtatgctctgtttcattgattcctttcttctttctaccaccctatatcatctggatattccaacccagttggaggcccattgttcccccaacaaaatcttgattctgctgcatctatgcctttgctctcccatccatctctgcttctttctgtgctcagcacgaactctaccttctctgggaaagattgcctttccccctgtccaggagttatatttactccaaacactatgcactttatctgttctccacttgtagcatgcacagcttttattttcatattctactcacacctgtagttctccaggtgggaagtcctgtgaaggcaggaaacacttcttgtgcatccttggaaagctcccaaaggg

SEQ ID NO: 546326 - DNA, 311 bp, Homo sapiens
cacgaaagaaacccccagccatgcccaaatgctgcttcaaaagcctgcctatccagtccttacaaaaaccttgcaggattaaatgtgttaacttattatatttaatgtacagatttctaaagtgattttatgctagtgatgttaaacatgaattacagtttattatgaggggtcgtgagcacctcctccatttaacataaactaggtgactttcctatttattttttacagaagtaggaaacccgtatgtgtgcctactcgatttacagggtttctagatgacagtcttccggaggggatcctactagagt

SEQ ID NO: 546327 - DNA, 203 bp, Homo sapiens
cgagacgtacgtaaagagtgacaaggacagcctataggaaaaacaataccacttagaaacaatctcctctctctctctctctctctctctatctctctctctatctcctctctctctctcctctcctatctctcctctctctctctcctatactaacttgttacaaattcggaagttatgatatgtattcgcccagaggaaaa

SEQ ID NO: 546328 - DNA, 292 bp, Homo sapiens
caggcagatcacaaggttaggagttcaagaccagcctgaccaacatagagaaaccctatctctattaaaaataaaaaaactagccaggtgtggtggtgcgtgcctgcaatcccagctactcaggaggctaaggcaagagaattgcttgatcctgggaggcggaggttgtggggagccgagatctcgccactgtactccagcctgggcaacggagtgagactctgtctcaaaaaaaaagaacaatcattgggggaaaggacactctcttcaatactgatctataggagtggtg

SEQ ID NO: 546329 - DNA, 176 bp, Homo sapiens
tggtgtccgtggaagtcctttctctggttcttgaatgaagcagtaacccaagatggctaccaacatcacgatgctgatgaccaggaacactgcgacagcaatctccacagagcctgagcagagaatggggattgcccggctcaggtcaaacacatccttcttggcgatgccgcgac

SEQ ID NO: 546330 - DNA, 956 bp, Homo sapiens
ctgaaatctttgagatcacacaggttggaaatatgtacataactgcacaaggtgtcaattctgctctacagtgcagttttagtcagttttagttgcataggtttccattgtatttatagtctgtttatgctaaatctggccaaagatgagcattgtccaccactaaaatgcctctgccactttgaattctgtgctacttttgtggccagaatgcggtgatcaaaacgctccatctttttacagtggcataggaagacggcaaaaatttcctaaagtgcaatagattttcaagtgtattgtgccttgttctaaaacttttattaagtaggtgcacttgacagtattgaggtcatttgttatggtgctatttcaattagtctaggtttaggcccttgtacattttgcccataactttttacaaagtacttcttttattgcacattcagagaattttatatatatgtcttgtgtgcgtgtccttaaacttccaatcttactttgtctcttggagattgttgaacgcagcttgtctaggaaggggatgggactagattctaaaatttatttgggaccatgggaatgatagttgggaagaaaactatttgcacacgacagattcttagatactttttgctgctagttctagattacttttgctgctaaggtttatgttattttattgaccttgttgccaactttttatttttgtaagcctaaagtgattctttgaaagtttagaaacctgtcccaagacaggtccaaaaccgggccttgaatgtttgaagtgctcggattcggtaaatatatattcggggagggagcgcaagggtagcaacttaacctagtaatataaacccggggtggggggcccaccttcttgtgcaaacaacgggcggcaacacacgggggtaccgtaaataaatcaccacagtgacacacacgcagcaatctctcac

SEQ ID NO: 546331 - DNA, 777 bp, Homo sapiens
gagccccgccatggtgcgccctgcgcggaggacccctcgctggaaaggcattttaagggccacgagatgcagttacctgtgtggacttcagttatcaacacaaagcagctggccagtggctccatggactcatgcctcatggtctggcacatgaagccgcagtcacgcgctaccggttcactggccacaaaggatgcacgtcacctgtgttgaacttttctctccttcgggaacacctgctttggttccggctcccgagacaagacgtgtccgcatcttgggtaccccaatgtcaaacaggtgagtccactgtgtttcgtgccacacacttgccacagtgaggatgtgtcccactatctgcaagttgatggccagttcctttcgttgacaagcctctgacgacaagacagccaaaaggtgtgggcaactcaatcgcaagaaattcctgtttctccctgagcccagcatattcaacctgcgtccgcttgtgccaatgttctccccacgactgggggggcatcatccagtgtctggccagttgacttgaacaacgaagttgttcaagtcttgggggcgacaaattgagcatgcggggacattgtgtccactcggtatttggagagcatggcgggctttggtccacctaatggtggaatttccaaccccagtggggacgttgcattggcggtgccggcatggacaaccaccagtggacggttgggactgcgcggcatcacgggtgtcgccactacccattgcccgtgaccgtgaaggggc

SEQ ID NO: 546332 - DNA, 351 bp, Homo sapiens
tgtaacccggtagagcggctccctccctggtgaaatcaagcagatgcaaaggctccttagatgggatctgtcatttgccctgtaatcacaatccagactttgaaacttccccatgagtgaagacaggaaagacttccccggaggaggaatgtggttaatgtatctactgagctcctaaagtttaaattcaggtactgtgtgtacaatttcatcaacatctcgacccatgaaactgacatcctgtgccaagaagctgttggttctcgcaggcaccgtgtacaacatttgcagattcaggtatcaagaagcagagatgtctcgaaagcagcactttactaacagcttagtatc

SEQ ID NO: 546333 - DNA, 241 bp, Homo sapiens
cctgaccgggccttagcatcccatggttgacagttggtgtatgactgcgcctccctcagtggtcaacactgagattaaaaagaaagggacagccctgtaatttggaaggttatatccagaggagttcagcacccctcagagtctaaggggcttcctggtgatacggacccaccgctgcagagaaatgcccccagcctccctacttagtgcaccaggggtctggaaccctctctacctaaaa

SEQ ID NO: 546334 - DNA, 437 bp, Homo sapiens
  misc_feature (12)..(12): n is a, c, g, or t
  misc_feature (31)..(31): n is a, c, g, or t
  misc_feature (47)..(47): n is a, c, g, or t
  misc_feature (59)..(59): n is a, c, g, or t
  misc_feature (130)..(130): n is a, c, g, or t
  misc_feature (163)..(163): n is a, c, g, or t
  misc_feature (388)..(388): n is a, c, g, or t
aacaaaacaagntccccgggcaataattaanggtaataaattgaaanagaagggataanctgcctgaaacaagatttttaatgccaagtgcagtggtatgatctcagctcactgcagcccccgcctcccnggttcaagctattctacctcagcgacccaagtncctgggattacatacttgcgccaccacacctagctaataatttgtattttttgtagagatggggtttcgccaaactcctgagctcaagcaatccgccctccttgacctcccagcacttcgggaggccaagctgggtggatcacttgagcccagaagttcaagaccagcctgggcaacataaggaaaccctgtctttaccaaaaatagaaataaaaattagctggncctggtggcacacgcctgtggtcccagctactcaggagactgaggtgag

SEQ ID NO: 546335 - DNA, 347 bp, Homo sapiens
  misc_feature (304)..(305): n is a, c, g, or t
  misc_feature (311)..(311): n is a, c, g, or t
cttcaaatattttttatactcttcccttttctctcaagagactttcattagcttgttcttctaaccataaactaagcacatgactgaatatgattaatattagttctggctggttactggtgcattttaatattgataattgatatcctatctgatttcctggttttgcttgatatatgatgtatagtttccttgaagccactggaggtgaattctctttggtattttaggcaattgttcagttctagtaattaaaacaataaaggagaatatgactgactcccatatgctaatttatgccagnnatctcnaaagaaatggatccattcactctgaaggagaaatct

SEQ ID NO: 546336 - DNA, 452 bp, Homo sapiens
  misc_feature (37)..(37): n is a, c, g, or t
cctccaacactgaaagggctgacctgtgtaactaatnggatattgtggaaatgatggagtttgtcttctgaggctagatcatgaaagacatgtggtccttggaccacttaatcatgaagaagacagctgccatgttgtgaggactctcaagcagctctgtggagaggtccataggtaaggaactgagaaccccctccaagtgagcaatcttggaggtatatcctttcctctcagtcaagccttcagatgactacagcctgggctggtatcttgactgcaaccttatgagaaaccctgagccaacaccagctaagattctcctgaattcctcaccctaagaaactgagataataaatctgtgttggtttaagccacgtgtattgagataactaattatgtggcaatagaaaactaatacactaagagatgaattaaatagagaatccactcca

SEQ ID NO: 546337 - DNA, 247 bp, Homo sapiens
cacggttggctcagaaggtagtcagatgtgagactgcttccttgagacattttgtgctatgttttatacgaataattaaaaaacagttggcgttcatacaaatgtctatgtgacatgataaacatggagaatcccaaagaaaaaccgaacagatacaggatccagagataatgacacacctccgcgatgatatatgagacgcatgacatcagatactctgctccctggctctacaagcgtgacctgc

SEQ ID NO: 546338 - DNA, 135 bp, Homo sapiens
cacaattaccagcatcttgttagacaactaaactaaacagaactacagttagattcacatttagttcatacagcaaccagggatagttaattggacaaagcagaaacagcaaagacctcttaactagtactatat

SEQ ID NO: 546339 - DNA, 906 bp, Homo sapiens
  misc_feature (809)..(810): n is a, c, g, or t
  misc_feature (816)..(816): n is a, c, g, or t
  misc_feature (818)..(818): n is a, c, g, or t
gccgcacctacaccagccaacccagatcccgaggtccgacagcgcccggcccagatccccacgcctgccaggagcaagccgagagccagccggcctggcgcactccgactccgagcagtctctgtccttcgaccctgatgcccctgcgccctttcctgggacccctgcccctgctgggcagctgctgccaacctgcctggccatggatgacccctgtcccatgctggctgctgccaccctgcagctggggcgcaggccagctccactcctgctgtctgcccaccctgcatcaccctggctgcatggagaaggaggacctgcaggagctcaatgatcgcttggcggtctacatcgaccgtgtgcgctcgctggaaacggagaacgcagggctgcgccttcgcatcaccgagtctgaagaggtggtcagccgcgaggtgtccggcatcaaggccgcctacgaggccgagctcggggatgcccgcaagacccttgactcagtagccaaggagcgcgcccgcctgcagctggagctgagcaaagtgcgtgaggagtttaaggagctgaaagcgcgcaataccaagaaggagggtgacctgatagctgctcaggctcggctgaaggacctggaggctctgctgaactccaaggaggccgcactgagcactgctctcagtgagaagcgcacgctggagggcgagctgcatgatctgcggggccaggtggccaagcttgaggcagacctaggtgaggccaagaagcaacttcaggatgagatgctgcggcgggtggatgctgagaaccaggcttgnngaccantnaaggaggaactggacttccagaacgaccatctacagtgagggagctgatgtgagacccaagcgcctgtcatgagaccccgacttgttg

SEQ ID NO: 546340 - DNA, 659 bp, Homo sapiens
  misc_feature (584)..(584): n is a, c, g, or t
ggggtggagtcgcggagtagtcctcatggccgccccgccggagcgccggtgagcccgaggaagaggaagtcccttatgctcctaggattatttatgagtgttgaaaatactcccatgcgcccgggattcaatattgtatggttcattagagatcggtgttgtggctggacgttgggacgttttttgttcacaatagtagaattagaagatcatgtgatgttggagtaggagggttgatcttggtgactttgggatgctggtttcacttgtatggtataagttgagtggcaaagcaagagaagtccaggaaacgaggtgccagagaagaaggttaaacaagaagatattatatgagaggtacccatctcgatccggaaagaaaacacaatgggagtagtggtaattgaagcaaatcttgagcatagaagtcaatgtaaacggaaggttaacgatcaaccacataaaacatttcatgtgcgataagctctcaatcaagtaaataaagtttaagtgtagtcatttatttacccacagttgtgtggaagtgaaaagttgcagttatattctggccctgtgtctagtgncaggatagcattcttagtgttacgtatagtggacttgtcatccttaggatgtgagcaggagttattggagtgtgg

SEQ ID NO: 546341 - DNA, 1466 bp, Homo sapiens
  misc_feature (173)..(173): n is a, c, g, or t
tcatgggtcgtcgcccgcggccgttgttaccggtatttgtaaggaacaagccgtagcacgacaagtctcgcttctgcctgagtgtgtcccgtgcattgaccatagattcgcattgttgtgaccgtgtggagcggaaataaggccacaacagctggatgcacgtttccggcttntgtggccacgatggtgtcgagatgacatcatcgcagcacgccttgtcctcgtgacagcccgttggaggcgttgcccagagattcttgtgcccatatcaagtcacgattggttaagaaagttgtgtgagggaacagcatagagcttccgatcatcctggtgttgcagaggtcacagcccgttacccacgtctatcctgcatacaacaacaggatcgtttgtacctagtgcattggggctggacaagagcgtaccgagaacgagtgaccattgctccaggtgcctatgtgccaaagcacacccagggacactagtgcgcccaggggttcaacatatggtcaacggtctatccatgtcacgatccgcgacccgaagtctcgcaagaaacaaggggaggcactgtgagtttagaggacccgtaggacagggggccaaagtgacaagattatcctggaccgcacacgaagatccaaccatctcaacagacagtggagtgcttcaaccaaagcttacacatgctgacttgaaatattgcacatcaccatggctgagctggacaaacgcggctcaatacccagcattggacctagtgggtggttcacatgcttctcataccccaagttacgctgggaccactcctgggacaacgttggagagggaccccttagcactgccaacgaagggcggtatccccagatggtagattggcccaccatcaataaataaggtcaacccaactaagattcctaacacatccctgcgtcaaaaacaccaccacacaaaagagacaaggacagagagacagaagaacgacaccccacgaggaggagcaccagaaacatccggatgacacacaacatcatcaggaccaaagagaggacaccaatagaggagcggaggcggtaaaatacaagcacaagacccacatgccagccgcacagtaataacaccaagcagtgccgaagccggggacaaacgcgaggaccacggagggcacatgagtgacacagcaacccaacaccctagcgccggatacgaacgacttacgacccgagcgaccacaaaacgacatgcacaaatgaccgtcccagccaaacactcactaccgacgagcagatgtaaacaaaccgaacagacaaggacgacacgaccacccacatcagcaaaacacagaccgagccaacacgaccgagtcgaaagcacgaagagccaccagagagccccgacaaggctggaacgcacatatcgaccagagcaccgccaagaaccacgaagcgaagccagcactcgcccac

SEQ ID NO: 546342 - DNA, 113 bp, Homo sapiens
gcgcatcttgctcacatcaggagtcaccttccacccagatcagtacaagggtgaaaaaggcagtgagggggaaccaggaataagaggcattttcctgatgggagaagactgcg

SEQ ID NO: 546343 - DNA, 400 bp, Homo sapiens
  misc_feature (145)..(145): n is a, c, g, or t
  misc_feature (148)..(148): n is a, c, g, or t
aaaccatccttaaaattttccccgttcaatttggcccttaagttcaaagctgttacaagctgttaccccacccatgtttacagtttctgcccatctatctgtaagcaggaggtctaataagaattgccttaaactggccgggcancangtgtcacgcctgtaatcccagcactttgggaggctgagccgggcggatcccctgaggtaaggagttcgagaccagcctggccaacatggtgaaaccccgtctctactaaaaggacaaaaattagccgggcgtggtggtgggctcctgtaatcccagctacttatgaggctgagcagcagaatagcttgaacctgggaggtgaagattgcagtgagccgacatcgcgctactgcactccagcctgggcgacaa

SEQ ID NO: 546344 - DNA, 499 bp, Homo sapiens
tgctggagagtacccattccgcggaatcagaatgacgggtaggagagggaattccccgttcacccgcaggagtcgtggcccgtgcttggctactctggacctgcctgaaacactgaggggtcggggatgggggcaaatgtcgtgcgcgcgagcgtgtgtgtatatgcgttgccagaagagaagaggggtttaatgtctgtagcttttaactgatcctcttggtggagttcaatttgattagtagaaagtgagagtccgcgtcactatccatagcattctgagggttgagcattaagcttgggaattttccagtttcttggacacctgacagccggatagaggaacagacttgacgtgagcgtgggagtggcacacacaaaaattcctccctagcgtttcgtttccatcagtgggatgggaaggggatttctgaaagtttgggtcttctgtttcttctgttggtgtggtgtcagcaaataacattcaggaaaattttttt

SEQ ID NO: 546345 - DNA, 822 bp, Homo sapiens
ggacgcgtgggctttttttattgtgtagctcaataatgctgaattaaagggcagattcatatgcggctctggggggaattgttacaaatatcaaaggaactaatccagcatcctatatagaactctgcacacttgggggaggtccgctgaagcaggacaaagtgctctttacacaggaatagagtcggtctcaagtatctgctcgtggtggggaggacaccctaagcatgctacatacgtcaccccgtgctctcaggatgcacccaggtgggctcgcggtcagggttggccttgccggtgtccaccccgcacagcaccccacagatccggaagcggatccacacggggcttggaccatccacagcatccgggacatccagcgatcatacagtcgccctccgtccgtcttcctcgcatccgtccggtgtctgcctggaagccgtccagtgtcttacagcaccaatctggccgtcgtgcctgcgcttcttcatgaatggggtgatgcaccatgctgcccgctgaattcctcttcagcgagatgggagtgccctggctgggccccgtggcaggggacgatgcacaggtaccactaaggagggccgaagggacacacgatagtacacataagctccaattggcaagcgaaccgggcagagtgcatcctgatggaaagctcgtggtagcaccgagcagggtgcaagtacaccagcaacatccgaggaagcaaggccgggtcccaatcacactggaggtactcggaaaatggagccggtggacccgagaactcaaacggggatggacggaaccacgcagagagatgag

SEQ ID NO: 546346 - DNA, 294 bp, Homo sapiens
agccaaaattccgctttttgggagcttatatttaaaaacattatgtctaagactaattttacattgtcaaaaaaagaatggcccagcacgggggcttacactgtaatcccagcattttgggaggccgaggcaggcagatcacctgaggccaggagttcaagaccagcctggccaacatgcgaaaccctgtcagtactaaaaatacaaaaattagccagtcatggtggcgcacacctgtaattccagctacttgggtggctgtggcatgagaatcatttgaacccagagagccgg

SEQ ID NO: 546347 - DNA, 402 bp, Homo sapiens
agtatccccacgatcgtctcagcttacggaagtgggaggaaagagtggagaaatttgtcttgtggttcgagtgcccacttaggctgtaatagaatagaacaccagctagatttctaaggttttttgagtccagtttctggcttccagactgcatccctggacccacttggggcctgggggaactcactgccctgaaaggaagaatataagcctggccggcttcaccacctgctgattgtagagccctatggccttgagtaaacataggcagtagcaaggtagtaattacggcaggccttgggtgagattcagtgttgtgctggttacaggtctgacccagcacagtcccagtggtggtagccacgagggtgcttgtgtcaccctaccctcagctccaggcag

SEQ ID NO: 546348 - DNA, 199 bp, Homo sapiens
  misc_feature (22)..(22): n is a, c, g, or t
  misc_feature (43)..(44): n is a, c, g, or t
  misc_feature (177)..(177): n is a, c, g, or t
  misc_feature (195)..(195): n is a, c, g, or t
ggctccattaaggaccaaattnatgctaccactaaacaaaaanntatagtctgtgttaaatcgtatgctttttaaaggtatttaaagattcaactagctttaaagaggctgagcagctcaggaagcctgtaatgtgacataactctttggacctgatcttgatgttctgctgttgtnagtcttgaagagcgtatntgat

SEQ ID NO: 546349 - DNA, 802 bp, Homo sapiens
  misc_feature (85)..(85): n is a, c, g, or t
  misc_feature (87)..(88): n is a, c, g, or t
  misc_feature (101)..(101): n is a, c, g, or t
  misc_feature (111)..(112): n is a, c, g, or t
  misc_feature (162)..(163): n is a, c, g, or t
  misc_feature (189)..(189): n is a, c, g, or t
  misc_feature (239)..(239): n is a, c, g, or t
  misc_feature (253)..(253): n is a, c, g, or t
  misc_feature (255)..(255): n is a, c, g, or t
  misc_feature (270)..(270): n is a, c, g, or t
  misc_feature (300)..(300): n is a, c, g, or t
  misc_feature (304)..(304): n is a, c, g, or t
  misc_feature (367)..(367): n is a, c, g, or t
  misc_feature (417)..(417): n is a, c, g, or t
  misc_feature (425)..(425): n is a, c, g, or t
  misc_feature (463)..(463): n is a, c, g, or t
  misc_feature (469)..(470): n is a, c, g, or t
  misc_feature (513)..(513): n is a, c, g, or t
  misc_feature (541)..(542): n is a, c, g, or t
  misc_feature (545)..(546): n is a, c, g, or t
  misc_feature (598)..(598): n is a, c, g, or t
agcgggctgtcggccgcggtgtcttcttcgtgccggcgtcgcagtggccgggcctcttgcgtctggtaacgccgctgtctctaangnnagcccttggcgcncgcgccccgnnaccgcagcgcccggcagtccgcggccaaccgccgcccgcgcccccgctcnncgcaccgtacccggccgcctcgcgcnatggcggcccccggcagcgcccggcgacccctgctgctgctactgctgtngctgctgctcggcntnatgcattgtgcgtancagcaatgtttatggtgaaaaatggcaacnggancgcgtgcataatggccaacttctctgctgccttctcagtgaactacgacaccaagagtggccntaagaacatgacctttgacctgccatcagatgccacattggtgctcaacngcagctcntgtggaaaagagaacacttctgaccccagtctcgtgantgcttnnggaagaggacatacactcactctcaatttcacgagaaatgcancacgttacagcgtccagctcatgagtcnngtnnataacttgtcagacacacaccttttccccaatgcgagctccaaagaaatcangactgtggaatctataactgacatcagggcagatatacataaaaaatacagatgtgttagtggcacccagggtccacaatgaaccaacgtgacccgaaacgctccaatgatgcccccatccagggaatacctattccaacacgcgcttcagcaagagagaaaacacgcgtgaaccagacaaggactccccaaaacaaaggaccc

SEQ ID NO: 546350 - DNA, 149 bp, Homo sapiens
agctgcaccgcgggtcaactggctccccatcctctaccttgtccccatggcagtcgcagaaaataacggcaaccgcgaatccttattggctgccaagggaaaccaaaagaaaagccattgctgcagaggatcccagcctaaaatttccg

SEQ ID NO: 546351 - DNA, 271 bp, Homo sapiens
tgagacacccacaccttcaaaagcaacactgaacagaaaattctacccatgccacattcatgtctactcagagatcaccttcaccacccaaaacttcaaagaaaccagtcactgctgtctaaaagcatagttctccgagtgtggtcactaaaccagcagcagcatcaccacctggcaacttgttagagatggcaattccccaggccgacccaacccactgaatcagaacttctgcagctaactcaacaatctgggtttcaaccacccttcc

SEQ ID NO: 546352 - DNA, 157 bp, Homo sapiens
gacgtcttccacggcgcatttgccctcgccattaccgagaagcaggaattgcggcaggcgctgcgctttgcgtccgcggccgcagcattaaaatgcacccgcttcggcggcgcttatgccgcaccgcgacgtactgaagttgaagcgtttttgggcg

SEQ ID NO: 546353 - DNA, 406 bp, Homo sapiens
aatgttacccacagtgttcatcatatacactgcagcagcaatcagtatactttcgagagataatgtcatctctcaacaatttgaccagcatatttagatatatccaactcatctacagcatcagcatccagtaaggttgaacggtccgccacagcgccatgatagatatcagcataccgaaaaggcatcacttgctccctcaggccctgtgtgtagttctcaacttgaaaatagccacaggtagagagggcccaccacccagaccagcagacaagagggcgacaggagtagcacatcagtagtatcattccatagttctttcaatacaagcagtcggtctggcgtaggtttcggctccaccacgggaggctcctccatctttagaggaacttctgactcaatgtct

SEQ ID NO: 546354 - DNA, 141 bp, Homo sapiens
gttatagaagatactgagtgtataatgttattgatggtaagcaacaggatctcagtggaacagggtgtgtgatgaatgaaaatgtgagggatcccagctctaaccgggagggcagtgggagactggaggccagtgggagga

SEQ ID NO: 546355 - DNA, 181 bp, Homo sapiens
cgtggcaatagtacctaaacgtaaaacatccaaacaacgtaaacataaaagaagaactcatgatgtattaacatcaccaactttagtaacttgtgggacttgttcaggaaaatcattacctcaccatgcttgttcaaattgtggtttctataaaggtaaaaaagttattgaaggtctacac

SEQ ID NO: 546356 - DNA, 485 bp, Homo sapiens
ttaagatcctaacagtgcttttcaagaattaccatatccaggtacaatcatctctacatatgcagccagactcctggctcaggactgctgggagatccagaaatgcatgccaccttgttctcaaaagcttggtaatgggtgatcttatgagtgagtttgtcactaatgtttgtatcgggactggaattctcagatggttgcaagtcatttgaggtcccagaagtccagcatagagatagggagattgtgggcagatctcttgagcctaggagttcaagacaagccttggtaacatagtgaaaccctgtctccaccaaaaaatacaaaatttagccaggcgtggtagtgtgtgcctctggttcccgctaccttggaggctgaggtggaaggattgtttgagtcttgaaggttgaggctgcactgagcccagatcatgccactggactcccgcctaggtgacagagtgagacccctcttagaaaaaa

SEQ ID NO: 546357 - DNA, 1029 bp, Homo sapiens
gcagatctccacatatcgcgatcctattccaggctccaagtgatgttgctgttaccagtttctgcgatcccctctgcataagtagtatcggacgtggcgtctctggtggatgctgtgcacatacatagtgcggtacccggcgcacgaggtcacctactaagatacatgatctgttctccccaagggcagcgggagagaagtcgttcactccgttctaaattgtcaaccacacggtgcatctcccttagtccagacgataccactcagaatatagacctggcgagagagttcagtagctgcttcgcgagtccgtgagcagttggggagtgaagtccgcagttggagtgccgaagggatattgggggccgccacttagtcagcggaattacattgtaaacgagtcgctatgcagtggaaatcccagcgcgaagaaacgcggggcgcatggctctcgacagggatgtggcgtgataccaatgtaccgatgcatcggcggagtgcgtacccgtgataaccgtgctaggacagctcagaagcttcaactccctagaggattaaactcgctgactccccctccaatgagtcgggcgccctattgcagtaaacgccatacacctggtttgtctgaccaagcggttgcagaggattgactatccgcaggacaagcttttcatattcctgtgggttccctgacatggatcatgcgtaccggaagacacgtctgcggggtactggtagtccagccgaacctgaatcccgcaaatggaagcacgttgaaccctgtcgcagatccgtgcgtgctgctggaaagaagacccgctcaggacgggacgatgtcataccagcctggcaagtgggaagcacaccagctctgtgattagttcctgtgcaccgtcgaagtcggaaggaaacaatctgatactggcccggagtcacgaacttgagcgggccgctggggcgttcgcgctgggggtcatcaaaccggcgcggggcatttgccttgcgccggaggaacagaagtcaccagca

SEQ ID NO: 546358 - DNA, 341 bp, Homo sapiens
gttcactggaaaccgattatggattatataaagggtatacactcatcgagggattagtgccaggtgcagcagggtcatgcctgtaatcctagcacataagggaggtcaaggcgcgtggatcacctgaggtcaggagttcaagaccagcctagccaacatggtgaaaccctgtctctactaaaaatacaaaaattagccaggcatggtggtgcacgtctgtaatcccagctacttgggaagctgagggagaaaaagcacttgaacccaggagatggaggtttcagggagccgagattgtgccactgcactccagcccaggtaacagagcaagactctgtctt

SEQ ID NO: 546359 - DNA, 919 bp, Homo sapiens
  misc_feature (109)..(110): n is a, c, g, or t
  misc_feature (112)..(112): n is a, c, g, or t
  misc_feature (125)..(125): n is a, c, g, or t
  misc_feature (131)..(131): n is a, c, g, or t
  misc_feature (152)..(154): n is a, c, g, or t
  misc_feature (157)..(157): n is a, c, g, or t
  misc_feature (160)..(160): n is a, c, g, or t
  misc_feature (162)..(163): n is a, c, g, or t
  misc_feature (168)..(168): n is a, c, g, or t
  misc_feature (174)..(174): n is a, c, g, or t
  misc_feature (176)..(176): n is a, c, g, or t
  misc_feature (179)..(179): n is a, c, g, or t
  misc_feature (183)..(183): n is a, c, g, or t
  misc_feature (186)..(187): n is a, c, g, or t
  misc_feature (457)..(457): n is a, c, g, or t
  misc_feature (462)..(462): n is a, c, g, or t
  misc_feature (486)..(486): n is a, c, g, or t
  misc_feature (493)..(493): n is a, c, g, or t
  misc_feature (530)..(530): n is a, c, g, or t
  misc_feature (532)..(532): n is a, c, g, or t
  misc_feature (539)..(539): n is a, c, g, or t
  misc_feature (543)..(543): n is a, c, g, or t
  misc_feature (547)..(547): n is a, c, g, or t
  misc_feature (549)..(550): n is a, c, g, or t
  misc_feature (555)..(555): n is a, c, g, or t
  misc_feature (557)..(557): n is a, c, g, or t
  misc_feature (565)..(566): n is a, c, g, or t
  misc_feature (573)..(573): n is a, c, g, or t
  misc_feature (580)..(582): n is a, c, g, or t
  misc_feature (586)..(586): n is a, c, g, or t
  misc_feature (591)..(591): n is a, c, g, or t
  misc_feature (600)..(600): n is a, c, g, or t
  misc_feature (602)..(602): n is a, c, g, or t
  misc_feature (604)..(604): n is a, c, g, or t
  misc_feature (608)..(608): n is a, c, g, or t
  misc_feature (615)..(615): n is a, c, g, or t
  misc_feature (631)..(631): n is a, c, g, or t
  misc_feature (641)..(641): n is a, c, g, or t
  misc_feature (652)..(652): n is a, c, g, or t
  misc_feature (654)..(654): n is a, c, g, or t
  misc_feature (664)..(664): n is a, c, g, or t
  misc_feature (716)..(716): n is a, c, g, or t
  misc_feature (723)..(723): n is a, c, g, or t
  misc_feature (908)..(908): n is a, c, g, or t
ctcatcgctgtggtgctgcagctgtcccagcagctgtctggcatcaacgctgtcttctattactccacgagcatcttcgagaaggcgggggtgcagcagcctgtgtatnncnccattggctccgnttatcntcaacacggccttcactggcnnntcnctntnngtggnggagcnancangccngcnnaccctgcactctcataggcctcgctggcatggcgggttgtgccatactcatgaccatcgcgctagcactgctggagcagccaccctggactgtcctactctgacgcactcgtggccatctttggctttgtggccttctttgaagtgggtcctggccccatcccactggttcactcgtggctaactcttcagccagggtccacgtccagctgccattgccgttgcaggcttctccaactggacctcaaatttcattggtggggcatgtggntgtgnagtattgttggagcaactgttgtngtccctnacgtctttcatcatcttgcactgttgctccttggttntngttcttncatnttgnanntactntnaaaagttnngtgagantaaaggnnnggangcttngagtgagantngnttgngggcttncgggcagggggggagncagccaaagntgacaaggcancncgagggagcntgttccactccccctgggggcctgattcccaacgtgtgaagtcgccccagantcaccangcccggtcctgctcccagcagccctataggatctctcaggagcacaggcagctggatgagacttccaaacctgacagatgtcagccgagccgggcctggggctcctttctccagccagcaatgatgtccagaagaatattcaggacttaacggctccaggattttaacaaaagcaagactgttgntcaaatctatt

SEQ ID NO: 546360 - DNA, 158 bp, Homo sapiens
cggatcatctagatgcagcatggagaatgctggatggagtgtgtctcccaaatcattttggtgccgatgtactcgtgctagaaccatccaacctctatcttatctatccttatgtacatgacgcaggatgtgttcattgtcttaaactgaacagaacg

SEQ ID NO: 546361 - DNA, 586 bp, Homo sapiens
ggatagactggccagcactggtaggaacctgtgcaagacccaactggtgctctacgatgacgctgaggagcttaataggagtgctggtgagctccccaaaaccggggaatcaatccacacagtgcaagagtaagtagacacgctgttgaatcaggaccaagcacaaggcgcgcgtatgcctgctaaagactttctggacagactttgttgtctagacaacctgaaagcctcactcagccaagtgggggtggacatagaaatgctcaagactgctgtggacagtttagatgcatactcagtcaacatagaaaccaactagaactatgtggaatcaggcaaagagttactagataacctgacgaatgatctggataggatggttgggaaagtggcttaaagtcacataaagggctcaaagaattgtgtgtgcacggagccgaattaaaagcccatttctcataaccaaagagtggtttatatccatgcgtcccctaacgcacaagttatttgtccctcttgagcatgttgttaccaactgcacaccaaggcatatatattttcatgcccaggtaacctaattactttt

SEQ ID NO: 546362 - DNA, 233 bp, Homo sapiens
gctgcttggactatacaatcactgaaactaaagatcaggcatattcaaaatagtgattacatggacttaggaggcagggtgcagtgtgtcacgcccgtaaatccagcactgtgggaggccgaggcaggtggatcacctgaggtcaggagttcaagaccagtctgggcaacataggggaaaccccaatctcttactaaagtatacacacacaagaaaaattaagctggggtgtg

SEQ ID NO: 546363 - DNA, 280 bp, Homo sapiens
aatgcaaagttgttgcagggactaaagataaatagttgtttaaaaaaaaaaaaaagggccaggtccgggggaatccaaaagacctttcagttcaaacccgggaggcagagaaccagcattttcaggcctttgaatagagggggggatcaggagccaggggaaacgaaagagtgaaagcctggacgggctctggctgaaagaagaggtatttgggcagaccatgcagggagcatgggggcttgccaggcagctgaaacaggggggaccaggtaaaatggga

SEQ ID NO: 546364 - DNA, 423 bp, Homo sapiens
  misc_feature (210)..(210): n is a, c, g, or t
acgtgtggactaaagaagcaagtaaagagaagaaatactttgtctagaattgcctatttctttctggtgtggtctgaatgtgttcccccaagttcatatgttaaaacttaatcaccaatgtgatagtattaagacgacaggcctaagtcctgagagcagagccttcctggatggaattagggtccttacaaaagagcttgaggaagtgtntgttcttttctgttcttctgccatgaggatacagcattcacccccctttttgcccttctgtccctcccaccatgtcaggacacagtgcttaaggtacctccttggaagcagagaccaggccgtttccagccaccaaacctgctggcaccttgatcttggatttcccagcctccagaactgtgagaaataaattttttattgtttacaaattaa

SEQ ID NO: 546365 - DNA, 419 bp, Homo sapiens
  misc_feature (156)..(156): n is a, c, g, or t
  misc_feature (187)..(187): n is a, c, g, or t
  misc_feature (273)..(273): n is a, c, g, or t
ccggaggggatgttgtcggtggtgaggccagcacagcggtagctgcctagtgggaatgacccctgagcatgcagagcccagagtcactgtccatctgcgttcccagagaacaattgtgaagagtcctagaacaggaactctgaatcagactgtcanggggcctatgttagccaaaagtgttactaanattataaaattccttgtcgtcttcaggtcttcatgcgtttgtcactcttggtccatcagcaaagactgtgagatgcggtaacagcncagtttcttatcttcttctttacatatgttgatacgtggaaagggtctttgagtagaaactttcctgactagaagatgcaatggcatgctgcacaggatttagctaagctcctgggcgggggatccctctagaagtcgcacctgca

SEQ ID NO: 546366 - DNA, 450 bp, Homo sapiens
tctggaaagggattttaactctttttccccggggcgggagtgcaggggcgctatctcagctcgctgcaacctctgcctccggggttcaggcaattctccggcctcggccctcccgggttagcggggattaggggctgtgtgccaccaggccgggctaatttttttggtattggtagtagagacagagttcacggtgttagccaggcgtggtcttgaactcctaacctcgtgatccgcccacctgggcctctcaaaggtgcggggattagaatggtgagccacggggcccagccaaagcccggttttttaaaaagaaccaaagtagtggtaatggcaatcagattttccttactaaatatctatgagtgttgggacactgttggaaacaactaatatacttaatattttttctcaatattggctatcttaaaaaattaaggattccatatg

SEQ ID NO: 546367 - DNA, 524 bp, Homo sapiens
ggggggagacaaaaaaaaaaaaaaaaaaaaaaaaaaaaatttgtgtgcggcgcgcgcgcctgggcccttgagaaaaacttttctaaacacacatatccggttgggcgcgcgcgcgcgggccccaagtgggaagggaacaatgtgggcctatagagcgggtttcctctagagggaacatccgcgggtccagaggacactagaggggcggggtttctctccacaccaatataaaaaagagcgccgcggggggaaacagcgcgaagcgcgttcgtggaaaaaaattcccgagagagggaagtcgcggaggggccccatataggggggggattctatatcaaaaggggggatctctcaagaggagagagccccagaattatccaaaaattatagcgcccccgcccgcgggggtgaaacacagaaacacactataaaaaatatgcaacaacacaataaaacaacaaacaacaaaaacaaaaaaataaataccagagacaaaactaaacaaaaaaacacaaaataaaaga

SEQ ID NO: 546368 - DNA, 257 bp, Homo sapiens
  misc_feature (146)..(146): n is a, c, g, or t
tctcagcgtcagtagctgggatacaggtgcgcacacacacccggtaatttatatattagtagaggtggggttcaccatgtaggccaggctggtatcaaagtattgacctcaagtgatccgcccacctcagccttccatagtggtgngattacaggcgtgagccactctgcccggcttatttttctttatgtattagcttcgtaagaggttctgtagagcagtgatgtgcaactcttgctgacgttgctggggaagct

SEQ ID NO: 546369 - DNA, 218 bp, Homo sapiens
  misc_feature (174)..(174): n is a, c, g, or t
cccgcgggcggggaccaaactcaggacaccgagcttgtggacaccaggccagcaggagatggaaccttccagaagtgggcagctgtggtggtgccttctggagaagagcagagatacacgtgccatgtgcagcacgaggggctgccgcgatgcccctcaccctgtagatggggntggaaaaggagggatgctgctctcagtgctagctgtccatgcaa

SEQ ID NO: 546370 - DNA, 238 bp, Homo sapiens
  misc_feature (44)..(44): n is a, c, g, or t
  misc_feature (141)..(141): n is a, c, g, or t
  misc_feature (231)..(231): n is a, c, g, or t
  misc_feature (234)..(234): n is a, c, g, or t
cttctactgtggtgtaccgtcaacactcttatcagacaatagantttaaaaaaagaataaagaaagacaagaaggacctacttaatgattaagggatcatccaaggagaggatgttactatcgtcgacatatatgccccanatataggagcacccagatacatacaacaaatattaacagacataaagggagatattgatgggaatacgatcatagtaggagacttaatanccncctc

SEQ ID NO: 546371 - DNA, 320 bp, Homo sapiens
  misc_feature (35)..(35): n is a, c, g, or t
  misc_feature (40)..(40): n is a, c, g, or t
  misc_feature (73)..(73): n is a, c, g, or t
  misc_feature (76)..(77): n is a, c, g, or t
  misc_feature (79)..(79): n is a, c, g, or t
  misc_feature (82)..(82): n is a, c, g, or t
  misc_feature (92)..(92): n is a, c, g, or t
  misc_feature (104)..(104): n is a, c, g, or t
  misc_feature (130)..(130): n is a, c, g, or t
  misc_feature (135)..(135): n is a, c, g, or t
  misc_feature (147)..(147): n is a, c, g, or t
  misc_feature (153)..(159): n is a, c, g, or t
  misc_feature (232)..(232): n is a, c, g, or t
  misc_feature (247)..(247): n is a, c, g, or t
  misc_feature (252)..(252): n is a, c, g, or t
  misc_feature (263)..(263): n is a, c, g, or t
  misc_feature (270)..(270): n is a, c, g, or t
  misc_feature (277)..(278): n is a, c, g, or t
  misc_feature (299)..(299): n is a, c, g, or t
  misc_feature (301)..(301): n is a, c, g, or t
  misc_feature (319)..(319): n is a, c, g, or t
ctcaatattaccagtattgtcttgtgtttctaggnatttnagagtttccttttaaaaatggacactacacccntgnntngantgtttattgngttcaacaaatntttctaaagaacaatattcttaactnttccnctctattatctnagtttnnnnnnnctttaaccaggaaaccctgagaagattataattcactgagagcagataaaaatatcagattatgtgtatttgntggagttgctgtgantgaanttgcctgttgngtattcnatgtttnnaggaaatgtgatcgattgagnanatgaagagtgtgaagggna

SEQ ID NO: 546372 - DNA, 356 bp, Homo sapiens
ggcctcagctcgtgagaagtagcttctcgtatcgctctctcaagtaaggttagaattgagcggttcgctgtaatctcagcactttggaaggctgaggccggcagaacacgaggtcaggagttgagaccagcctggccaatatggagaaaccccatctctgctaaaaatacaaaaattagctgtgcttagtggcacacgcctgtagtcccagccactcgggaggctgaggcagaagaactgcttgaacctgggaggtggaggttgcagtgaaccgagatcacgctgagatcatgcactccagcctgggcaacagagcgagactccgtctcaagaaaaattaagagttaatggtagct

SEQ ID NO: 546373 - DNA, 104 bp, Homo sapiens
ttgcattaatctgccaagtccagataacaggaacagaccagacttatccactgtcccaagctctccagcctggcacatccgtcagccccacggtgctcattgaa

SEQ ID NO: 546374 - DNA, 334 bp, Homo sapiens
gatagtacagaagcgtgacatgactatggatatctcagctactgtcctctccaagctgatcatcccagacacacagtcatgaaactcccttagcgaaagttccttgactctctgaactggacaccccagccagaaaagaaatatcactgtcagagcctgacaaaactgggtctgcccacgtacaatcacgaacaccacacggttgcgttgtacaacagaccatgcctgcctagactgaagtacttcttacgtcctccggttcatcacctcttcttacagacgctaataccggctacagacacaagagagcaacaagggtcaaaaattagaaccc

SEQ ID NO: 546375 - DNA, 523 bp, Homo sapiens
gtcggccgcctactactactaaattcgcggccgcgtcgacgacgaaatcactaaaaaacgtgaaaaatgagaaatgcacactgaaggacctggaatatggcgagaaaactgaaaatcacggaaaatgagaaatacacactttaggacgtgaaatatggcgaggaaaactgaaaaaggtggaaaatttagaaatgtccactgtaggacgtggaatatggcaagaaaactgaaaatcatggaaaatgagaaacatccacttgacgacttgaaaaatgacgaaatcactgaaaaacgtgaaaaatgagaaatgcacactgtaggacctggaatatggcgagaaaactgaaaatcacggaaaatgagaaatacacactttaggacgtgaaatatggcgaggaaaactgaaaaaggtggaaaatttagaaatgtcactgtaggacatagaatatggcaaggaaactgaaaatcatggaaaatgagaaacagtcgtatcgatgtcgagcgatcgcgcgcccgtcgacgc

SEQ ID NO: 546376 - DNA, 411 bp, Homo sapiens
gtcggccgcctactactactaaattcgcggccgcgtcgacgaatcatggaaaatgagaaacatccacttgacgacttgaaaaatgacgaaatcactgaaaaacgtgaaaaatgagaaatgcacactgcctggaatatggcgagaaaactgaaaatcacggaaaatgagaaatacacactttaggacgtgaaatgaaatatggcgaggaaaactgaaaaaggtggaaaatttagaaatgtccactgtaggacgtggaatatggcaagaaaactgaaaatcatggaaaatgagaaacatccacttgacgacttgaaaatttacaaatcactaaaaatttaaaaaatgagaaatgcacactgaagggcctggaatatggcgagaaaactgaaaatcacggaaaatgaggtcgac

SEQ ID NO: 546377 - DNA, 235 bp, Homo sapiens
tgcgcaaaaatgtggactcaatgcgacgagatctccatctgcggctatgtggacattgccatcccatgcaagaacgaagggatctcactcagtgtggttagatgtgcgatggatgctggcgtcggaaagttctgcgcatgggttgcaccatttcccgtgaacacccatggtaggtcatgcctgatctgtacttctacagagatcctgcaatgtagcttgaaaaagaaagatgcag

SEQ ID NO: 546378 - DNA, 305 bp, Homo sapiens
  misc_feature (127)..(127): n is a, c, g, or t
tggaatgatgatcagcttagtaaagctgtacacagtgtcatgtacctgtagccccaactgctcagaagctgaagcaggaggactgcttgagctcaagagttccagaccagcctggtcaacgtagtangaacctgtctcttaaaaaaaaaaaaatcagcttaagtcatcaactgggaattcacctgtatccatcacttccagctctcctgcttaaaccctggattttccttttgctcctgcttgcggaactttctttgctttcttcataggagttcccaaatagacatgtctccgtttcaaactgt

SEQ ID NO: 546379 - DNA, 280 bp, Homo sapiens
cgcggggcccgggtgcaagctagcgaccctctcccacctgcgcgcagcccgaggtgagcagtgaacggcgagcgggaaggcaagcgaggcgtttgcgggccccctcctgctgcccgggcccggcccggttatggcggccatccgcaaaaaagctggtggtggtgggcgacggggggtttggcaaaaagtgcctgctgattgtgttcagtaaggacgagtccccgaggtgtacgtgcccaccgtttttgaaaaatatgtggccgacatttaggtggacggc

SEQ ID NO: 546380 - DNA, 537 bp, Homo sapiens
  misc_feature (260)..(260): n is a, c, g, or t
aaaagctatattgtcttgggttttaggtccattaacttggaatatccttttccattcatttattctgaggtgctgtctatacttgatattaaggtttgtttcttggatgaagggaaaatttagaaatgtccactgtaggacgtggaatatggcaagaaaactgaaaatcatggaaaatgagaaacatccacttgacgacttgaaaaatgacgaaatcactgaaaaacgtgaaaaatgagaaatgcacactgtaggaaagnacctggaatatggcgagaaaactgaaaatcacggaaaatgagaaatacacacttaggacgaaatatggcgaggaaaactgaaaaaggtggaaaatttagaaatgtccactgtaggacgtggaatatggcaagaaaactgaaaatcatggaaaatgagaaacatccacttgacgacttgaaaatttacaaatcactaaaaatttaaaaaatgagaaatgcacactgaagggcctggaatatggcgagaaaactgaaaatcacggaaaatgaggtcgac

SEQ ID NO: 546381 - DNA, 302 bp, Homo sapiens
  misc_feature (150)..(150): n is a, c, g, or t
  misc_feature (176)..(176): n is a, c, g, or t
  misc_feature (187)..(188): n is a, c, g, or t
  misc_feature (190)..(190): n is a, c, g, or t
  misc_feature (250)..(250): n is a, c, g, or t
  misc_feature (270)..(270): n is a, c, g, or t
tgatggtgtgcaagttatctgcattctatagaaaccacactttgcatcccaatacaatcattctgttgttcattttcagcacagacccaatacattacatgaaatactcagtatgttgtaataacccagactttgtgttagatgattttngcccctatgtaggctaacacaagtgnttctgagcacnntntaaagagcaggttaggctaggctaagatttggggaggctggctgtaattaaatgaatgtnggagttgatgctgtcacccnacctatgatgggcttttcaggacgtcgactga

SEQ ID NO: 546382 - DNA, 585 bp, Homo sapiens
agttatgagtatgatcacgttaagatataatatgaattactataggaaagctggaatgcttgcaggtactggtcagcaatttttgggtcgatcaatattaataaattggtgcttgtgttgattgagaaaagtgaaaattatagacaattagaaatatatactttaagatgtgaaatatggtgaggacaactgaaaaaggtggaaaatttagaaatgtttagtgtaggatgtggaatatggtaagaaatttgaaaattatggaaaatgagaaatatttatttgacgagttgaaaaatgacgaaatcactaaaaaacgtgaaaaatgagaaatgcacactgaaggacctggaatatggcgacgagaaaactgaaaatcacagaaaattagaaatacacactttaggacgtgaaatatggcgaggaaaactgaaaaaggtggaaaatttagaaatgtccactgtaggacgtggaatatggcaagaaaactgaaaatcacggaaaatgagaaacatccacttgacgacttgaaaaatgacaaaatcactaaaaaacgtgaaaaatgtcgacgcggcaacgaatttagta

SEQ ID NO: 546383 - DNA, 690 bp, Homo sapiens
tttctctatcctgggaggactggggccagaggggatgactccacaaggagacagagctggctcttcctcccacagtgtagagatcatggcgacagagtctacttccacactccaggtgccccaactataaatggataggtgggcaagtcactcaccctgcagcctcttgtttgactagaacctctaggtcatccagatccttgggccgggtccagcgggactctttactctggttgttatagtaataaggtttgcctgtgtccgacttgttatttttttatttacaaaaaaaaaaaaaacaacaacatttttttttttttttactctttccaggcacattgggacaggagcagctgcaagtggatgggataggagccatcagtgggatgggcgagttctccagccagtcaggggagctaaggggacctagtgagtagaggacacaggaacctttagctaccacctggcctggttcaaactgggaaaggtggacttcttgagatcctatggaggcatttccaggaagggtgaggaatggtcagggaccttgggatcagaggaaccatcatgaatatggttagagactaagggaaggccaaggacttggaagggtcagggcagtgaaaggaagggcagaagccagttaggactctgcttggatgagcagtgggtttcccaaggatgttgcgt

SEQ ID NO: 546384 - DNA, 335 bp, Homo sapiens
gcgtcgactgccctcaaaaggaatgatagacttcttccactccacaccataaaatgacgaaatcactaaaaaacgtgaaaaatgagaaatgcacactgaaggacctggaatatggcgaaaatatggcgaggaaaactgaaaaaggtggaaaatttagaaatgtccactgtaggacgtggaatatggcaagaaaactgaaaatcatggaaaatgagaaacatccacttgacgacttgaaaatttacaaatcactaaaaatttaaaaaatgagaaatgcacactgaagggcctggaatatggcgagaaaactgaaaatcacggaaaatgaggtcgac

SEQ ID NO: 546385 - DNA, 894 bp, Homo sapiens
gtcggccgcctactactactaaattcgcggccgcgtcgacgcgagaaaactgaaaatcacagaaaattagaaatacacactttaggacgtgaaatatggcgaggaaaactgaaaaaggtggaaaatttagaaatgtccactgtaggacgtggaatatggcaagaaaactgaaaatcacggaaaatgagtaatacccactttagtacgtgaaatatggcgaggaaaactgaaaaaggtggaaaatttagaaatgtccactgtaggacgtggaatatggcaagaaaactgaaaatcatggaaaatgagaaacatccacttgacgacttgaaaaatgacgaaatcactgaaaaacgtgaaaaatgagaaatgcacactgtaggacctggaatatggcgagaaaactgaaaatcacggaaaatgagaaatacacactttaggacgtgaaatatggcgaggaaaactgaaaaaggtggaaaatttagaaatgtccactgtaggacgtggaatatggcaagaaaactgaaaatcatggaaaatgagaaacatccacttgacgacttgaaaaatgacgaaatcactgaaaaacgtgaaaaatgagaaatgcacactgtaggacctggaatatggcgagaaaactgaaaatcacggaaaatgagaaatacacactttaggacgtgaaatatggcgaggaaaactgaaaaaggtggaaaatttagaaatgtccactgtaggacgtggaatatggcaagaaaactgaaaatcatggaaaatgagaaacatccacttgacgacttgaaaatttacaaatcactaaaaatttaaaaaatgagaaatgcacactgaagggcctggaatatggcgagaaaactgaaaatcacggaaaatgaggtcgac

SEQ ID NO: 546386 - DNA, 716 bp, Homo sapiens
gtcggccgcctactactactaaattcgcggccgcgtcgacgcgagaaaactgaaaatcacagaaaattagaaatacacactgtaggacgtggaatatggcaagaaaactgaaaatcatggaaaatgagaaacatccacttgacgacttgaaaaatgacgaaatcactgaaaaacgtgaaaaatgagaaatgcacactgtaggacctggaatatggcgagaaaactgaaaatcacggaaaatgagaaatacacactttaggacgtgaaatatggcgaggaaaactgaaaaaggtggaaaatttagaaatgtccactgtaggacgtggaatatggcaagaaaactgaaaatcatggaaaatgagaaacatccacttgacgacttgaaaaatgacgaaatcactgaaaaacgtgaaaaatgagaaatgcacactgtaggacctggaatatggcgagaaaactgaaaatcacggaaaatgagaaatacacactttaggacgtgaaatatggcgaggaaaactgaaaaaggtggaaaatttagaaatgtccactgtaggacgtggaatatggcaagaaaactgaaaatcatggaaaatgagaaacatccacttgacgacttgaaaatttacaaatcactaaaaatttaaaaaatgagaaatgcacactgaagggcctggaatatggcgagaaaactgaaaatcacggaaaatgaggtcgac

SEQ ID NO: 546387 - DNA, 457 bp, Homo sapiens
  misc_feature (50)..(50): n is a, c, g, or t
tgaatcacttagtggggagagtaaagggagtaagagaaacttaacaaaantgcagtttcctagatcccacaccaaatcttcataatcagaggcagaggtgctttaaaagtgatggctgccttgtggggcttggagcaaggaacattcactcctgtgctttagctgtttatccatcctgatttggtgtagagacattaacttcctgtcttcatctagtcacctaaactcacccctgaaccttctgtctatgaagcagagaccatgtggtgtctctggatataaataataaatactcataaggaaaggcctttgggaagggtcacacaaaaggattctaaagagaaggtggggagatttttggaaaaatattagattaacaaaaagactaaacaaagtggttcatagaaaagacaactaaaaactggaaagacaagcagtcgacgcggccgcgaattta

SEQ ID NO: 546388 - DNA, 912 bp, Homo sapiens
gtcggccgcctactactactaaattcgcggccgcgtcgacgcgagaaaactgaaaatcacagaaaattagaaatacacactttaggacgtgaaatatggcgaggaaaactgaaaaaggtggaaaatttagaaatgtccactgtaggacgtggaatatggcaagaaaactgaaaatcacggaaaatgagaaacatcatggaaaatgagaaacatccacttgacgacttgaaaaatgacgaaatcactgaaaaaggtggaaaatttagaaatgtccactgtaggacgtggaatatggcaagaaaactgaaaatcatggaaaatgagaaacatccacttgacgacttgaaaaatgacgaaatcactgaaaaacgtgaaaaatgagaaatgcacactgtaggacctggaatatggcgagaaaactgaaaatcacggaaaatgagaaatacacactttaggacgtgaaatatggcgaggaaaactgaaaaaggtggaaaatttagaaatgtccactgtaggacgtggaatatggcaagaaaactgaaaatcatggaaaatgagaaacatccacttgacgacttgaaaaatgacgaaatcactgaaaaacgtgaaaaatgagaaatgcacactgtaggacctggaatatggcgagaaaactgaaaatcacggaaaatgagaaatacacactttaggacgtgaaatatggcgaggaaaactgaaaaaggtggaaaatttagaaatgtccactgtaggacgtggaatatggcaagaaaactgaaaatcatggaaaatgagaaacatccacttgacgacttgaaaatttacaaatcactaaaaatttaaaaaatgagaaatgcacactgaagggcctggaatatggcgagaaaactgaaaatcacggaaaatgaggtcgac

SEQ ID NO: 546389 - DNA, 913 bp, Homo sapiens
ggggtgggaggaggggactcccgggagggaggaacatggcggtggggacctcgtctcattcctgatgtggacatcgactccgagggggtctccaatgtatgtgctgatcgggagtccattcgtctccccgctcggggctccgggtttggcagagagcaaggagatcgtgcgcggatacaaggttgcggctgaggtaccattgtggacttctacggacaaatgtgttcggggcgaactgtgcaagaaggcaaggtttggcagacttgtgagtttgtctggggggggggggcggattttcttcccaaccaggaatgttcagcgggaccaagaggaaatggattccacgtgttgtaagcggggtaatccccagtggccctaattggttcctgtgcccaaggacacggccattttccactgtttggaggaaaattcaagatggccaaaggtaaccccgggattaagggagggtccacttttgggctaaaacggggcggggcttatgtgagaggccactcccacaggcgtggggtcctgtgtttgccttcaagtggaagggcaatttaaagaagaccccctggtttttcgtttggaattcctttttggaggtggttggcgctttagctattggtccttgcggaggacggctcttgtgtagcgctgtccgtttgcccaaccaatgggcctgttgtagcagccatgtgcgtaacgctttggcgcccaaaagagatttaaactggtttgtcgccagacaaatgacaacaaagaacccgaagcaagattttgtgggggcgcctggggccaagaaagggtttataaaagccctcttgtttggggcgcggccctgtatgtaatgagcgtttgacgcagggtgtgcccacaaggagctggggcaagaatgtgttggttccccaaa

SEQ ID NO: 546390 - DNA, 481 bp, Homo sapiens
cacgatgggagcctgtaatcctagctactcaggaggctgaggcaggagaatcgcttgagcccaggaggcggagattgcagtgagccgagatcgtgtcactgcactccagcctgggtgacaagagtgagactccgtctccaaaaaaaaaaaaaaagaatttattaacctggttggttaataaattgtgtggtccctgccgggcgtggtggctcacgcctgtaatcccagcactttgggaggccgaggcgggcagatcacgaggtcaggagatcgagaccatcctggctaacacggtgaaaccccgtctctactaaaaatacaaaaaattagccaggcgtggtggcgggcacctgtagttccagctacttgggaggctgaggcaggagaatggcgtgaacccaggaggcggagcttgcagtgagccgagattgtgccactgcactccagcctgggccacggccacagagcgagactctgtctc

SEQ ID NO: 546391 - DNA, 816 bp, Homo sapiens
gtcggccgcctactactactaaattcgcggccgcgtcgacgcgagaaaactgaaaatcacagaaaattagaaatacacactttaggacgtgaaatatggcgaggaaaactgaaaaaggtggaaaatttagaaatgtccactgtaggacgtggaatatggcaagaaaactgaaaatcacggaaaatgagtaatacccactttagtacgtgaaatatggcgaggaaaactgaaaaaggtggaaaatttagaaatgtccactgtaggacgtggaatatggcaagaaaactgaaaatcatggaaaatgagaaacatccacttgacgacttgaaaaatgacgaaatcactgaaaaacgtgaaaaatgagaaatgcacactgtaggacctggaatatggcgagaaaactgaaaatcacggaaaatgagaaatacacactttaggacgtgaaatatggcgaggaaaactgaaaaaggtggaaaatttagaaatgtccactgtaggacgtggaatatggcaagaaaactgaaaatcatggaaaatgagaaacatccacttgacgacttgaaaaatgacgaaatcactgaaaaacgtgaaaaatgagaaatgcacactgtaggacctggaatatggcgagaaaactgaaaatcacggaaaatgagaaatacacactttaggacgtgaaatatggcgaggaaaactgaaaaaggtggaaaatttagaaatgtcactgtaggacatagaatatggcaaggaaactgaaaatcatggaaaatgagaaacagtcgtatcgatgtcgagcgatcgcgcgcccgtcgacgc

SEQ ID NO: 546392 - DNA, 948 bp, Homo sapiens
tggtgccccggctgggtctgtgcggtgctggctgctcgggagagctggctggtcaccatggcaatgcgggagctggtgtgagtgcctgaattgcgtgtggtgtgccaacccgctcatgaagctcgccgggcacttcacccaggacaagggccctatctgtgcagtgagggatttgatggccatgtgccccctgtgcccccctggaggcccctgtgactctgagtgcagtccttcccaatgcctatttgggggagctaagcgtattctagcaatgatagcagtttgtgttgtgacttgaaaatatccttagcagtgggacccatgatatttgcgagcccgctctttgtttgttcccccgatggcgccccttcgaaagacccatattcaacggaatttggacttgaccgcatccgttggggcctttgacgacgttgccagggccactggagttatggaggccagtggtccaaaagaagcagttattcccggcccaatggtggcatccccccaaatgaacggaaatggcccccgcctattggagtttgattggtcgccagtggaaccttttggtagaccactatagggtaccctatgaacgagacgcgccttagggcgtggccccccaaacgttggaaaggctgcaccttacttgggccgagaggccttcgggcacgggacctatcgcccatttgttctgggggagatttggttacaacgccagttcccaatggtcggcatcctctcactttcacacgataggacagcgaagcgttgtaacccattgtggatttcccccccccaaatcggaaaagttctcgaacatctgctccttagcagagcgggtttacactagatggaagacccccctttttggagtccctgggaagggtaccccccacgattgcccccagcgcgcttgtgggggccctcggagggggaagagctctg

SEQ ID NO: 546393 - DNA, 561 bp, Homo sapiens
aatccaatccaggttcccaaatcgcccgcacatccaaaggatcccgacgtaaaaccgaggccccccgaccgacctcgtgattaaagggatgaccgacttacctaccccgtcggttacgaaagtacttggaaggtaaccccacccgatgtagggactagaagttacctctactagccctcgatctcctcccctaccctctgcgtctaccctcgactaaatccgtcgtacggtactagacgctaaaatagacctaaaaacgacctacctactagcgaaacagacgttataaaagtcgtaaagatatttatagataaaactcctaaatagagcctgacccccgcccccgcgagactcggaaaaataaaaaactagaagtgaagtaactcaaaacaaaacaaaaacgagaagaacctccctacactccggcacgttatcctaactaacctataaactcctaacactactaaccggtacctaagtcgtcctcgacgtctcaaccggtcgacgaggacgcggaccgctaagactactactctatttcctgacaaacgcgcgcgtgct

SEQ ID NO: 546394 - DNA, 723 bp, Homo sapiens
gtcggccgcctactactactaaattcgcggccgcgtcgacgcgagaaaactgaaaatcacagaaaattagaaatacacactttaggacgtgaaatatggcgaggaaaactgaaaaaggtggaaaatttagaaatgtccactgtaggacgtggaatatggcaagaaaactgaaaatcacggaaaatgagtaatacccactttagtacgtgaaatatggcgaggaaaactgaaaaaggtggaaaatttagaaatgtccactgtaggacgtggaatatggcaagaaaactgaaaatcatggaaaatgagaaacatccacttgacgacttgaaaaatgacgaaatcactgaaaaacgtgaaaaatgagaaatgcacactgtaggacctggaatatggcgagaaaactgaaaatcacggaaaatgagaaatacacactttaggacgtgaaatatggcgaggaaaactgaaaaaggtggaaaatttagaaatgtccactgtaggacgtggaatatggcaagaaaactgaaaatcatggaaaatgagaaacatccacttgacgacttgaaaaatgacgaaatcactgaaaaacgtgaaaaatgagaaatgcacactgtaggacctggaatatggcgagaaaactgaaaatcacggaaaatgagaaatacacactttaggacgtgaaatgaggtcgacgcggccgcgaatttagtagtagtaggcggccgc

SEQ ID NO: 546395 - DNA, 207 bp, Homo sapiens
taattgtagaaaaactagatatcgagcgccaaactacactaacctttaccgccttattaaccagattgtgtcctccatcactgcttccctaagatttgatggagccctgaatgttgacctgtacagtaattccagaacaacctggtgccctacccccgaatacacttccctctggccacatacgcccctaatatgccattcttgctg

SEQ ID NO: 546396 - DNA, 1391 bp, Homo sapiens
gccctcccctcctcctcgtggatctgagcggatgacaggagcatttacagtcgtatcattctcagactctagctgaacgaagtgagttctttaatgagcccatgcagtcattactggtacaggctcgcaggatatgtcctaccagcagagaagaggctgcccgattctacagttcccgaagcagcgaggcgacgtggtaaacgatcttcagggggccacagaagaaagaggaaaaaacgaggagtcattggacgagtacagaaggcttccggtgctgcaagagcaaggtgtccacgaagccatgctagcgacgcaagaccccagtctctgcttgcatccctggcaaagacctcagcatccagagccaccctgtgggcatgggaacgaagagagggctactcgtcccatggtgatcccataaggtgtggacattcactcccatgggcgggatgcccgagcctgagttgctgactcgtgactcaatatgggcatacttgctcctccattacatgatgcaacgttgcaattcggccatccttctccagctctgtgctctggaatccctggatttaacacccaagacacttactacagcacgatctcctaagcccaggtcctggggcgcttatgcattcgatagccaactcgcttactcatgccagtggacacgcaacacacggaagaacctttccaaattgagtttgaggtcccccgggataaacggatgtataggctatagatgccatgtcacgggtaataccaccggttagtgcatagcaaataacttgcacaagccacgtcaatgcagctgggggccaccacggggtgcttcatactacctagccgacacgaattgccaacacttaacgcacagccaacatcactccttcatacaaacagttagtgcaaacttctcatggcgctcaatgatttctctgcacgtagagagacacagtgacacatattggaacccctgacgacaccagacatagcaaagccgttttctatgccattagggtaaccagtatgtgaatacccaggtttccacaagtccgtatgccatagtctgtctctatccaatgattgatgtacaactgagaaaacccccaaggaatcttgactagctgccaccaccatacacagtcaacagcacccttgccagaatggacaacgagagctgttatccgcataccccaatttggacaattcaggacgcgaagaatcgcgcgctagtaaaatgtaagggtaccaacagcaaagactatattctttccgcacgtgtacttgcttgaacacgcgtcctactagtatcactgatagtcgactgatcgtggtgactcatctcaaattccagttcacttgtgtgacaacagcatgtgatcgacaggcaa

SEQ ID NO: 546397 - DNA, 939 bp, Homo sapiens
  misc_feature (907)..(907): n is a, c, g, or t
ggtcgcggtgggcccattaaagcgagaggagggagagggcggcggtgaggtatctatgaagtgcaggggaagaggggagtgtgcgccggaaaatgtgcggcgaggggcaggcccagggaggaagggtgatggagcttttggatgtaacggcgagggcttgtactctgtatggtggtgggtccgagagataactgggagagcagatgaggcgaggagtgaacttggcgtggtaagtatcggaatcggggaagggggggagtgcgcctaggacggaaaggggggtgagaaagtaggcaattttttcagaaagaagcaatgggtggaaatatgtaaggtgggaacatcgtcggagcgtgactacgtgccctcagggagtataagggagtcgcgtaacacctagtggtggggaggccacaccggggggcccaggggtgtgaccaaaaaaagtgactccacctgggccgggggggtggaacccacgtgttctggggacacccacagcaggtggggccactgacctcttaaggaggggcgaacatatgttcggcgcgttataaagggaaatgccaactggaagaaaaaaaaatcaatgaatacatggggttggaacccgcgccacggtggaaatcttacatcacgaaccatcggtgggcgggggccccccaggagtacatggaacagggtaccattgtgtcaagcaagaacatcggcactgaaagtgggggtccctacaaaaaaaacacgcgggggaccagcagcgtgacacacccaggtgtgtggggacggactgagacgagacgcagtccgagcgatacatacccaggcggaggaatgccagacctataggatgacaccaaacgagaacaccacaaacaggagtgatgaaagactggtacagcccgaagcngcagagaagaaatagaggagaagctacagcga

SEQ ID NO: 546398 - DNA, 104 bp, Homo sapiens
ccgctggaccccactccaggcattactttcctgagttgtgtggttgcagtaagacgcagaaatgcacaggcataaggggcaagacagcaacacaagaagcttct

SEQ ID NO: 546399 - DNA, 243 bp, Homo sapiens
gatcggtgccatgtgcactacgccaagcagcagggggtgggtcccggtctgcaacccttcaaccatggggcccagcacgtgggccagaggtaacccacctgtataaagctgacgtctaacacagagactagcaggaaacaaaaacagcacgacaacaaaaaaacaccttcggaagcaagtcgatgacaataggtgctcgtcaacaagctcacgtaccgcagctcgacaagagcaacatcacaa

SEQ ID NO: 546400 - DNA, 448 bp, Homo sapiens
ggctgttctggaggatcccgtgcgtgttactacaaggctacagtacaaaacagcatggtagggtaccaaaacagagagatagaccaagggaacagaacagaggcctcagaaataacaccacacatctacaaccatctgatcttgacaaacctgacaaaaacaagaaatggggaaaggattccctatttaataaatggtgctgggaaaactgactagtcatatatagaaagctgaaacgggatcccttccttacaccttacacaaaacttaattcaagatggattaaagacttaaatgttagatctaaaaccatagaggaagacctaggcaataccttttaggatataggcatgggcaaggacttcatgactaaaacactaaaagcaagggcaacaaaagccataatggacaaatggatctaatggtatacatgaacacgggtaccgag

SEQ ID NO: 546401 - DNA, 1005 bp, Homo sapiens
  misc_feature (608)..(608): n is a, c, g, or t
  misc_feature (695)..(695): n is a, c, g, or t
  misc_feature (713)..(713): n is a, c, g, or t
  misc_feature (734)..(734): n is a, c, g, or t
  misc_feature (737)..(737): n is a, c, g, or t
  misc_feature (817)..(817): n is a, c, g, or t
gttttctccgcgggcgcctcgggcggaaccgggatataatgggacagcacctgggggagccctggatgggtgcgggtcgctcttggcctgacgggcttagtgctctcgctctacgcgctgcacgtgaaggcggcgcgcgcccgggaccgggattaccgcgacgcatctgcgactgctgggcaccgaccatcgatgctgttcgacgcgatcttcatccgtcgcagggtggcggcagggggttatcgggctaggtggacgctagtgtgctgggacagagacgagtcatcgctcaatcaatcccaacagacagtattacaggttgtgcatcgttcataactatcagcgtagcgaggcgtacttgttagggttgtgccttgcggtgacgacagcgtaggagccttcctggtcccgtgatagcgtagcatgagcatccgctgcgtgtcttgcgtctgcttgggtgtcttgtcttacgctggctcgtggggatcccatgtgtcgttcagtggcgtcgtaatggcattatcttatgcgattttgttgtggtaatcgatcgacacatcatagcttatcgagacgggtgaggcgcgtagattgtcgggctcgaatgntttcgcggggagatagggtcccgaagagaacaccccgtatgcggccaataggtcgtgaagcacggcgaactgtagccgccatccaancctcgagaggcgcagtgncatgtatccttcgaatcctgncantgtggcgtgttgggacagtgttggagtgcctttggccctataaggggcgcgcacatactcctggtgtgtcccctaggaanggggccccttaagaaatggtggcggagctttcgtcatgaatgttacaccgccgcgttccgtaccgtggcccaataaccccggcgacgattgaaccaattgaggacccagaagatgttgcccaagaccgcatcagcgtccgtttattttacaacgccaagatgccctcatgacctcatggtccgccaat

SEQ ID NO: 546402 - DNA, 245 bp, Homo sapiens
tggtgaaaagatatatgtatatatatattcagaattaggctgctggactcagtttagatgatcccaattttgttggcttcatgcaaagcattgttattaggagccagtcgaacatatgccttcttctgtccatcaggccgtattagggtgttgaccttggccacgtgaatgtggtacaggttgttgacagcctgtttaatctggtgcttgatggctttaacatgcacaatgaacacaagtgtgtt

SEQ ID NO: 546403 - DNA, 992 bp, Homo sapiens
tgagacgtgctttcacttccaccatgattgtgaggcctccccagcatgtggaactgtctgctcctgtggccaggctggagagcagtggtgcaatcatagctcactgcagcttcaactccaggtacaagtgatcctcctgtctcagctcccaagtggtaagactacagggcctgcaccatcacaccctgggctattttcaaaaaatttttgtagagatggggtattgttatgttgcccaggctggtttcaaactcctagactcaagcaatcctctcggccttgagctcccaaattgctgggattacaggcgtgagccactgtgcccggatcctacttctctttctttctatcatatagtcaggcagcaatgaggcacctgggaagccttgggaacaatgcctgggggccagggcaagccccacagtaaaactgcttaccttaatgattggccatccgcactggcatcaacacgtgggtcaaaagaagaaaccactttccctttacttactagagggggactgtgaaagactattctttactaccttgcgaagcacgatcaacaactagtgggtaaatctgcgcaggggcaaagggacataccttgcggcaagggcatccggccaggagaggtgagtagggtaagaagttctctcatacattacctacaccaaattcccaagcccaccacgccaagcacagaaggtcagcgacacaattggtggcattacaccgggggcttccgccagccggatctggcaaaatctgtcgcgtcacagcgagtgtagccgacttcgaaacaatccatgctacaccgatggcagaaatgcgtgacacgaacttggccacgaacgcaggccatgacccgcgtatcacacatgggcgagccggacgtcccctgctcagccgcacacgaacgcttaactcaaaagtagatccgatctcaaaacgcaacgatcgacgacgtccccacatacaacactcattaactccca

SEQ ID NO: 546404 - DNA, 429 bp, Homo sapiens
tggcatccgcctgctggaggcacagatcgccacgggcggcaatcaatcgaacctgaagagagagccacacggctgaccgtgagaggtggactacaagcgcggactcttcgatgaggagatgaacgagatcctgaccgacccctcggacgacaacaagggctactttgaccctaacacggaggagaacctcacctacctgcagctgatggagcgtagtatcactgacccccagaacgggcctgtgtctcttgccgctgaaggagaagaagcgggagcggaagacgtcctccaagtcctccgtgcgcaagcgccgagaggtcatcgaggaccccgagacgggcaaggagatgtcagtgtacgaggcctaccgcaagggcctgattgaccaccagacgtacctggagctgtccgagcaggagtgcgagtggg

SEQ ID NO: 546405 - DNA, 251 bp, Homo sapiens
  misc_feature (48)..(48): n is a, c, g, or t
tcccctccctaagcgcgatcccgaatggcggtgcaggcgccctgtccngttcgtgttgttacgtgtttgaccagcacaggggtccgtttgggaaaatgtatggcttcgccctcagttgttgctaatgctgaagtttaaatctcaaggggaagggcccacctgcattgttgagtgtctgctgctgaaacacatgattgtgtttaggtttgaaattgctcaagtgtctggctcaggtggtggttctgagacac

SEQ ID NO: 546406 - DNA, 395 bp, Homo sapiens
  misc_feature (54)..(54): n is a, c, g, or t
  misc_feature (173)..(173): n is a, c, g, or t
  misc_feature (358)..(358): n is a, c, g, or t
aagagatctcccacctcagcctcccacagtgctgggattacaggcgtgagcgcncacacccagcctattcaaaatttttttttcttagagacagggtcttttttgcccaggctggagtgcagtggtgtgatctcggctcactgcaagctccacctcccggcttcacgccattntcctgcctcagcctcccgagtagctgggactacaggtgcccgccaccacacccggctaattttttgtatttttagtagagacggggtttcaccgtgttagccagggatggtcttgatctcctggacctcatgatccgcctgttttggcctcccaaagtgctgggattacaggcgtgagtcaccgngcccgggttcattttaaaatttttgtagatcagtgta

SEQ ID NO: 546407 - DNA, 174 bp, Homo sapiens
gcctaaagtggaactgcacgaaatatttagtgtccggcgcctatccagaacatagtgtatgacatcaccaggcttaaaactgctcttgaccacagagacatcgcgttctgcgtcaaggaaacgaagaatgttcttcctatatatgaaatacaagcaaagtttttcattaacgag

SEQ ID NO: 546408 - DNA, 439 bp, Homo sapiens
  misc_feature (36)..(36): n is a, c, g, or t
tcgcgaacgtgtatccaagcacctgcaaggtcctcnctccacatttagagcattaagatgtgtggggcatggtatcaatatcctctcctgccacacatctccagagtttctttcacagaagggactaacagttcaggaggcagagtacaggaattagaagactctccaaagaggagaatactctggaggtctcaataattaggtaaaattattgagaatccactgtgtgacctggaagagttgctgctgtagccttgaaaataaactcttagctctactggcacacctattttctgtcagacaatggcattccaaatataactgatggacaagatgttcagtattagctgcttatactggtggctttcatacacattttctattatcccaattctcttcattcttttggaggagagaattgggataacacgttcgcgag

SEQ ID NO: 546409 - DNA, 225 bp, Homo sapiens
cagccacagagtcaggagctggaggggacacctcagccctcataacagataccaaggcgagggcaccctcttgtccttatcttcgcccctggggtctgctctcacacacatctgctcctcagcacgtacggactggggaggggatcgctccttaaaccccaggtggctgaccctccccacccagaccaggaccactttaggaacaacaaaaatgacactgtgggg

SEQ ID NO: 546410 - DNA, 207 bp, Homo sapiens
ggtcatggagacgcgatgtccaaggccagatcgactctacggcccgggcaacctccgctgcgctacctccattactgagtgatcgtatctctcccacttcagcaccgagcaaatgcttgaggttggcctccaagcggctagcggggaaaagattggctgcttcatcggccggaaatgcgtccacgatcgcggtgaagcactgcggag

SEQ ID NO: 546411 - DNA, 1041 bp, Homo sapiens
  misc_feature (136)..(136): n is a, c, g, or t
  misc_feature (164)..(164): n is a, c, g, or t
  misc_feature (295)..(295): n is a, c, g, or t
  misc_feature (360)..(360): n is a, c, g, or t
  misc_feature (488)..(488): n is a, c, g, or t
  misc_feature (574)..(574): n is a, c, g, or t
  misc_feature (579)..(579): n is a, c, g, or t
  misc_feature (602)..(602): n is a, c, g, or t
  misc_feature (607)..(607): n is a, c, g, or t
gggaggtttccagaagcgctgccgcaccgatcgcgcagctcttgccgtcggagcgctgttgctgcctcgtactcctccatttatccgccatgataagtgccagccgagctgcagcagcccgtctcgtgggcgccgnagcctcccggggccctacggccgcccgncaccaggatagctggaatggccttagtcatgaggcttttagacttgtttcaaggcgggattatgcatcagaagcaatcaagggagcagtgtgggtattgatttgggtactaccaactcctgcgtggcagtntatggaaggtaaacaagcaaaggtgctggagaatgccgacaggtgccagaaccaccccttcagtntgtggcctttacagcagatggtgagcgacttgtgtggaatgccgggcaagcgacaggctgtcaccaacccaaacaatacattttatgctaccaagcgtctcattggccggcgatatgatgatcctgancgtacaggaaagacattaaaaatgttccctttaaaattgtccgtgtgctccaatggtgatgcctgggttgaggctcatgggaaatngtatnctccgagtcagattggagcattngtgtngatgaagatgacgagactgcagacaattattggggcacacagtcacactagatgctgtggaatcacacgtcccagttatgtcaatgactcgcagagacggccgctaaagatgctggcagatatctgggactgtatgtgcttccgggtgactaatgagccacagctggtggtcttggctgtggtcctagaaaaattccgaagacccgtcttggtggtaatgatttacagcggggggacgtctgcgttcccatcgggaatccgacaaggcgcctttggcgggaatcccccaaggggaaccctagggggcggacctaacccgctgttggctgtacgagtctcagcacaacagcgctgtggaacactcgttcaggagcagggcaagataagacccacgaagaaagccaatgatacgccgaagcgcacgtggaaacgcg

SEQ ID NO: 546412 - DNA, 685 bp, Homo sapiens
tgcccttgacttgagtaacctcgagaggcttctcccgtcctgtggggtctttatctggatccccccggcctacacacttacctgcgctcccagatgagcccagtgagccccccgcctgtcagccctaattggggaacccggtaggtgcacgtctcatcgcacatgctggcagcctcacccacctggcccagtatcccagcatcccaccagtgcagataccttggggctgaaaaggccctgttcagagccctgaagaccaggggtaaccacccccaaaatatggactccattttcccactccccaccttcattggccgagcagctgcccagaaccaaggccgcatctcccgatacctggccaaccaatgcaagtattgcctcacgaatcgattgcttctctgaggtgcccacgagtgtattcggggagaagcttcgagaaccacacgttgaagagcgactgtccttctatgagactggagagataccccgaaagaatctggatgtcatgaaggaagccatggttcaggccgaggaagcggctgctgagattactaggaagctggagaaaccggagaaggaacgctttaagaaggaaaagaaaacggctggctgcacttgccctcgcgttttccaggaaaccgccgtagtactcccgaggagtgtgaggagacgagtgcaaacccca

SEQ ID NO: 546413 - DNA, 365 bp, Homo sapiens
agctccccctggaaggggctagtagcagaaagtaggggctgaatttagcccagacttgacgtgggccttgacttgggctgccaaccctagaggcgggcttcatgcacttcctttatatgatatagcacctgtttgcaatacacagttagatgtggcttttatggagaaactcaactgagcttggtttcatctgggcttgccacagcccagcgattctcttaattgttttagaaatgatcaaagttggctgggcacggtggctcatgcctataatcggagcactttgggaggctgaggcggtcagatcacttgagttcaggagttcgagaccatcctgaccaacatggagaaaccccttgtctact

SEQ ID NO: 546414 - DNA, 776 bp, Homo sapiens
gcttggaagtggggacatcaggatagctgaaggaaatccagacacccagagcatctcggagttcagactctcagacctgaagtaggcgcccccgggactgggctaggagttggacggaatggaggatggaggacagcgagaataaaggaagagaaatgcaacgtgtgggcagccgccaatgagtgaaaatagagggaagtgtcatgcaaagtgctggacacgaaggtcggcacggtgggacgatgctcccacagacctcctccgtcataaaacgatgcacctccaggactcagtgatccctgggtggcaggctctgccattcctcggccacacgtggctccggcacccatggtcccagtgccttggcactggatgcatcggccacgttctggcggccagatgtgtgttgctctggaatccagtcccatttccttcctggccacgcctgtccacgctgccttcttcagccgcattcagcccctacttacctggggagcccggtctggggcacgagagcgccagtggggctagggcccaaagggatcaggagaatcctctggcctggaaggtatggtgcacgcttacccaagggcggacccggtaggaggaagcccaggagctgggtcctgccgcaccaggagctgtgccctgcacaccaggccgggctaaaggacatggcatggctgggcatcctgacactggacttgggcgacctgagaggcacagggaggggacgagatgggcgaccgcgcacatggatgtcaccggcataccac

SEQ ID NO: 546415 - DNA, 864 bp, Homo sapiens
gcctccccggtccgtgggtgcccggcgcgggccctagacgcggaggcggttcctggggagagggatccgggaatcctctgatgcgggcccggactactgatctacggaggctggggtcctgcacgtagtcgccagtcggccgggtcgcgagacttcccgtgattcgctccgtgaaccgcgaaggtcgcgatgcgttcatgtctgcagcgcactcgacgcagtcgctctgaaagatcaacgtggtggcgagtgcatgagcgcgtgaagtcgctgtctgtaggaggtccacatggtcgtcgttcacgcaccatgcgacgaaggcatggtggctcaatttgcaagggtggcgagaccaacagagggtcactcactctactggccaccctacttgctggatgcaccccgatgttcagtacatgcggtgtgacccactgatgaacgtactgcacaacacgcctacaaggatcactcagcgaattgcctacctgtcaccagcgcaaactagcttacgcacgcccataggccacaggttcagtccgatgagcaagctatatggtcatcgctgcgaacggacgtcatagaccaccagtaccagtgccagtcactagggcacccgaagaagactagtaggcatgtgcccctaccgcggcaaactagtgtgcgtagactggccgacggaggtctctaccagcaatcagtcataccctagccgtctactaggccgcttgcccaagtgcttgtgggacaaggtacatccactgaggctgaacgtggaagctcagctggtcatggcctatcctgtgatacccaggtggacaacagttgtcaagtgcgtggaccctgaccgtgcctgttctagacaaa

SEQ ID NO: 546416 - DNA, 166 bp, Homo sapiens
  misc_feature (39)..(39): n is a, c, g, or t
agggatagggtatacttcctaagtgtagatctggcatcnataacgcagacacattattgttccatatatacctgtagatattctctcccctcaatatttatatctcgactaaaaaaaggaggtgcaaagagtatataaagataaatgagattttcttgctgttgtt

SEQ ID NO: 546417 - DNA, 331 bp, Homo sapiens
ccccgttttggggggggttttttgggccaaaattgggggcccccttgcccccccttaaacccccccctacccaatttttttaaataatgggccggggggggggggaaaattggggccgggggtttgggccctttaaaatggggtttttttttaaaaatttttccccccccccctgggggttttttttttgaaaccggttcccctcccccccccccggttttggtggcccgcccccccctttttttctggggggggggggaaccctttttttgcccccggggttgcccttttttttttctttggggggggaaaaaggtttaaccccgtttta

SEQ ID NO: 546418 - DNA, 1728 bp, Homo sapiens
gtccatgggtgggacacagacagcaatttgtggagggggtccgcatggaagaaatagttgaaggtagtaccggagcccttcacatcctagctcgaggatgttcacaaccgaaattgattatcagaggactaaaataccacttccactatgtttgtgcagctgcatatatagttctccacatatgaaaacagtccaagcagcgtagcatgacagggagatccgtcatgtgaacctatgcatacagaggcacaaggacaaagctgacaagcaacgactatatggaagactagagaggacagaccaagcagacataccatacatgtaacaagacaggattaagctatcgacatacatcagagaaacatgcacaggctaggtcggacaggcacaaatcatagaccagccatgacaatagatatatagaggtatccagaaaaatggatcctgcaggagacacacagggcgacaacacaagaaatgatacaaccacgaacccacagggcgtactccacaggaatagacagacatgaacacacaaggacagtacatgcattcatgatccaaggaaacacaagaaagagcacaaaacatggagacgatacggagacaaacatggacagcagcagttggaccatgcaactcgctccagggcgacacatgatgcgagatacatgacggaggtagacaccccaaggagggaaaagcaacagcgaccacaaccatttaggagacaactataatacagacacacacgaggaacgtgacacgatcaccgatcacagacaattagcatccggatacaccatatataaaacacacacgtttacaattggcggatagcgggcaaatcaacttggagacacacaaagggaggcaagtaggccacaattaagcagagaatcaattagggcacgcccaacaccgacaatggcaactagagggacaacaccaattggaaagccaaataggtcaggaatggaggacaccaaaagacaacagaccccatgggaatagcgcatcagcacaattcacatgaccccaacgaatatgggaacatggggagacagtagggacaaagagaaacatcacatgggaaacggaaccatagacacacacaaccagaggaaaacacccgcaccaaaccataagcaaacaatggcgaggcaatggaaccactacccccacatagaaattgacaaacagagacaacacaaaccaagaacatcgcgagaacacaggagcaataatggaaaaaacagcatcgcacacacctagcaatagaaccagcagcactacacgagaagaacgtgaaaagaataaacaaacataaacaaacacaagacgagcacataacagaggagacgacgagccacaaccaaagaccgcacacgccaggaaccagccaaaaggcaccaccacaaacgacaacaacgggagagcaaaacacagacgcaccgaacagtcggagccacatgcacgaggcgcagaccgaccacgccactagaccacgtcggcacgcaggacacacagcacgcagcacagcagccgaccagacgaacacacgacacgaccaccaccagccgaaggacaaggggaacaccaccacacgccggccacgcccacagctaaacaaaacaccacacacacagaccacaagactagcgaaccaacacaacgagacagacagaaaaacacgacaccacacccgaaacgcagaggaacagcgcg

SEQ ID NO: 546419 - DNA, 782 bp, Homo sapiens
taaagtgcttcagtgagcacagatatttgttgtgtcatgactgggagttagttttgcttatctttgcctagttcttaaatctcaaatttgtttcacaacttggtaatcagagaccagatcctgtctctaaagtgtaaaaaggtaaacaaaggttttctgtctgaagtaattagatttgaaaaaaactgctagggtaattgagccttgcattagaatgttatttaaatggtttaattagtatttgagatttctaaatttaatggctcttataagttagggcttagtttaaactctcgaaagctgggatcatagattatctatcattactatgtatttaatttaaaacctagttatatcaacatcaccattactgtgaatacattataaatattgtcaacattattgtaaatgtgtattattctttgtggcaaaattaattttttttttttttggaaatggagtctcactcgtgtcacaaagcctgaagtacaggggcgcaatcctcagtccatgaaacctctgctcctggtgtcaagcaattctcctgctcagctcccgagtagtgggattaagggccaccaccatgccaagtaattggattagaaaacggtttcacatgtgggccggtgttgaattctggccagtgtcactcctagctccaaggggtaatgggcaggggtgaaccgacaggagtgccctggcccaaggataggttgccctgcaaaatgaggttaaacaagatttaaacagaaaagatcggtgagaaaaacgtaggcaaaaat

SEQ ID NO: 546420 - DNA, 224 bp, Homo sapiens
acagggactccccacccacaggactccacttcacccacaggactccactcacccacaggactccacttacccacaggactccactcacccgcagactccactcacccacgggactccccacccacaggactccactcacccacaggactccactcacccacaggactccccacccgcaggactccactcacccacaggactccccacccacaggactccactca

SEQ ID NO: 546421 - DNA, 880 bp, Homo sapiens
  misc_feature (478)..(478): n is a, c, g, or t
ggttccggccacaggcttaacgttattcgctgtcgtttgcggtctcgcgcagggcggcccggttcatggtgtttagtcgtcggtatttgacaaccaccatgtcgagcacaataggcaatagaccaagacctaccaagaagcgccctcagcgtgcaacatccaatgtgtttgccatgtttgaccagtcacagattcaggagttcaaaagaggccttcatacatggattgatcagaacagagatggcttcatcgacaaggaagattttgcatgatatgcttgcttctctagggaagaatcccactgatgcataaccttgagtgccatgagtgaatgaggccccagggcccatcaatttcaccatgttcacggaccatgatttggtgagaagttagaaatggcacagatccgtgaagatgtcagtcagaaacggcctttgcttgctttgatgaagaagcagacaaggcagcctagttacanggaagaccttaacctaagagaagctgcgtgacaacccatgggggatcggtggtacagatagaggaacgtggatgacgctgtaccagagagagcaccgtgagttgacaaaaaggggaatttcaacagacatggaggtcacacgcatcctgaaacatggagccaaagacaaagatgactgacagaactttgagcgtgagaaatcttccagttagcattgtgcgttactctcatgttacatactcagacacggttcccccaccgctcatagaacctgtggcatgcaactttagtttcacagctttgcctcttcttttggatgtatttattcctagacctttctgccaccttagcacattgctataatcagatccggaaactggggatgacgggtgtaaaattgta

SEQ ID NO: 546422 - DNA, 938 bp, Homo sapiens
cggcctcatttaataaatatatataccttttacatctcgcttcatcggaatagatatatcggcagactcatatcgtcgtatatgctgagaagggataatatatcgtgtgatatagtatctcataacctcaagacattccctcttagccaatatgtgtgcctattggatattagtcagtggtggcctggataaagaaggtgtggcctaggccatactagttgctcaatcttgaacacatatggactagactagagtacagtaatcgtaaactactcaaaggctaaaatttaaatcgtcaccaaatgataatatgatagcagtgagatgagctttcgcaagacgcacataactttgacatgaaaagaaagcaccaaagtgctagatgaataagcagtcatccctcgtcatagtgttagtaaaccaacgatgctgcaaacggaccgtaataagcgtgttccgccgaactgttccatgcggccaacccataaaatccgcatcagaggtactaacgtagcgtgggtcgacccataacgacaagggacaagcaaccgcgcacttatgcaggtgagcatgctagcacgacacgacacccaaccgtcgtccaaaacgaacagtcgagaacacttcgtaaagacatgcgaatccacaggcaaggagaagcaacttcaaacagactccagacagacaggtccccaagtttggcaacagacccgagagggacaagcaacaaccagacccacgcctaccaatccagccgaagagaccctcccaccccgcgggtaccaaaacctagcggaggtccaaacacacgcagatcacgccgcaacaccagagtacacgacagagaagacacaagcaaaaagcagccagggaagagccacacagaacagaccgacacacacagcacgagagacagcacaccaccccccagcaccgaa

SEQ ID NO: 546423 - DNA, 1044 bp, Homo sapiens
  misc_feature (631)..(631): n is a, c, g, or t
ggctctccgccgatgcgctgtgcgtggaaccactccgggccgacctcgaggcctcctgcactccgcccggacccccggcctgccgtggctatccagtctcttcgttgctattcccatgggtcacaggaagacagatgaggagtttgatgctcgctggcgtaacagtagcttacaagcaaggctcagattatcgcatgcctgtggaattgctgtcatagggataaaccaccacttgttgacctatgatatggttccaggagcccaagaatcattgcatgctgtcttttgcgggccatgctacgcacgtgttagagactgacttttgcttaggtacagttcgtatcctaaaggtgtgagaggacaaatgcatggacctcataaggaaatctacccctatgtcatccaggaacttagaccaactttaactgaactgggagtctccactccggaggaacttgggccttgacaaacgtgtacaccgccatggcatgggcttccccaaggatttcttgacattgcgtacttgacgtgtgaaccagttaccttggcaaagtactgcagtgataacatattacgctgtatttgagaccagaggttcctcgcgttgattagagtacccacagacgcatgntacatgggtaagcttggtactttacttatgaacgggacaatgcagtgttgaagctgagtacctgattcaccaatcaacagagcaaacaaatatggacgggcccagcaaaaagagaaggccataaccaagagagatacgggccaaggggctgacaatcaacagagaagagcacccggaatgtcggggcccaaagtggccattgggaagcgacccttgccaagtcgttcgcacggtacacatacgggagcagctagcaggcaatgcaaaacagcgtaccattgtcatcgacgagaaaactccattcgaaccgatactaaaggggccggtcaagtcagacgcgcgcacaagaggcagggactcccagccctcacggaaccccggaccattggatggatagtgggaggcagggtccc

SEQ ID NO: 546424 - DNA, 427 bp, Homo sapiens
gaggagaacagggcgccagatctatgccagggagatctcaagcctggtggacaacaaggagcttcgaactggtgctggtgggcatgggtgccggacggggcacacagctccctcttaccacagtcacccactgggctggatggcgagcagctggtcgtgctgaccacgaggccctcccaggcacaccgtcgcatgagccttagcctggctctcatcaaccgtgccaagaaggtggcagtcctggtcatgggcaggatgaagcgtgagaaccaccaacgctggtgagccgggtgtgcatgagcccaagaagttggcccatctcgggtgtcctgccgcactccggccagctggtgtggtacatggactacgacgccttcctgggatgagggcgcctgtgcccctttgccggcttcgctcctgtgctttc

SEQ ID NO: 546425 - DNA, 394 bp, Homo sapiens
  misc_feature (34)..(34): n is a, c, g, or t
  misc_feature (100)..(100): n is a, c, g, or t
  misc_feature (189)..(189): n is a, c, g, or t
  misc_feature (225)..(225): n is a, c, g, or t
  misc_feature (238)..(238): n is a, c, g, or t
  misc_feature (250)..(251): n is a, c, g, or t
  misc_feature (277)..(278): n is a, c, g, or t
  misc_feature (282)..(282): n is a, c, g, or t
  misc_feature (284)..(284): n is a, c, g, or t
  misc_feature (297)..(298): n is a, c, g, or t
  misc_feature (300)..(301): n is a, c, g, or t
  misc_feature (313)..(313): n is a, c, g, or t
  misc_feature (318)..(318): n is a, c, g, or t
  misc_feature (320)..(320): n is a, c, g, or t
  misc_feature (332)..(332): n is a, c, g, or t
  misc_feature (369)..(369): n is a, c, g, or t
gacttcatggagaatgaatgactcggggggattnagatcatgaagtcatgagaagaaggcctttctgcgccagggatgatgtttctcagatatgcaatantcacgcttgtgggtttttttcttctatttcttcgcagcagcttattgagttcactcagttaaagtcatctattttctaacctgagtgtncggagggtgccactcggaacatgtcaagtgtttgtnaaacagcattttngacgccacctannccccataaggcggtgttctcgagccnnggtncnagaggtgaacganngnntctggtttgacnactgnangggctacatcancaggtcctttcaccaactgtaacgggagggcatgggnacatccccacaaaccaccagacact

SEQ ID NO: 546426 - DNA, 334 bp, Homo sapiens
tgacgagattgaaaaagaagagcaggctgctgctgaaaaggctgtgaccaagatggaacttcatggcgaatggactgctccagctcctgagttcactgatactcagcctgaggttgcagactggtctgaaggtgtgcaggtgccctctgtgcctatccagcagatccctactgaagactagagctctcagcatgccacggaagactggtctacagctcccactgctcaggccactgaatgggtaggagcaaccactgaatggtcttaagctgttcttgcacaggctcttaagcaacatggaaataaggctgatggaaaataaacatcagtttct

SEQ ID NO: 546427 - DNA, 171 bp, Homo sapiens
cctcacattagctgtatcatattatgtggcaaagaccatccagttatacagtgtaatatcagagcagcttggaaatatacagcatagtaatcaactgagaataaggaggagggaaggaggtgtcggatattagagaaatgaggagaagctctccacacaaggagatgcaag

SEQ ID NO: 546428 - DNA, 138 bp, Homo sapiens
gtggggaaaaaaaaaaggaaaaaaagaaaaaaaggtttttaccgctgtttgttttttaatttaaaaagaaagaaaaaagaactttgtcctggacctttttcagacttgccgtttacagccttaaagtggttcccccga

SEQ ID NO: 546429 - DNA, 345 bp, Homo sapiens
aggatcccccatcatgaccgttcctggaacgtgtcttggcgcctgtaccctgggcctccggtatgtcgcacggtctccagctatgctcggtgtagctgcagctgctgcaggaccagctcgtcgtcgagacgtcacagctctttcttttcagcattggaacggtatgcagcggataaagacgggctccgccttccctagtgcctccaatagctttttcagggatgtctggaactgggcgctgatgcttggtggctttttcttcttgtgcaggtgcagtatggacttggtggtgcggtcgtgcagagtcatgctggtcggagtctcagttatagcttgtgaggacgg

SEQ ID NO: 546430 - DNA, 247 bp, Homo sapiens
tcgatctctagcaggatccccttattcgtgttgcactaggacataccatgaatacttttgtccatggaacaaatgacggtgggaattctaaacaaagcaagttttaaacacctgtgtttcacttcacagtttacaagtcccatcacgctgtatcttaggactcggcagcttttgaaggtacagaggccacacaagaaccagcttagctgagcatcattttaggccctcatttggaattgtccctttg

SEQ ID NO: 546431 - DNA, 185 bp, Homo sapiens
agactgtggtgctgttcgtgggcctgttgttcgccagccgctggttgctgccgcgcctgttccgtgaagtcgccgcgtctcattcggcggaactgtttgtgctgctggcgctggtgattgtcttgctcaccgcctggctcacccacctgctgggcctgtcccctgccctcggtgcattcctgacg

SEQ ID NO: 546432 - DNA, 114 bp, Homo sapiens
tcgccctttttttcccagggcggatgtacctgcgctcagttgcctgggcgggctgagaggcgcgggttgaaaagtctcgtacccgagttgggagagagagagaagagcgccatc

SEQ ID NO: 546433 - DNA, 182 bp, Homo sapiens
ctctgatccggagtgtccgggggccaagtgattacttcgagtgtgcctaagatcgttcaactggggaagggacagtgttctcaccaaatgatattcggaaaatgctggatatccagagggcaagaagagtggaacctttacctaagcaccatgtgcaaaaattaacccacaatacatgaaag

SEQ ID NO: 546434 - DNA, 1480 bp, Homo sapiens
aggaagatgccgaaaggcaaaacgaaccggccaacggcgaaagaaggtggctccggccccagctgtcgtgaagacagcacggaggctaagcaacagtggtgaatcccctgtttgagaaaaggcctaacaacttttggcattcggacaggacatccagcccaaaagagacctcacccgccttctgtgaaatggccccgctatatcaggttgcacgcggcagagagccatcctctactacagccggctgaacacgtgcctcctgccgatctaaaccagctcacccaggccctgcgacccgcccacaaacacgcctacctcagcctgcatctaccgcctggccccactcaaagctaccacgcaccacgacgcaccaaccgctcacgacggacacgaacggcccgagcaactgcctcgcgccccccgcggccccgcacgacacgaacggccctgcctcggcctacaccacgcgcgcgaccgctccccaacagaacacccagtacgcaacccccggtcccctccgccagcccagcgcagctctacaccaccccgctccaacccaaccctcatgcgctggcgcaacggaaaccaccgcacacacggcctctcagccctcgcggtccgcgcagcactctcggccgaccaccgcaaccgcttgcgccaatcccacccactccccaaccctcgccgtccgctcctccttcgctctgacccccttgcccccccttgctcgcctccggcctcacccaactcgcgcgggggttctcccccctgctcaccctcgtcccactttcccctcccaccagcgggcccacccgccgccaacccgcacacttgggcgcccacccacttcccttcacgccttccccccacacgcgcgcccccggcaacccctctgcccacaccctcaccctggtctccgcgccccccatcttccgcacccacccaggaggcctcgacacacactcttcaccggaggcaaaaacggcacgcacacaacaccgcggcctcccccctctacacgacaccacttcacaaccgcctcaggcgacttggggaaacacgccgctaacttcacacgagggagcccacaacactcacacccacaacgtggacaccacagcgaattgacccgccaacatccgcaacgacaacttcccccagcaccaggccccaccaacttgccagcgagccttggcgcacaaaacttgacctaccccttgtgcgagcactcccatcaacaaccactccctggcaccgacgccagtcacggcatctacattacgccagccaagacgccctctccgggcacaacaaacacgcgcttcccacaacgcgaggcccttacaccacacgcgcaaacccctctggcccctccacaccacaaacaacctctgcgccgcgcccatcaaccaactgcgttacaccaccttggcacttccaacaagctctcatcctgtggccccacccactttcaccacta

SEQ ID NO: 546435 - DNA, 692 bp, Homo sapiens
gtgatcacaaagcggggcgcaccgcgtggcgccgggcaacgagccggtgaacgaggcgaggcccgtgtgcccgctgtgttgcaatgcgccctgcctgtgcggggagatgggtgcctgacggctgtcaggcccgtggctggcggcttcccttagtgctgccttggggctgcccttcctccgtgatcctggccgtctcgcttgcccccagctcctctgcacccccattttctaccgaacacctccttccctagtcctgtgcccatcccaccctagcgtcagtggggcctttcttgaaagaagcccgaaactagaggcgccctggtcacgcctgtgtgaaagaggacgctgggatatggcatggtgatcagacaggcagcataaggttactccgggatcatttggaaaggctatcattgaccgggaggggttgcacacaaaaggtgaggccgagtatgagagtctgctctatggtatgatggcacttgggcgagagagggacggggttggccctggaatcaaagcgctacagtacacatcccgtaccatatcgcctaccgtacggagattagtacttccgtttcgatacattggacttggaatgggattggcctggactgataagaccgggtcgttaaggaggtggacggaggatccagcttggcggaacaccaaatgaagccccagcgacgatt

SEQ ID NO: 546436 - DNA, 434 bp, Homo sapiens
tctaaggatcctacttttcacagggaagaaaaggcgagcttcgcagctacatcagatccggatctagaatctctatctcacgaacacggacgaataaagcagtggtaatgtcgggcgtttgaaacatagtggacagatatgtggtgatcatgctttgtcgttgacgtccccgctccctgaatcggactggcgtgataatatactgtgtgaccttgcgccaaagataaatctgcagacgtcacttattcattctcggatgttctattgctcacgatcttcgtcgagtggagagaagttaggctctcacgttaatccagttctaactcatgagtcaaactgagactgcaacaaaagaacgccccttttttcttttacatgattttccctttcccctgagtatacttcctgaaccaagaagaaaacaatcaacagga

SEQ ID NO: 546437 - DNA, 488 bp, Homo sapiens
gggcctgttccccctcacgggagtcctccgcccgggggtccggaagcagtcgacggcagactcctgtgccctgctgagccaccctgatgggtggtccctgtgtgcctcctgctgtgaccctgtgaatcttggtgcccatcgctgtgacccagctgcccctgccccatgtctgccgccagtgggcttccaccacgaccgcacgtgaagtgggggggggggggcgctgcagtgcacctagccatgtggcaggacacttacccgtactaacccggtgacacacggtaggacccagcaagactgtagtacagtgggccatggatgacgaacggggtagaaagggcagaatgaacctgtgcgcccgagaatctgcccccagggtgtccacccggtggaaatgccttgctgagaaggggtcaacaccacacggagccttgtggccctataagcctccaaggtggaacacacacctgtgatttccacggttgggg

SEQ ID NO: 546438 - DNA, 144 bp, Homo sapiens
gccgccgaggataaccgtgtgctattagccatggtcaaccccaccgtgttcttcggacattgccgtcggacggtaggcccttgggccggttctcctttaagctgtttgaaggaaagggcctaaggaagcagataatttttcggg

SEQ ID NO: 546439 - DNA, 491 bp, Homo sapiens
  misc_feature (75)..(75): n is a, c, g, or t
  misc_feature (168)..(168): n is a, c, g, or t
  misc_feature (173)..(173): n is a, c, g, or t
  misc_feature (227)..(227): n is a, c, g, or t
  misc_feature (249)..(249): n is a, c, g, or t
  misc_feature (251)..(251): n is a, c, g, or t
  misc_feature (253)..(253): n is a, c, g, or t
  misc_feature (255)..(255): n is a, c, g, or t
  misc_feature (257)..(257): n is a, c, g, or t
  misc_feature (260)..(262): n is a, c, g, or t
cctgcacccagccatataaaggctttataatcttctttaagtattctcacagaagactcttcctcatctttgtcnaagaggaaatactaaataaattattgcccaggcattgtaatgtaggtctcaaattctagaactgagtaaatcagttgtagttagtaatgtttnccctntaagactaagaatgtatcccagaagtggacttagaaaataatgagagccgggcntggtggctcatgcatgtatccnanantncnggnnnctgaggcagaaggatcatttgagcccaggagttctagaccagcctgggcaatgtggggaaaccccatctttaaaaaaatacaaaaattagcctggtgtggtggcatacgcctgtggccccagctacttgggatgctgaggatgtaggatcatttgagccgaggaggtcgaagctgtagtaagccgtaatagtgtcactgcactccagcatacgtgacagagagagaccc

SEQ ID NO: 546440 - DNA, 580 bp, Homo sapiens
  misc_feature (1)..(1): n is a, c, g, or t
  misc_feature (188)..(188): n is a, c, g, or t
  misc_feature (204)..(205): n is a, c, g, or t
  misc_feature (245)..(245): n is a, c, g, or t
  misc_feature (521)..(521): n is a, c, g, or t
ntttgcttattccttgtgtttttcatgggtgaatttcgttggctcacgtgaaaaatattttagacgaactaattgagaacttctcttcccgggtcctgaccgtttcctgaaaactgttatgacaatactaatgaatttcaagggtaacctatgtaagtctatctctatatagaagtaagatgcattantattctgctatcagtnntagtaatgacatacagtcccatgttttccaaacattgttngactactccagaaaattaggctgtgaatggcagcagagtggatggatttttcattcataacaggcacagatagtatatatggagacaagcatgtttatcctgagaatgtgaatgctgtggactgcaactcaagatctcccattactgagaatgggtcctttgccctctggtcactcttttttttttcaactgtcaatttttatttctttttatcatagcggcggcagcaaataagaatgctgacatcatttctaccgaggggggcggggggacgantttcatcttctaccataattaaatagtgcagctgaaaaggcattgagttggtacatttc

SEQ ID NO: 546441 - DNA, 148 bp, Homo sapiens
taccaactaaatcacagtcaaaataaatgaagagctcaagatgacatcagaacccatatgtctataagtcctggtgtagtagtggatagacaagcagaagccagattatgatgacatggtgcatcgatccaagaataatatgccacat

SEQ ID NO: 546442 - DNA, 389 bp, Homo sapiens
  misc_feature (14)..(14): n is a, c, g, or t
  misc_feature (300)..(300): n is a, c, g, or t
ccatccatagttcnaacactatgtcaccctccctgctttttaacaatattaacaggcttagggattagtgctgacttccctattagttcattaccctgttaattttaaaaagaaataataatggctgggtatggtggtgcacgcctgtaatcccagcactttgggaggctgcggcaggtggatcatgaggtcaggagtttgagaccagcctgaccaacatggtgaaaccccgtctctgctgagaatacaaaaattagcctggcgaggtggcacatgcctgtaatcccagctactcaggancctggggcagaagaatcacttgaacccgggaggcggaggttgcagtgagccgagatcatgccactgcactccagtctgggcgacagagt

SEQ ID NO: 546443 - DNA, 227 bp, Homo sapiens
ctgggacgcgaataccatactcagtctggtagtcaccctcttgagtgtcgggatggacgaagttacaacgttcgtccactctgacttctcggactcgcggcgtatggtcactcggcgtgtgcagtttggtgtttcggcgtgtgcatgcacacgccgagactccataccaccctgaacgcgcccgatctcgtctggatgctcggaagtcgctgtggacgaagttgttg

SEQ ID NO: 546444 - DNA, 406 bp, Homo sapiens
  misc_feature (7)..(7): n is a, c, g, or t
tccccgntgtgttagatgttaaattggtatcatgcagaggccgagataatctagggccttctatgctctactaaggatccatgaacaattctgtgggccagagattcttcacacatttagtgtgctccaaatcacctgacaaaacctctgaaaatgaattatttctcacattcacttcccagaaacgcagatgatcttatgctagtttgagatcgattgcattttaggcatttagatatagttaattatgtagcccgtcctctacccctgtgatattcaatataacctatggcgtgaggtatattttacgatgtgctttatcttgcttttttcacaagtaaagcttcatctcaatccacagtacggaagatattccttgacacctccattcacggcgtccgagctc

SEQ ID NO: 546445 - DNA, 138 bp, Homo sapiens
cctgactacgggagttgggaggacccgggacaacgcacagccgggaaatggactcagtggcctttgaggatgtggctgtgaacttcaaccatgaggagtgggctttgcttgggtccatcacaaagaggatctctacaa

SEQ ID NO: 546446 - DNA, 1549 bp, Homo sapiens
  misc_feature (755)..(755): n is a, c, g, or t
agcgagcgacgagaccaaggccgccgaggagcccagcaaggtggaggagaaaaaggccgaggaggccggggccagcgccgccgcctgcgaggccccctccgccgccgggccctgcgcgcccccggagcaggaggcagcccccgcggaggagcccgcggccgccgcagcctcgtcagcctgcgcagccccctcacaggaggcccagcccgagtgcagtccagaagcccccccagcggaggcggcagagtaaaagagcaagctttgtgagataatcgaagaacttttctcccccgtttgtttgttggagtggtgccaggtactggttttggagaacttgtctacaaccagggattgattttaaagatgtctttttttattttacttttttttaagcaccaaatttgttgttttttttttttctcccctccccacagatcccatctcaaatcattctgttaaccaccattccaacaggtcgaggagagcttaaacaccttcttcctcgtgcctggtttctctttaatttttaattttttccgcatcagtattaaggttttggcatacttggcatctttattcaaaagtgtaaactttcttgtgtcaatctatggacatgcccatatttgaaggagatgggtgggtcaaaaagggatatcaaagtgaaggtgataggggtcacaatggggaaattgaacgtggtgcataacattgccaaaatagtggtgccactagaaatgggtgtaaaggcggctttntttttttttaaaaaaaagagttataaccagtgttattgggggaggcgaggtttcacaacattacagagttttgggattaaagaagaggaaagagaggaaaaagaaaaaaaaccccattccccagaattataaaaaaaaaaaacggaccaaggtttcagaggaagcttcatatttaaccctatgggagaattttgaccacttatttctccgatgtcacagcgtggtccccgatccgagggattacacagtcaaaatctcacactgtggtataagggcgtcatagggcgcaatcgcggggggttattatagacaccctacaaaaaagggtggtaccaacccgcttctaaccccgacgccagggggtgctcacacacccggggggacccactgggctctaccacaaccgacaccccggggcaatcccccacaaaagcaccccagcacgctctggccacccttctacaccacccggagccccactcctggggtaaaacatgtggacgccacctgttgcaccgcttaaaaacccgcagaatcctacacccaaccccagcgcgggacatcacgcgcaaagcggccaaggggcaacaaccagggcgccagtcctcccggaactaacggcacaaaagagcgctcatcaccacaacccgctggcgaaaacggggaaaccaccctcttacccccgatccccggaaaaccattccacacccgctcgcaacccgtaagggctgcccgagctacacagcgacgccctctacacaccgcaacacccgacacgccacatgcggaccaaa

SEQ ID NO: 546447 - DNA, 336 bp, Homo sapiens
aaaagtagacgacggtggacaaggcaaggtctcttccccacagagagagctttccaggctggcactggacaggaccggggggcagcggcgggtgcctgggggcaaggcagaggagatgagtgagcggatgtctcctctctgatggccctcccacctccagctcgggagtcgaatttctggccatggccgagcgcttcagcacggtggcgctcgggtctatgtcttttggtcatgtccccatcaatggtccacctcagggctcaaatcagcagtccatttcattccctcccatcagcaaagacacaagggttccgggcccaagcagcactttggcat

SEQ ID NO: 546448 - DNA, 1093 bp, Homo sapiens
  misc_feature (799)..(799): n is a, c, g, or t
  misc_feature (802)..(802): n is a, c, g, or t
agcgagcgacgagaccaaggccgccgaggagcccagcaaggtggaggagaaaaaggccgaggaggccggggccagcgccgccgcctgcgaggccccctccgccgccgggccctgcgcgcccccggagcaggaggcagcccccgcggaggagcccgcggccgccgcagcctcgtcagcctgcgcagccccctcacaggaggcccagcccgagtgcagtccagaagcccccccagcggaggcggcagagtaaaagagcaagctttgtgagataatcgaagaacttttctcccccgtttgtttgttggagtggtgccaggtactggttttggagaacttgtctacaaccagggattgattttaaagatgtctttttttattttacttttttttaagcaccaaatttgttgttttttttttttctcccctccccacagatcccatctcaaatcattctgttaaccaccattccaacaggtcgaggagagcttaaacaccttcttcctcgtgcctggtttctctttaatttttaattttttccgcatcagtattaaggttttggcatacttggcatctcttttattctcaaaaaggtgtgtaaacctttctcttgtgtggtcaatctctatagtggtacatgtgcccattattgttgaaagagagagtgggtgtgggttcaaaaaggggggattactcaaaatgtgaagtgtgattagggggctcaacaatgtgggggaaaaattgtggataagtgtgggttgcattaacattgtgccccaaaaaatattgagtgttggtggcnccncaattttaagacaaaacagtggggtgggtgaccagagggccgttgctcttttatatattgtggttgctgtttttttatagagagaaaaaaagggttttttattaccccagtgttttttgtggggagagaggaggagggttttataaacaaacatctaaacagagtttgtggagatctatagaaaagagggaaggagaggaaaaaatagagaaaaaaaacgccacatttcccccgaatatttgtaaaaaagaaaaaagggggctattaatggtttctaggaggagttacatc

SEQ ID NO: 546449 - DNA, 687 bp, Homo sapiens
gggcctttcttcagtccccacgtgggatccttcccggcaactttttcgagaaaaatgcccacattcaaggcggaccgtggggtggggggtcaggaaaaacatgcgctcctggccgatcagatcctggctgggaatgcggtgcgggcgggggtccgggataatgcggtcggggtcgcgggatcatggataagcgtgaggaagagtatgtggggccccggcatgagccgacaggatgtttgcagtcgacgcacggcagatactaggaggaactcgaaggccgagtctgtgggactggggacaagcccgcggcgccgtcgggaacgcaccaccgcggcgtgggtccaagaagtgcctcaggagtggatcacgatgacgaggaccgaggagtggcccatccttggtagaaggctgccacaatgacgagcagggggacaatctattgctagaaggtggcatgtggacccgtgtacggatgaggcgtgccactatgcagatgttcatgaacaaagaatcccttccgtgccatcgtgcaccctggtatgagactcatcatgtggacattcttgaatgagaaggacagacgagacgttgaaacagggagtgtcagaaggtgtactgcttgcctactgccgccactgaccccggggtctgacatgttcggggggtccgcagggatgtcaacatgcg

SEQ ID NO: 546450 - DNA, 464 bp, Homo sapiens
ttgcaaattgcctgggatacagaaaataaggacaaggtctgggtgtagtggcttatgcctgtaatcccagcactttgggtgaccaaggcaggaggatctcttgaggccaggagttgcagaccagcctgggtaacatagtgagaccttgtctctgcaacaaaatttaaaaattagccagacttggtggttcccacttgcaatcccagctatttgggaggctgaggcgagaggatcacttgagcgcaggaatttaaggctgctgtgagctatgattgtgccactgcactccagcctgggtaacagtgagaggcctcatttcaacaataaaacccagcttgggccgggcgcggtgctcatgcctttaatcccagcactttgggaggccaagacgggcagatcacgaggtcaggagatagagaccatcctggttaacacggtgaaaccctgtctctacaaaaaataca

SEQ ID NO: 546451 - DNA, 854 bp, Homo sapiens
ggcttccgtttctggtttggctctagtgtaagggtttcgttcagcggctgctcaagatgaaccgactctgtcgggaaagcgaaacccatggctccgcagcccagccatgaggtgactgcaatggtggaagggggggtagcaggtagatgcagaatccaatgggtaccaatgataggatgtatcgtcgattggagtgctggagctcagtgagaaggatatatagtgagtcagatctagaagatgagagtagggtgtcttgcaaagaatatgtggtgcatagcagagaagccttgtgaagttttgaagcaaaagaggttgtatgaagcagcattgcggaacgagatcgtgtgctcgcaaagaagtcatgtcaatcagtggtgacaagccatagtataccatccagtctttgagaggaaatcaatgacaagtgttgatgctatgaaactgggagttaaaggaaatgatgaaggtcatacaagcaaagtgaggatcgaccaatgatgtgaggatttacaaggaccagctagaggatatgatggaaggatgctattgaacatccaagaaggcatgagtggcagttttgggagccccagaaggtggagtgacgatgattgacgaacgcagagtttgcgttgcctaaggtggatgaggcttctgggtgagtgaagaacgttcttatcgtgcatgtggccgatctgcaactggaattccagaaggtgtcccaatgataaaggagaagggtgggttccgggggaatgaatttgggttgcaatggtccggttcatagatgggtcataagcatatttgtaagcaaaccttttggataggaattttctccattgaaaaaggaggtc

SEQ ID NO: 546452 - DNA, 1075 bp, Homo sapiens
tcatgtagataaagcgatcagagagaccagcgagctcttctctagtgcttctcgttgttcatctacgctatttgagggtgttttttttatctgggcgaggattgttgttgttccctcctttagtggccctattgtggcgcccgcatagattgtggacaaggtgttactcttgtgtgctgtgtcctcgtctttctcgtggtgtttaccccctttctcagtgtccccggacattctcggaactcccaggtgtggccccatcttgcgctttgtccaaggggcgctttgcttttcgccccccggtgggcacccggagacctcgcccatgggaatgaaggtgcaactcccagcctggtctttgaccggctccgcttttacggatattcggggacatcccatagcggtccagaatattgcttcccaaaattcccatgagctaagctgtaaccccgtgattatgatgtgaattaagtagccattaaagtgttttccctggaccctgatggaaatgtatagaataatatttaggccatacgtctgcatcttctgaaatccatggaattaaagtctgaggacgagagcacccctgggagcgaaagctggccctttttctacgaatgccctaccattaaagatgggccacctatgcgccccctgccctacttccgttaccctgagagtcggcgtgtggccccactctccactgttgcctccccgcttctgggtgtggctttgagagtggaccggtatgtgtgtgaagtggtgtatattggaagcatctccctacactggccagcccagtccattactagtgacctctgcgggagatcatccggtgctaaaacattcaccagttgcccaggaggaaaatactgaatgactgcttaagaattaacccttaagacccagttcatagttaataccaggtttcaccagttcatgcctgtggttttgtgtttgttgttttgtgtttttttagtgccaaaggtttaaatttatagttgtgaaccattgcattgtgtgtgttttttctaagtagattcaccagataattaaaaattcacttttttttccagta

SEQ ID NO: 546453 - DNA, 967 bp, Homo sapiens
  misc_feature (946)..(946): n is a, c, g, or t
ggagctgaacctgccgactggtattgccatgtctatgaattggacaagaacttgaatcctatcaagcccatgcaagtttctgggggatgaagagacggtgcgcaaagccgatgtaagctgtggctgtccaggcaaggccaagaagtgaaggccggcggggaggatactgtccccaggagcacgcctccctgcccgttttgtcccgtctgcgccctcccgaccgtgcacatgttgacactgaccacatctgtagacatcttgagttgtagctgcagaggggggaccagtggctccctattgtcatttttaggcatttgtcgactgcaaccactcccttcatacgatctagtcagaatagcagttctagagcacaggttctcagtctaagctatggaaaagctccccttatccaacagagtttaaaagtagtgacttgggttttggcgagtgcttgtttactaaggacttcgggggaggaaccatgctaagccactgaccatgtgaggagaagcaacagagcctgtctgttacccatgagcggagtctggactctgttcttcgtgcagtcaggtcactgctactggctgggggctctagtcattcagtggaagacgaaatgtacctgcgtggtgatgtgacagctgttgctcctgaaccagaggatctggtctaggtgggatcaatcctgattcgtatgtgttaattactttattagacagcattggatatttatacaaaatgacctctgggttctgtgggggaaatgtgccatgtgtcttcaaaatagcctctcaatcaatatggtcagtcttgcaccgagggagagggccgcggatatcaacccgccgtgatgagaagacctgcgcaaagtcacatgacagctgatgaccccgggggtagtttaactctgtaggggagaaacaaactcgacggtccgactgtcacngtgatttttttgtctgtctta

SEQ ID NO: 546454 - DNA, 303 bp, Homo sapiens
cgggggggaaattggccccaaaaaaaaacttggttttgggggggttttaaatgggaatttttaaaaccgaaaggtttcccaagttttggggatttgaacccctttgcgaaagggaaaaaagcccggtttaaaaacccccccctttggggcggggggtcaaatcccgcccggggcccgcttttttggggcgggggggtgggaatgggggtttaaattttaaaggtttttttttaaaggcttttttggaccttggaaattacccgggaattttgggggttttaaaaaaaggttggtggaccccca

SEQ ID NO: 546455 - DNA, 457 bp, Homo sapiens
  misc_feature (75)..(75): n is a, c, g, or t
  misc_feature (81)..(81): n is a, c, g, or t
  misc_feature (122)..(122): n is a, c, g, or t
  misc_feature (146)..(146): n is a, c, g, or t
  misc_feature (150)..(150): n is a, c, g, or t
  misc_feature (159)..(159): n is a, c, g, or t
  misc_feature (184)..(184): n is a, c, g, or t
acttttacaaaaaagaaacaatgaaaaaacaaaaacacacaaattatacaaaacataacttattcatttcacccnaatatncaaatgattaaaaaaagaatttgaaattccgaaaaggcatntccaaaaaacactatttttctcangaanctttattanctaaagcctccataaaatctttcanatgttaagaagcattcctatatatgttatcaccagcacatttacatattcttacaagtatattacatccagaatctacaaggaactcaaacaaatcagcaaaaacaaaacaaacaatcccatcccaaagtggactaaggacatgtataaaaatatctcgaaggaagatatacaaatgaccaacaaacatgaaaaaatgctcaacatcactattgatcagggaaattcaaatcaaaaccacaatgtgataccacctcactcctgcaagaatggc

SEQ ID NO: 546456 - DNA, 301 bp, Homo sapiens
ctctacaggatctaagtcataggaagctcaaagcagagatgatttaccactggaccacaaaaacaccaagctctcctctctgaaaatacaggccgggggtggtggctcacgcctgtaatcccagcactttgggaggccgaggtgggcggatcacgtggtcaggagtgatccgtctctactaaaccccgtctctactaaaaatacaaaaaaattagccgggtgtggtggcacgcacctgtggtctcagctactcgggaggctgaggcagaatcccttgaacccgggaggcacagattgcagt

SEQ ID NO: 546457 - DNA, 122 bp, Homo sapiens
gggggggggggcccccccctttttccccccccttttgggggggggggggggggggtttttttggggggggggttttttaaaaaccccgggccccctttgggggccccttttcccctttttta

SEQ ID NO: 546458 - DNA, 1449 bp, Homo sapiens
tttgtgccgcggcttccttgtgttctccgcactctttgctccgctgtttcgtagggtctgtttcttatccatctctcaactatgttgtccgacggtccgctcagtctcctgggcgtccgggctctctcgtgcctctcttcttgtatggctcagggtctggtattgcgcttgcttgcctggctggagtggtctttcgctccatcctttatttaacctcttcttctctcgcccatcttcggtgttacaacggttcttgggccggcttttcgtcctggcctgtcttccataaccgcgttccgtgtattcctcccggccgttcttattggtaaggaccgcccgcttccttttttaagatgttctattgaagccgtctaaggggaggcgaccactcgctggtttggcctgtctcaacgggtaggtccgtagtgcctcttccctagggggttctccaaccctgctaagcgctggtggcgagcgcctgggcgcaccgctttttttccctctcgcgggccgcatctttctatggccgttggtctttgtgcttcttagtatatgctctagctgcttggcctgaaatggtggccctccctctagcgttcctctttatctcatagcgctccctcctggcccgcccaatggttccctctttttggtctcctcttaacagattggtcttgcctcccgtgttacgttgctcgttcagttgagttagtcccgcgtatttaccggttctctcgacctgtagtcatgtcagtactaccttgtgtaacctctctgctctgcgggttgctcgtattggtcaatgttcgaggtatcgaatcttgctcccagctagcctcctttttgtggtgcgatgattgccgttctgtcgccattaaaacgacatagtaatgtcttctcctggtatacacgatcagcttcctgttctccaaacgaaggtgtaacacggtgagcatcagataatgacagcagtgatgtctgtggtccactcttaactcccttcaatgttgccactccagcagtagtctgcttctttgtcactcattgaccctgtgcggcgttggtttgaaatctcacaacatatattgtagtataacttctcaaaggacatatgtatctgtagccgtgttgttgacactaatacagatgagttaaggaacaacagctgatctctggggaagggagctactctacacatgttatacacacacacacgctgcacacacacacacagcacacagcacgtatatatatatatattatttacagggaaatttttcagggtttacaaaagagtatgtgattggtagtaagagacacacagaatgtttatgaagaaattgcatcttgctttttcctgttacagttgaacttcctttatagtttaaatataaccgtcttgagatggcacattcctacgactgaagaagcggtctggagatccctaat

SEQ ID NO: 546459 - DNA, 2987 bp, Homo sapiens
tttctctttagaacatatcccacacttgtgaaaactagcctgtttaaaaagaccaaaagaaaaacaaacaaataaacaaaaccaaaagaagctgaacttgttttaaagctagaaaatattgaattagtctaactagttttatttattttctttctttctttgtaggtgggcaccatctaatagttttattttttagttacccttttaagaatttgtaatttaagccacacgtaccttttgttgtgttgtgatatttacacaccagtgttttatcctcactcttttctaccttctagtgttagcttccccttgaagaacacacccttaaatgtctcctaggctgtattgcttcatcaagagtgtaaacaattacagcataaaatggtacctttggaaatgaagtcatgcgtctttcttaattgctgaactcttgtaattctgaagggggtctattttagcctgtacttactcccatacttgctaacacaagcaaatgggcctacacatacagctaggaaaagcatgaatctaagggtttcttagggttccataattatgcatggaatgtgcaggagcaggaatgtcaaagtaggagtaatcatgatagatttagaaagggccttagaggttagttggtacaaaatattttacagtgaaggaagctggaattaagcaggtctgggtttcttcttcctagcttcccctcccttcgtcccattgtaatatatggctgtcaggatgacgtttctacagcaaatttgatgtgcataaactttgctggcagctttccacacttttagaataaagttctgatttctaaaggtcacatatgaaggccttttgggatgtagtttttgcttgtcttggtagcttttctcaccacttgtacacatactgcctataatgatcaaattccttggtggtcttatctttttggaccatactgcttgtaattctctaattccttgatggttttatctctttgaccactctggttttatctcatttgaccatgctttcacacatgatattctttctgacaagaaggcgccctccaccttcccccaagacacacattatctagttcagaggctttcaacaaattttttcttttagtatgaacccagtgtggattgcaattacattatgaccatatacatatataggtgtgtgtgtatgaatgtacatgtgtgtatgtatattatacgtaatatatattttatataaaaatctaaataattgttatgaacatacttatttttatatgtgatatacttaactttgatattagtaatatctgccctttgtacctgtgcacaacagctttggtgttggaagcctttttttgagctccaggtctgattcgatcatcttcacttgctgagtcacacgtcatagtatttacttgttttgttcctctcactgcctcagacagctcttgagggtagagactgtgtctcacttgtcctagcacacaggcacagacctaataggtgctcagtaaagagataatgaagaaactggacccagtgttctgctacaaattgatagccaaaatcgcaaagacagaaaagagccccatatttctcgattctcaagacagagctatgcatcagaatttttcatttagagtaggacttggagaatggctagacataggatgaattattttttttctgagggggaaatgtgagaagacactatcatatatactcttagttataaaagaaaaaacccacaaaatacaggtattgagacttaattacatacagccaaattcacactttttaatatacaattgttttgaaaaactacaattgtgtaactgctatcaaaatcaagatatagatcatttctatcaccacataaatttttttaatgcctcttcgtagccagcctcttctccaccccccaactgttgccaccactgatcaattttctgtgtctataggttcaccttttccagaatgctgtataaatggaatcgtgcaatatgtagcctgttgcatctagcctcttttacttagcataaggtgtttgaaatcatccatattgttgcttgtatcagtagtctgctcctttttgtgctggataacattccattgtatagacataccaaaatttctttatccattcactaatttaggttgtttccagtttggggatatatatacacatatatatgtgtatatatataattatatatattattatatattatatttatatataatacatatatattaaaacatatataattatgtatatataatttatgtctaggattgctgggtcatatagtcataagtatatgtttaattttataagaaattaccaaactgttttccaaagtggttgtaccatcttgcttgttgccaacagcatatgagagttccagttgttccacatctttatcagtacttggtattgtcagctgctatttaaaaaaaatttagccattctaaaagttgtatcatgtctcattgtggtctgatttgcatttccttcgtaactactatgaacatcttttcatgtgcttatttgccatttgtgtatcttatttggtgaagtatctgttcaaatcttaaaagcccattttaaaatcagacttttcttattattgattataagagttctttctacattgtaatataaattctttatatgttttgcaaatatttcttcccaatcttttttgtgttgtttcattttcttaacaatgacagcacagctttgaaagtctttgaagggaatatcctaaaaggtactaaagtagaggttttaccagcctgggcaacacagtgaaacctggtctctacaaataataataaaataattagccaagtaaggtggtgcttgcctgtagtcccagccacttgggaagctgaggtgggagaattgcttgagcctgggcagttgaggctgcagtgagccatgattgtgccactgcattctagcctggggcaacaaagtgagactccagtctc

SEQ ID NO: 546460 - DNA, 170 bp, Homo sapiens
tccgagatcacgcattatagccactagttgtcatcattatcagcatcttcatcttcttccccttcttcctcaccctgcagtagcagggttggcagcggcggtctcctcctgctgctgctgttgctgccggtgaagctgctcacaggcagcccgcttctccctctgcttct

SEQ ID NO: 546461 - DNA, 95 bp, Homo sapiens
aaccccactctgtctttgttcaatgctcagcttttggatgtgaatcctataagcccccgcataactaaaataaacaagcccttcagtaaaaaaaa

SEQ ID NO: 546462 - DNA, 148 bp, Homo sapiens
ttcaggcttgttctgcctgctcgaccgctgccctagcatttccccgacactcagttgggtgcgcaccacgtacttactgaacttaagagatccacggtcgggcagactcatgcctgtaatcccagcacttagggaggccgaggcaggt

SEQ ID NO: 546463 - DNA, 187 bp, Homo sapiens
attatgttggttgggaataagaaagacctgcatatggaaagggtgatcagttattaggagggaaagctttgcagactcttgaatgcagcctttttggaatctctgctaagaaactagacttctgtgatgttttcgaggatattttgagacagaaaatgacgggacagcttcacatggcagtcttcat

SEQ ID NO: 546464 - DNA, 914 bp, Homo sapiens
agcgggttctcgccgcggagacccggcagttgggggatgcctgacgccaggccttgaggatgttgcggaagctcaccatcgagcagatcaacgactggttcaccatcggcaagacaggtgaccaagtgtggatgcttgctggtgcgctgccagcccgccattccctgtgcaggtgtgcgtgccatgtgtgaggaggtagcagaagccaaggactgtggacacaccggcagctaggtcaccgcggaccacggcctcacggactctaggaccaaaagactcctggccctgtgccagagactgattgctgttgcctgatactgtggtcacctcaagcacgaacatgggaagcgtccatgcaacgtacgacgctcattatatcacgacgaaaggtaacacagaacactgcatacgacaagcccacaaaggacgcgttgcactgtacgttggtcagcacgtatgtaccgaaacacagaagcacaagtagaggaccaaggtgttccaacaggcacacgtacatattagtgcagtaaactttacacgacatgtgatgcacagtgtcattccccacggtgaccaaccgttacttacaagctatcgctgcattaattgccatattacagctcggactacgcaaggacagacggattgatgatcttatggatagacaagttaacttcccgatggttgatatatcccatgtgggaccaccggagaacgcagcgataaaagaggccaactcagagctcgccagacaggtactactctagggacacacataccgatacaagaggctacacgaccaaactagacagcacagaggagggtcaaccacagaacaccgagaaagcatacggcggcaagcgaggcactcggcacacggaggcatccagaacacgaagccgatgcctggacca

SEQ ID NO: 546465 - DNA, 764 bp, Homo sapiens
agagacgctggctaggacgccctcctcactgttaccaacatgaagctgctcgcagcaactgtgctactactcatcatctgcagccttgaaggagctgtggttcggagacacgcgaaggagccatgtgtggagagccgtgtttctcagtactttcagacagtgactgtctatgtcaaggacctgatggtgaaagtcaagagcccacagctttaggccgaggtctagtgttactttgaaaagtgaaaggagcagctgtcacccctgatcatgaaagctggaacagaactgggtaactcattgagctctttcgcggaacttggaacacagactgtcacccactgtagtgtgcataccatagtgttgcaaccccagctggactctataacacccactggtcagtcctagagctgctgtgcctacgcactctgtgctacaatatatgctgagtgaatccccacaaaaaagtctgagtggatgaacagcgcatataatgcatgaaaagagtattagacaactcttctggggggggccggggccccaataagccctatattgagtggaactacaatcacctggccgccttttacacacgcgatgttgagaaaaccctggcgtcaaccaccttaagagcgttgagaccatgctgctttctacaactgtagtaataggaataggctctcaccacaagacattcacacatgtgtgcaacctttattgtgatagatggcaacacgttcttctgttaccgcgttgattatttgtag

SEQ ID NO: 546466 - DNA, 263 bp, Homo sapiens
tcccccatcatggggtcctggaggctcctgcattgcattactgacagtgacactgagtagtgctagagctccccacatggctttggctggggacaccagaccagcctttcttggagtactctacgtctgatctgtcatttctgtcgaatggggacggatgcggctgcgggttcctggaatatgatacttcgttataacccaatgcacggatgctacgtgacgcttgttcgaccaggcgatcgatgcggggatgcttgccgggg

SEQ ID NO: 546467 - DNA, 688 bp, Homo sapiens
  misc_feature (41)..(41): n is a, c, g, or t
  misc_feature (62)..(62): n is a, c, g, or t
  misc_feature (125)..(125): n is a, c, g, or t
  misc_feature (171)..(171): n is a, c, g, or t
  misc_feature (235)..(235): n is a, c, g, or t
  misc_feature (282)..(282): n is a, c, g, or t
  misc_feature (298)..(298): n is a, c, g, or t
  misc_feature (330)..(330): n is a, c, g, or t
  misc_feature (361)..(361): n is a, c, g, or t
  misc_feature (402)..(402): n is a, c, g, or t
  misc_feature (434)..(434): n is a, c, g, or t
  misc_feature (484)..(484): n is a, c, g, or t
  misc_feature (559)..(559): n is a, c, g, or t
  misc_feature (569)..(569): n is a, c, g, or t
  misc_feature (587)..(587): n is a, c, g, or t
  misc_feature (625)..(625): n is a, c, g, or t
  misc_feature (671)..(671): n is a, c, g, or t
tcactggtcctcagggcaaggaggaaacttgggcaggagangattgctcaatcccagcagantcttagaatctcacttggacccgaaagtgcatctgcttggtggcattgttcttcattcctgtnttcagcatccattttgatttcatcctttggacatactgcatgtttngctctcgcataagagccgctcctgtgctgccagttcatcccagggctctgtactgcttgaagtnctcggcccacggccttccgatttttggcaactgccacagctcttganaagccaaaacgctgtntgtagtatctttatcaaggagctatgacccantttggcaccagaaggcagaatcaattccatngtttcatcatcatattccaagttcttttctgagggcaactnctcagctcttattggggttctccccttccttntttatctggatatctactcctaaaatcatagaattttgctaattccaaancagcttcgccatctgttaagagcttacagttgctttttttatttatattttctttttcagcttctgtttgagttnaagtgacttncctttctcgttgcaccanaagcaaattttgccaacaccaactttctctcccaagtntttaatcagtcccttaataactgaaagaaatactatatcaggaatnaagaaactgtggtcttt

SEQ ID NO: 546468 - DNA, 1837 bp, Homo sapiens
  misc_feature (1)..(1): n is a, c, g, or t
  misc_feature (1298)..(1298): n is a, c, g, or t
nccgtcgtctgtcttctgtcgtgtctatagattcagacacaacagcccgaagaacacacgacgcaggcaccagatcgttgctatctgtgtattgcattactacaagggttggtagtttcgtctgtcagtactaacagtttgtgtgttgtcttgcgtgcttattaggtgggtcgcggtcttcttgcgcgactgttcgtgcctcacatcggttgatctggggtggtcctacaatgcctgctttaatgttaatcttctgtccactttgtgttactgctccctcttgtggtcttctttgatcgttttgttgctttcgttcccgccgaggggttcagtcgtctcttaattttttctgcaccccctcggggggtgtagtatttgggtcgcccctcgttcttcgctcgctaccgagtgtgcgaagaccactgatgtgtgggcagtccgccctctccttcataggggttgtacttccttgttttatgatggtaaccttggtgagtgagttgtccacagaaagtgtttcccaccgtgcgtccacccaggtggtgaaacaccagtttctttgaaggatggtgttctataaaacaaacgggggtaattttggtctgggggaattcatcataatatgtgcggggcgactcaataaaaagggggggtctcatttcgttcgtgtggttgcttgcgcactcatccgcgagggagaactgtttttcgtggctttttttaactggtttgaggggaactcctgttttcccccctgtgtgtgcgccccccacagcgcggtttgtgtgactgtgtgtcccccacatggtccttggcctcttggtcccaaacatcaagtgtctgtctctccagacacccctttgtggcccacatggtggcgcccagaccacacaagcgtttccacacacaccccgcatgcctgtgtgtggccgatggaggatggcttctcgtcccactgggtgtttcccctcctaatgggaaccaagtcacctttgtaaaggttgtttggcgggcctctgatcaccgtggatattatgcccccctctatttgtttgtaagtgtctaaatatataaatagagtggcttctaaaggcccccctcttgtaaatgtcccagggacacctctcttggacacttgtgtttgtgcgtataccacccccccctgtgtgcgcgcctcgcgcctctcctccacgcgatctttaaacgaagacccccagatgctttcccccaaagttggacttcttcttgaatatagctcactatttgtacattctgtactctccatgtcccgagatagngatgtttccccaaccatactacaaaaagtctttgacacccacatgtctgtgccatatatacctctgcaaaaagtgtgcactctcttcccacatatgcctctcacaaggctctgtgctctgttggtgttcctaatactgtgattcccccaccaccggccctcgtgcacactgtgaccaccttgaccacacacacttgagtgctccaaagggcacttcttggacaagtattgttgacccacttctgcttgaagatatatggcggggagaaaaattctttgtaattggcatctttgcgttcccagacatctcccatttcccaaacctcagtaaacaataccagtgaccctttgcagccataccccagatcccgtttctatcacctgttgcctgtccccgttactcacctcccccccaacccctatcctttccccctcctacccaaaccaaatttaccttacttgaggaattaggtaggtaagcgaatgatcacccatggagatttgggatttacaaccccctaacaaaaattaataaataaa

SEQ ID NO: 546469 - DNA, 706 bp, Homo sapiens
ggtgggtggttaaggttttacgccggctcttgaaaacttttttgtccacaaaatagcttcttatttgggggggaagttcaggttggaaattggtgaggtggcaaactttcctttcaatttttgggcacgagcaatgtgccagaagttgcttttctatgtctaagcgcaagatttgattccaatgtgcccatgtagggaaccttatcaatctggaaccgaaacgtaatactgtttcagacgacctgacgggaaagagcaagagttcgcttaattggtccacaaaccaggttgttgacacgcaattctatagatactgttcagtagcggcatctcacgacctggtcgattcgtttcccaatctctatccctctatacgtgatcatcataatcaaaggtacacagccatgttatattgtccaatataatacaaagctttatgggcggaacaaggtcaggttacgtacgtgatgagctcaggtacagtggttgcacagtcttcttcatgtagaggacatggtgcatccgttctgacaccttgtggacgctctaggtcctctttacagaatcgaaagcaagaacagacccgccacgattccaccagaataaggtgatcctgaatgtgaatgaatacatgcttcgccatcagtttgacaggtgttaactgggctgccaatattaacagacgttgcgcccctttaaaaaaaga

SEQ ID NO: 546470 - DNA, 275 bp, Homo sapiens
  misc_feature (61)..(61): n is a, c, g, or t
cctacatcgaccctctgcagcttcgccttctgaacgttgtccaacgaggtggtcaagctgngcaccagccgcccgtcagctcctcaaccggcctccaccacctgcacgtcaactgcagactgcaagcgcccatgagaccgggctggttgcgacaggtgccacgtgcccgcatgttgcgttccaccacgtgtcagggtctctcgtgtggtccagggctgcgcacgcggccacctgcgcacatcatgaagtggctggaaggcgctcccactgtccgc

SEQ ID NO: 546471 - DNA, 430 bp, Homo sapiens
acgtgctactggaggtaagactcgaagattaatcagcctattttgcccagagtctctgggactaaagtagtgatggctatcgcctatgagactgtaagaacataggcagggggtactagagaaagattaacactgcctattttaaaaactcttggtttgagattatcataaatgaaccacgtacagattcccaggtaggatggctggagtatacaagaacttacaagaatctcgaggtggtacctacgtagactaaaaaggtcccagaactaagatgctagtctctctctcactaactacgatttattctccaacagttccctgatctctagtgatctggttactatgagcgtaaaaacctagtaagtcacccctgagcatccctcttctcttgctatcttttaagccagtctcctatctctacctctta

SEQ ID NO: 546472 - DNA, 321 bp, Homo sapiens
  misc_feature (18)..(18): n is a, c, g, or t
  misc_feature (195)..(195): n is a, c, g, or t
caggggagggcatggacnaaatggagttcccccaggcttaaaacaacatgaacgaccttgttttttagtatcaccagtacccggatgcccccccaaaaaaggaggaggatttcggttaggaggcccaaaaggaggcctaaggcaaagcccccctcaccccagggttttcagttcccttaaccgttttaatcaaangcccccttccccccccccaaaaattggggttgcggcccccatcttgttttttgtttttttttttgggggggggtttaaaacagggcccggcccaaaataggcgccccaaaaaaacttgtttgttga

SEQ ID NO: 546473 - DNA, 467 bp, Homo sapiens
gctcccggcgaggcccgggggacagagcgagaagcggggaccatgtaccgacgcaagttgacggctctcgactaccacaaccccgccggcttcaactgcaaagatgaaacagaatttagaaacttcatcgttatggcttgaagaccagaaaatcaggcactacaagattgacgacagagggacatttaagacacatccacagcagcgactggcccaagttctttgaaaagtatctcagagatgttaactgtcctttcacagattcaagatcgacaagaagctattgactggcttcttggtaatagactgttagacttgacatactggagataatgctgaaaaatacaaggattcagatacctgataattcaaacagctgctgacaaatgcacacatacaaaatgccaggaaccatttgatcaattcggatgtaaaatacatcctgattctaccggctggtgtgatgg

SEQ ID NO: 546474 - DNA, 895 bp, Homo sapiens
gggtagtctccatggaggtcatgagtggttgcggggggtttcggttagtgcggtggcagctctgtgctggctcggtaccctatggagctcgcgctcggattgagggcttccatcacgtcgtggatttccgaaggctgctgctcctgttcgacccagtggagaccatggggaataacgactatgtgtcatcagaccttctagcattctatgacaggcgtttgttgacgttgttgagacttctacgaattgccattgactgggattccagttagcagtttgcatagactcgtggtgatctgtattcgattggtcgagctgaactagcagaaattccagaaggtctatgtcccagaacactgggtaatatttattgaagttatcccatatcagagtatggattgcacgtaatttctatgatagtcctgagatagatgtgtgagagaacattggcgtccttcagattgagagctgaaaaggggtgagattgacgggtacaggagctggaggtgcgatgattgatgcatgtgagaggagatggagcctgggtatgctatgaagagaattgacagggaattgtgatcattctccggatagcagttcctgacatttaagcggttttgtctccacataacgagttaatgccttgatggggatccgtatactattttcgatttggtctccggaaaacacgaggttcgactggcggctccaggggtcccaagagctcggtgggagaggttcacgcccaaagtgaattgtgtttcacggggaagcactgggcgccccattgggctgagacgtgtgccaccggaggactaatggccgactattgctcaacgcccagcttggcacaaccctcttttcgtccaacaaaaaacacgggaggacacactcc

SEQ ID NO: 546475 - DNA, 159 bp, Homo sapiens
aatgtgcttaaacagccagtatttggtgtacagactgataagctggaaatcattcaagaatatcaagcagtattacccctgagaatttgaacgcaccaagccatactgctatgtaaagtactctattgccaactttaccaatttgaacccgataggaca

SEQ ID NO: 546476 - DNA, 102 bp, Homo sapiens
aatgataatgaatcattgattacatctgttccatgcattcatccggcgtagatggaggaaagcaacttaaaagataaatcctcaacccagtttagctacaca

SEQ ID NO: 546477 - DNA, 695 bp, Homo sapiens
agagatagagagagagagagagagagagagcgagagagagagagagagagagagagagagagagagagagagcgactgagagagagacagagagcctgacacagagagacctacttagccctacctgtgctccctgacagccccgcattatcctgcctttcagcctgccatcctgtggaatctatttcactgactggctcctcgacccccaattcaatcgctcattaccatacgctctgagcttccagccaccttctcttgctcaccaactgaccttactgcattcatatgctcgttacacagttctatggcccacttagatcatcatgcagttgtaattgctgatccggaactaatgtcactgtctggctgtactgcctgcaacgtatacaccgtcaatctagttcatctgatcgtactcgcacactaatccacttcaggacttaacgaccagctattcaagatctacactggctgagatagacacttctctcacagctccatctaactcttagaactcccatgacctgggtattcctgctcagtcctattatcttatcggaccgactattcgtcagctagtataccgactctttcacctcaggcttctcatggaggggcattctgagtcatccgactggcctctgcgccattccctgcctgtttaccacttggctttcccatcgctttgcccc

SEQ ID NO: 546478 - DNA, 344 bp, Homo sapiens
ttttttatattaataatttttaactaaaagaagttccatattcggcagcattttagttttttaataggacttattagcatccaccctcttgataatccccaagggaaaaattaaaaaaacctaggctgccataaacccttaaattggattttcagagagaatttagaagcaatccctacctttctcgtttcatttggggaaccatgcagcataggccctgtggtacatcatctttacgctttgggatttgaacttattacagaattttttttttaaattggatggttctttatatggccttggaaactgaagtgattttagcattaaacaaaaaagctttttga

SEQ ID NO: 546479 - DNA, 848 bp, Homo sapiens
gggagtgggctggcggggtagctgtgcgcccgcttggttgcgtgaccgcgggtccggtcgtccctccaccttcgcccttcgcccttcgcctcgtcccggctccgcggccagaaggcgtcatggtgccgtcgggctccctgcgcggcccgtgagcctcggtgcgggggagcgcggtcgagatcgccatgcctacccgagtatgctgctgctgttccgcttgtgcgtcctcgctacaaacgcctggtggacaacatattccctgaagatccaaaagatggccttgtgaaaactgatatggagaaattgacattttatgcagtatctgctccagagaaacctggatcgaattggttcttacctggcagaaaggttgagcaggcatgtgtcagacatcgtcctgggtatgtggatgctatggaggcacctggaccaactcctcatggcttgccattctcacagcataagccattgtagaaagcttcttcatatggtggcacagctgctggaatcgggggaacaaagcttcaagttctggaacaaatctttgtcaaagtttgcaactattgaagaagacacaccatcctatcacagacgtatgattcttgtgtctcgatccagtgcatgtgccattcctgtcatagtgatccaaactacgaaccgagatcgaattgtggacttacacgtatccacggtggggtcgcaacacaagtcaccatgacttcgggcaccatggactcagccaaggtacttgtccatcctccgttaactgcacgttacactgcatcatgccctttttcttgatggaaaaaaaccgggcgggacgccaaacgtgggccctggaaaagggc

SEQ ID NO: 546480 - DNA, 1238 bp, Homo sapiens
  misc_feature (550)..(550): n is a, c, g, or t
  misc_feature (1238)..(1238): n is a, c, g, or t
gctctctgggcggagtccgaggctctggaatgtggcacgctccttattcatccaagcatacccgaggaagaataacctgaatcgacaatccctgatagtatcttcatgaggtgggtgtgcttcaaccaaaggtgtctgactgcgttgtgctacgaggcccgtagcaactgccagactcatccgttgcatcagtctggctatcacgtacatacatgcatgcacgaagctagttggctgttgaccacacgcagggctctctaatgatatcgtgctatccgtacgtctgaagctggatcgagcaccaatcctatcggcggagtcgtgacacccgaccattgatctcaaggtcgaccactgagctgagtgatcatctacctgaccttgcgtttccctggaccagctcaatgctgaccctccagcgagacgtatggaaagtcaagcattggtcctccgttcctcacgagtatcacatttgctttgccaatgccattgagcatattggtcgccgtcatcacgcgagagcggttgtgaatggcaaagcaagtaatcngaagctcatcgccaagttggtcccgaaaaggcatcaacctcttagccaagagattcattgcggaatagcactaagagagggaattgaattggtcgtgcgcatgtgtacactccgccagtcgcaactgggcccagtgatgagctcaaacacgggtgtgccatgacttgatcatttctccgtggtgtgtcgggacactcgatccgaatgcaaaagggaagggggttcccgaatcaggaaggccaaggatgtggacttttcaaacccgggtttgtcgacgccatatcaacattggagatccaagggcacacccataaagacttctcttgggtggcgtaggaattggggaattctcaccccaaaaacaaattgcttacacacgccaacacaaagtcccaggttgcgtagctcggtaccattttccccataaactccctttctggttgtggcccctttctaaacagcaatttgggggccattgcttccaattcgctttttgcagttctcgtggggcaaaaaataaaaggccaatttaatggaccctattttcccaacgtggcattgacatatctgtattacgacacgtgacgtgccaatatccttcctggggaaaagtcaaaaatttgccaacatggggcgccttttgtgttcccctggccccgggaaaagagggcccttttcccttcccagn

SEQ ID NO: 546481 - DNA, 194 bp, Homo sapiens
cgaattcgtctcaactctgaccgaggcaactcaattactgatcttatatcacgaaagtgatgaactaacaattggacaaaagaagactacggtattcatggtcgtcagtctgataaggtgaccaattcacaaatgatggtaatttcgctccgtacttcgtttctcgactcactcaggagacgagaggtctcctg

SEQ ID NO: 546482 - DNA, 288 bp, Homo sapiens
cggcacgaggaatcttggctcactgcaacctcctcctcccgggttcaagtgattctcgtgcctcagcctctcgagtagctcggactatggacttgtgccaccgcgcctggctagtttacagtccaagctcttaacctcaccagcctgcctcaaccaccaggggccagactgctgatcttgaacaaggaagaagaaaatccaaatggtttcagtgcctaaatgtcctcctttcttgcctttggtaacaactttttctgtctctgaatatcattgctacttctctggcca

SEQ ID NO: 546483 - DNA, 144 bp, Homo sapiens
ggccgatcctagaggatcccctcgctattcatcggcacctcgctattcatcggcaccccacctaagctgcacgtcgttcaatgctcccaagatttctctctcttagcatgtgccgatgaatagcgaggtgccgatgaatagcga

SEQ ID NO: 546484 - DNA, 209 bp, Homo sapiens
  misc_feature (9)..(9): n is a, c, g, or t
atcggcggnaatccggcacacggcagaataccaggagcactggttttactttgaagctaaattggcaattttacgttggaggagaggaaatccagttaaagatccagaaataaagcctgtttccccgacattctggtagcagaagagagggaaaagactctacaggaatgtggagtcacggaagtacgagggggaagacgaggccacgt

SEQ ID NO: 546485 - DNA, 1591 bp, Homo sapiens
  misc_feature (1591)..(1591): n is a, c, g, or t
caagtgacagcacattacacaaaagcggcttgcgagaagccacacaggaaaataccacgcgcacgggtctacccccacgggcgcccgaacacggcctcaagcacagtacaggcaggcacaaaggccaccactaaatacacgaacggcctaaacccgccacaaggaaacacgacccgggtacatacaacacactacacctcacaacagagacaccccccaagtggattaacacccatcgagcacagaaaagcaaactcaccgcggcgaaagatgccccaagcgcctcgggacacaaacaacagaggaatcatgagaccacaagagcgaaccaaacgcgtcatccccacaacaaacaacccacaccacaagggtcacacacacacaaacatcccacacgggccaccactgtagcatccccccagcgcccgcgaccacaccgcctgcacatcacataaacaatacacaccacaccgacgcggggccgcacagtgcgccaccacaaccatccgcgccccagggccgccccacagtaaaacaatcaaccgatgaatccaccagcagaccaccactagacacaacatcacaacaaggcgcccacccacgagaggaacacccactccgcaaggagactaccacgcacagcaaccaagaacaacctacgacgacacacataataagagcagacgcaagctgcaccacatccacccataacaccgagaagcaccaacacacgcgcgagaacgaagtgtagtcggagcacaccaactagtcgaccaccacatgagacgctacacacaacgaggagcgagaagaaaacgcaggaaaacacacggtcaatccgcagcaaccaagtgcgagaaacaacacccccccaacaagcagcccaccgagctacaaccaccaaacggcagaacaaaccacactttgcgatggtcatcaaccatcacaacggaggcgaaacacacacacagaaaaccacacacaaaaagccgagacgcattcaggcaccagcaccgaagccatacctcgctagttaaactatctcaccacacagacacgaacagatcgaagcacaaccaccaacaccaggagcgacgccccccagagtgtacacacgcacccgccacagctagccagccacacaacacaaagcataccacacgcggcggactacgactaagcaccacactctaacaaacagacaaccaacaacaacacaacaacacgaaggagcacatcatcacatgcgtccggagcgcggcccgagccgccgacgctagacaccaccacgaccgcacacacctacgcgacacaacaccacaccagactacctccacacccgccgccagcgcagtacactagacagaccacacaccgagcaacacccaacaacagacggcaccaccaacccacacacccccaacccatcctgcccaccgacaaccacccccgcgacaccacaccaggcacgccgacaccgactaccgacagtgcgccaccgcacaacgggagcagagacgacacgacccacgtaacgacacagaaccgaagctgcaacacaagcaaacacgagagatcaaaaccaagactn

SEQ ID NO: 546486 - DNA, 282 bp, Homo sapiens
  misc_feature (1)..(1): n is a, c, g, or t
  misc_feature (141)..(141): n is a, c, g, or t
  misc_feature (246)..(246): n is a, c, g, or t
naattgggccccgcttcccccagcctcgcccccggcccactgtgcgttcggcagctcaggttaaaactgaggggagggatacattcagaccgcaggccccaaggctgcgcccagccggtggcagggagttttgagccgagncagagccacccactgggttttgttgtcccagcaagccaaccccgacccctccgttcgggagcagcagccagaccacgccagggccaacgggcgggtccgtcccgnccgaaactaacgcgccccccagccctccagcccccc

SEQ ID NO: 546487 - DNA, 144 bp, Homo sapiens
  misc_feature (16)..(16): n is a, c, g, or t
cgggtcatagcatatntaataggctttcatactaagcttcatagccaggagtcccagagtctgtgcatttgaacgccactgtggagtggcctctggggtgctgatacacagaggtgtatgctgtagacaggagagtgccatcta

SEQ ID NO: 546488 - DNA, 255 bp, Homo sapiens
ggaactgcagacggcttctagaacttgagcgcagcctgcagctgacaaccagtaagaagccagggccctcagtcacacaaccacaaggaaatgaattctgccaacaacctgagaggtggcctccagatgagaagacagcctgacttaaaccttgatagcagttttgtgagaccctgagcaaagaaaacagataaactgtgcgtagactcctggtctacagaaactgtgagataataaatgtgtcttaagaaaaaa

SEQ ID NO: 546489 - DNA, 666 bp, Homo sapiens
attcggcacaggggtccgaattgtctgaatcatattccgttctatggccatactgcatgtcgtttgcccactcatctatggatggacctgtgagacgtcaccaccttttggctgttgtgaatcgtgctgctgtgaacatcgtgctcaagcttttgtgtggacctatgttttcagttctttgaggtctctgtcttcaacgctggagtgcagtggcgcaattatagttcaccatagcctcaacctcccgggctcaaaagattctcccgcctcagtcttctaagtagctgggatggcagcatatgtccatttggagaggccccatttcaagtgctcagtggctgctggtggctaccgaatttggatacgttgagctcaacggtgctctcagaagcgcggtggctcatgcctgtcatcccagcactttggggaggctgaggcgggtggatcacttgggggccgggaagtttgagaccagcctgggcaacatggcaaagccccatctctacaaaaaatacaataagtagccaggtgtggtggcgtgcacctgtaatcccagctactcgggaggctgaggcacaagaagtgcttgagcccggaaggcggaggtagcagtgagccgagattgccaccgctgcgctccagcctgggcaacacagcgagactcgc

SEQ ID NO: 546490 - DNA, 105 bp, Homo sapiens
  misc_feature (96)..(96): n is a, c, g, or t
acggccgtgtattactgtgcgagaggtgagtattacgatattttgactgtttattataaaaccggagatgcttttggtatctggggccaagggacnatggtcacc

SEQ ID NO: 546491 - DNA, 847 bp, Homo sapiens
attaatcccctggcacacccgtcatctactctaccatctttgcaggcacactcatcacagcgctaagctcgcactgatttttggacctggagtagggcctagaaataaacatgcgtagcttttattccagttcgtaaccaatgaagtaagagccctcgttccacaagaaagctgcgatcaagttatttccctcacgcaatgccaaccggaatccataagtccttctagatagctatcctcgttcaacagatatactctccggacggatgaagccataaccagatactaccaatcaatacgtcatcagttaggtaatcataatggctatagcaataagaagctaggaatagccccctttcacttctgagtcccagaggttgacccaaggtcgacccctctgacatccggccatgcttcgttctcgacgttgacaaaaactaggcccccatctcaatcatataccaaatctctccctcgactaaagcgtaagccttctcgctcactctctcaatcttatccatcatagcaggcggtctgaggtgggattagaccaaagccagctacgcaatcttagcaatactcctcatatgtacccacataggatgaatagatagcagttctacccgtacaacctagcataaccgattcttaattataagtatatatattatcctagatagtacggattcctaattatcaacttgaagtcccagcaacaagaccttgtaatgtttcgaacttgaaacagtaaatggttacaccttattctccaccttctctcctaagggcgtgcccgtacaggttttgccagagggcgctcaggagccagaaaaaggctttttcccta

SEQ ID NO: 546492 - DNA, 109 bp, Homo sapiens
gggtcgcctctacgacgactccccgacggggactggctctcacgacgcctctgtccttacggacgaccgacggggggtaccgacgctcgacacttcgtaactcactggt

SEQ ID NO: 546493 - DNA, 422 bp, Homo sapiens
gggggacccagccctcgttcctcccctgccctgcgtacagggtctggggaagccaggggcaggggtgccatgctagcactcaccactacacagtgaaagcatgtcacttccggctggctgctaaaacacactacggactgagcatctagcacgagccaggtcctcagagctcccatgaaccctctgccagaggggggcagccctaccctttccacacacacaggaagccaggcaccgagtgagggtgcactaagtcctagaacctgtttctgctccaaagccatagctttcctggaagccctgggatcagagcccattctgtctcccagtctcagctggcaggggcagggtcagcctcctgggggggacgggtgctgccacactgagtgtcaatgacagactgtcgccccacccaggagggg

SEQ ID NO: 546494 - DNA, 129 bp, Homo sapiens
ggaagggtattttaaccttttgggccagttgttgtgctagaccccttttcagggccttttttggggtgtttcccgttccgtccccccttttatttcttcttttaattttttctttgtttgttaaaatga

SEQ ID NO: 546495 - DNA, 1159 bp, Homo sapiens
  misc_feature (289)..(289): n is a, c, g, or t
  misc_feature (410)..(410): n is a, c, g, or t
  misc_feature (419)..(419): n is a, c, g, or t
  misc_feature (435)..(435): n is a, c, g, or t
gatctcaaaaaaaaaaaaaaaaaaaagctggcagagactaaaaaaacttcaatggtttgagtagacaaaatatcacaaaagcatgtccctgtggatgggcaaatttttgtttgaaaaagctttaagcccttggtgtgaagccattccctatgaaggaaagtttgcacgacagaagtgaggcaggcaaggaaatctaagcggactagtaaggggatgaactagcctagcctgtgtggcaacgagtagttaccagcaccacaagcgaaacctttaagagaattcagcgggnacgaattccacgcctatttagagctctgatatgaacccgaagggcagctaatccgaggcatattcccccagaaaagacagctctccacgagaaatactctcccagaacagaaaacacagangaaataacnctctttccactagagnccagagtttctctcccaggtcggcgtgtttgtgcaagagaaaaatctgtggttcatagagaagaggaagaagacaggcgccctaaaaataacgctagactattccgcgttaaagagacgagcgtgctcccagaggccgagggcctatggggggggactaccacaaagaggcctcgtgggacacagagaaaacgcgccttagaacactccgagggagtgaccccaaaatggtggtgcgcacaaaccaaccgaggccgccgagggcttatacccactgggggtgctacaaagaaggccccaggggtgctcctgttggtgtcggtggtctacccgcaacgagcggccacaacaacacagcgtcccccccccggtgggagggctcccctctaaaagtagagagaagacgccagaagagactcttccaaaagaacaatgattgttgtgggcgccttaataaccccttagtggtgtggctgttctcctagtagggcgaccaacaacccacaccaaacttatagtggcaggaaaaaagggcggctattctaggacggcgtagttagaaatgttgggcggccccccaccttcctgtagtgggtttcccccctgttggggaaacgacttcaccacacggttcatgtactatattcctccgctcttaaaaaacttttggcacacactgaaaacaatatcactcgcctgtggtgggcacaacggagcgagcaact

SEQ ID NO: 546496 - DNA, 639 bp, Homo sapiens
  misc_feature (1)..(1): n is a, c, g, or t
naaggaacgaacattcataaagggctctgatgtgtacgaggcatctttcatgtatgtatattcacttatttattagcaacaaaccctgaaaatacttgtcataataactcattatcactgatagagcaaactgacattgagagaggataaatagaattattataataagcatacaatcagtaaagaacagagctagagactggagtccaagtatgtaggtatgtttctcttttatctgacctacaaagtccagtacttgaatcctctacaccaggattaaggagagcatatgaatatatgttatatctggagcccttgtgccacagagcaaatgtccaaagatataaggtttctttttgtcggtacggaagctaagtgtgttctataaacggcatattgggacctgcataggtgagtattaggaccaaattttgaaattccaagtatcttaacactgggaaccagactttcttctcatccctaaggagaatctcactcagatgttcctctatgtgctgggatataaggaaggctttgcatttttccagacaatttacctgtggtttattcacgtgatgcatgatgttattaagggttgatgcttaaactccttcagaatatgcttactttactagtacg

SEQ ID NO: 546497 - DNA, 630 bp, Homo sapiens
  misc_feature (570)..(570): n is a, c, g, or t
  misc_feature (617)..(617): n is a, c, g, or t
gtctatcatggcaagctcggactggtcatacggccttgagaagggtagtctcgggatgccgtccgaagtcggcgacagcggccggggcgcaggcgcccgtgcggaatggcagatatttagcttcctgtggtatactgatgagcagaactcttccactacatacctcaattttgcctaaggagatatgtgcacgaactttcttcaaaatcactgcaccattaataaacaaaaggaaagaatattcagagagaagaattttaggatattcaatgcaggaaatgtatgatgtagtatcgggagtggaggattacaagcattttgttccttggtgcaaaaaatcagatgttatatcaaagagatctggatattgtaaaacaagattagaaattggatttccacctgtgttggagcgatatacatcagtagtaaccttggtgaaacctcatttagtaaaggcatcttgtactgatgggagacttttcaatcatttggagactatttggcgttttagcccaagtcttcctgggctacccaagaacttgtaccttgggatttttcaatttcttttgnatttcgatcacttctacattcccagcttgccacactcttttttgatnaagttgtgaaaca

SEQ ID NO: 546498 - DNA, 519 bp, Homo sapiens
atggtcatagctgactctagaggataaacctaaggctgggacccaccgatcaactacaaaagctagatatctgagtgaagcattaaaagacaaacataaagtaacttcaggttttatctagcactgcagaatgaatactaaaattagtggcaaaaaaacggagccagaatagctaaagcaatcctaagcaaaaagaacaaaacttggaggaatcacacttcaaagctggaggagtcccttcttcaaattatgctacaaagctacagtaagcaaaacagcatgatatttgtataagaatagatccatggaaccacatagagaacccagaagtaaagccacatatttatagccatctggtctttgacaaagttgacaagaacacacactggggaaaggatacccttttcaataagtggtcctggaaaatttggatttccatatgctgaacccctaccgaacccgtctctcaccacatacaaaaatcaacaaaaatcaacaaaaggtgggtcagaacataag

SEQ ID NO: 546499 - DNA, 480 bp, Homo sapiens
  misc_feature (20)..(20): n is a, c, g, or t
  misc_feature (78)..(78): n is a, c, g, or t
  misc_feature (134)..(134): n is a, c, g, or t
  misc_feature (360)..(360): n is a, c, g, or t
gttattgtttatatttatangttgtgtttgtaagaatgtaaagtaaagggaagaacctagtttcctccaaagcatcanactcatgttgtattactagaacatcaccaggaactagacaagtgaaaaatttaggnggtattgtaaagacgaagaaatgttgtcttcctaaggatacccctcaagatatcataataaaatggcatgaaaaaacaattgtgggtgaattttgaccactttgaagacaggattgttaattcaaagagtatttataagaatgatgaattgtatttttatgaatatttttttaaagaccccccgcaccgttaacctgtcgcacaagtcctacggagctccacttcnccccccaagccagtacgctttcaccacgaggctccccccccccctcccccacccctcgcattaacctaagtttcttgtcttcatatgtgctcttccgccctccccctcaaattcatctta

SEQ ID NO: 546500 - DNA, 709 bp, Homo sapiens
  misc_feature (68)..(68): n is a, c, g, or t
  misc_feature (93)..(93): n is a, c, g, or t
  misc_feature (127)..(127): n is a, c, g, or t
  misc_feature (142)..(142): n is a, c, g, or t
  misc_feature (204)..(204): n is a, c, g, or t
  misc_feature (211)..(211): n is a, c, g, or t
  misc_feature (220)..(220): n is a, c, g, or t
  misc_feature (222)..(222): n is a, c, g, or t
  misc_feature (232)..(232): n is a, c, g, or t
  misc_feature (242)..(242): n is a, c, g, or t
  misc_feature (452)..(452): n is a, c, g, or t
  misc_feature (454)..(454): n is a, c, g, or t
  misc_feature (456)..(456): n is a, c, g, or t
  misc_feature (458)..(459): n is a, c, g, or t
  misc_feature (461)..(461): n is a, c, g, or t
  misc_feature (463)..(463): n is a, c, g, or t
  misc_feature (465)..(465): n is a, c, g, or t
ggcaaagaattctgcatctctctttactgccagtgattacaagtggcttctgctgagtaccaccgcanagccctgtgagcgtctacagacagntcaccattttgtcctgtatctgtaaacacttttngttcttagtcttttncttgtaaaattgatgttctttaaaatcgttaatgtataacagggcttatgtttcagtttgtntcccgtnctgttttanancagaaaatanaaggagtgtnagctccttttctcatttcaaagttgctaccagtgtatgcagtaattagaacaaagaagaaacattcagtagaacattttattgcctagttgacaacattgcttgaatgctggtggttcctatccctttgacactacacaattttctaatatgtgttaatgctatgtgacaaacgccctgattcctagtgccaaaggttcaacttaatgtntntncnngnananccatgcctttgtgctctattttttttttgtatggtgcttgaagtcaggccatcctctgcaagtccatctatgttgtccttaggcatactatctttgctcaaatagttgaaggatggtgacttggttcaaggatatggaattaagttgtatgtacgttctaaatgatagaggcatggattatgtgtagcccaggttttgggttgattctggaatggtttcgaatttataagattgttataattcg

SEQ ID NO: 546501 - DNA, 210 bp, Homo sapiens
atattctgactgccttccagaagaagggggctgagaaagaggagctgtctaatggctgtctgtgattttcctgagtatggtgcgagtagggaggagagagttaacctgctggctgtgagtcccttgtggaatataagggggtagtgggaaaagtggtactaacccacgattctgagccctgagtatgcctggacattgatgctcagcgct

SEQ ID NO: 546502 - DNA, 790 bp, Homo sapiens
  misc_feature (68)..(68): n is a, c, g, or t
  misc_feature (93)..(93): n is a, c, g, or t
  misc_feature (127)..(127): n is a, c, g, or t
  misc_feature (142)..(142): n is a, c, g, or t
  misc_feature (204)..(204): n is a, c, g, or t
  misc_feature (211)..(211): n is a, c, g, or t
  misc_feature (220)..(220): n is a, c, g, or t
  misc_feature (222)..(222): n is a, c, g, or t
  misc_feature (232)..(232): n is a, c, g, or t
  misc_feature (242)..(242): n is a, c, g, or t
  misc_feature (533)..(533): n is a, c, g, or t
  misc_feature (535)..(535): n is a, c, g, or t
  misc_feature (537)..(537): n is a, c, g, or t
  misc_feature (539)..(540): n is a, c, g, or t
  misc_feature (542)..(542): n is a, c, g, or t
  misc_feature (544)..(544): n is a, c, g, or t
  misc_feature (546)..(546): n is a, c, g, or t
ggcaaagaattctgcatctctctttactgccagtgattacaagtggcttctgctgagtaccaccgcanagccctgtgagcgtctacagacagntcaccattttgtcctgtatctgtaaacacttttngttcttagtcttttncttgtaaaattgatgttctttaaaatcgttaatgtataacagggcttatgtttcagtttgtntcccgtnctgttttanancagaaaatanaaggagtgtnagctccttttctcatttcaaagttgctaccagtgtatgcagtaattagaacaaagaagaaacattcagtagaacattttattgcctagttgacaacattgcttgaatgctggtggttcctatccctttgacactacacataaaacattcagtagaacattttattgcctagttgacacattgcttgaatgctggtggttcctatccctttgacactacacattttctaatatgtgttaatgctatgtgacaaacgccctgattcctagtgccaaaggttcaacttaatgtntntncnngnananccatgcctttgtgctctattttttttttgtatggtgcttgaagtcaggccatcctctgcaagtccatctatgttgtccttaggcatactatctttgctcaaatagttgaaggatggtgacttggttcaaggatatggaattaagttgtatgtacgttctaaatgatagaggcatggattatgtgtagcccaggttttgggttgattctggaatggtttcgaatttataagattgttataattcg

SEQ ID NO: 546503 - DNA, 1245 bp, Homo sapiens
  misc_feature (710)..(710): n is a, c, g, or t
  misc_feature (866)..(866): n is a, c, g, or t
cttctgtgtgcgcgcgttctctgttgtctttccttttctttgtgtttcttctttttttgcttgtcttctcttgttctgctctttcgtgtttcttcttgtttgggggttttttttctcgtttgtttaccgttttttctggtttcccccatgtttttttctggatacactaatttgtgggatcttgtcgcttgtgtcttttttttgttgttcgtcgtttttctctttcttacccaattctctgcccctttttatgcttcgtttccaccgtggcttccttggggcccggtattctcaattgggttttgttctcgtgttttaatagggccctccttccatttgggaagtttccttgctctcggttgtaccttttttctcccttgtacttgttcttatccccttctgtgtggaaaattgttcgggcccctgttagaagggatatcctgctggggggctctctttgcccctattgcatcctgtccaactgttttaccagatttggctgccattcctaattttccaccaatggtcaactgagacttcttggccgctaaccaatgcccatgcccacataatttagacatatatgaggccttttcccagacttccaggataaattgcgttggttcccttgtctaccaagccgccaaatcttgtcccaaggcatgccttggggagaccatttggagtaagaatatggccacacccagacntgatgatcccgcgtccttactcgagactccgcgggtcccttgttgcctcccccctttcacgccactttttggttctatagaccacagtgtttcacaatagtggaataccacagaaagttttctttcgcttggcacaccccaggaggtcccaatggnccaccctcttgcctcgtggccactatgaattttgcctcccacgagactgtaatggaagtataagatcggccactggatattggaacacattccttatatgtccaagcacccggagtatcgccacatgggaaacacatgttgggtgccctccctgagagattcttgaggcacctggtgaaaatttaagtgtaagacacttgaggccacccaacactggaatctcttctttgtactggaatgtccaccttcccctaaagtcttagatttgcacccccttaccaaatctttcccaaaggtcacactcttatgaaatggatgttggttataacttttaatggacatttacattcctaataaagtattcagttttttaattcca

SEQ ID NO: 546504 - DNA, 417 bp, Homo sapiens
  misc_feature (205)..(205): n is a, c, g, or t
  misc_feature (272)..(272): n is a, c, g, or t
  misc_feature (288)..(288): n is a, c, g, or t
aaggcccaagaccccatctttcatactcatggaggatggggtttttttctcaattacttattttttaatgtgtctatctatgaactgtgtgtgtctggtgtcttggagacaagatgggaatgtcagatcccctggaactggagttataggcacttgtgagctcccatctgggtgctgggatttgaacccactttctttgtaagancatccactgctcataatgacttgagtcatctctccagcccagatatgtgtgttttgaccgtcacagntaatgacattttcttntctgcttccccaggacgatcctcactcgtctttgtgctgagtacaaatgcactgttcttggaagcgacccgtgctcctgtccgtgcatgagcccatgcccaccacagcctctctggggtgagtcaagga

SEQ ID NO: 546505 - DNA, 1752 bp, Homo sapiens
  misc_feature (1070)..(1070): n is a, c, g, or t
gtcgttgtactgttggtttgttgttcgctcatctctatcggttggagtcgatgttgtcgtgctactcctgtttgttgtgtttcgtcgtagctcaagttgggatcttcttgctggcgcggtctactctttgagttgtccctcctcatgtgggtcgcattctccttccggtgcgttacttttttgttcctcctgtggcgttcacaagtttgtggtccccctctgtagggggtgattctcccctcctgtagtaggggggggtctttctctccgtgggatttttgtgtgcacccctctttgtggcatctccttgtggggggaccctcatttgttcttgtagaaagttgttttttttgtagacatctggtggggattcgagccccccgttggtggcttcccgctgtgttggatcgaaattgatgcgcctctcgggctgctctttctcctcttgggggcccccctcaataatgactctcctcctcattgatgacgggtcttctctctccctcggtcaggaggattgtgttccccgcgtgggtgatctctttgggtgagaggaaccccccctcttccttgtttgttttgcggcgtcgttttgtggttgtttggtgtccctccatccacatcgggtagattttctggggcggacccccaacgaggctgcccccacaagtgttgtgttggagtgcccgctcccgcatatgggtgccccggttttgtttgtcataaaaatattcgtctttgggcgacatagaggctcgcaaagcagacaccgtggttctacacaggcgttttttttttggcgcttcccactgcttttcgaaggcgccctccccacaggcgctcatctttcttcttcgcacactagtgttctgcgcgcaccacccccgggggagaccctctcaatggcccccactcggagggagacccctccgggggggtcactcggggcgtgtgctgtgtgtgggtggtcacaccaccctctgtggggacacacacaaggagacacacacacctcacacagttgttgggggagacactactacactaccgagtaagtagacacaacacanagggcaccacctcacagcagggacgcccatctggtgtgtggcgcacacacagtggtctcacactgctctgtgtggcaaaacacacagggaggcggcgtgagagtgtgtcacacacagcgagaagtgggcgtgcacacacagaggtgagagagacacagagtgtctccccgctgtgtctctcacgagacactctcacacacaccacagtctctctctcacacacacacacacagaggtctcacacagagaccctatgggggtcacatgtgagacagcagcagaatgtgtgagaaggtcacacacagcggagagaaagagagagatataaccccgtagacacctcccagagaccccacagcggcgtgagaacacatatggtgagacgtgcgctctctgtctcccctccacacgccctgtggccattggcgttttgttatagcctaattttagccctgcacaggggtgagagccacacgtcgttttctcccttgtctcccacagcacatcacactccccaaaaggagaagagagccacacatgttttccacacccacgaaatccctttgttgccgagccccttagtttcctttggtccacacccagacattgtttatccagacttttcagggccctgggtccaccatttagaatataaagggtagttaatttagagaaaaaaaaa

SEQ ID NO: 546506 - DNA, 885 bp, Homo sapiens
  misc_feature (107)..(107): n is a, c, g, or t
  misc_feature (161)..(162): n is a, c, g, or t
  misc_feature (164)..(164): n is a, c, g, or t
ggggaaataacggcgctgtgggctgggcgtgggcaggagctgccttcaggcttctggtctccagcggcggggaactcacacctgccgctgtgaaaatgcagacccgnggggcagtaattccgagtccagcctggggcgcgtctggaatcttgactcgcttnnanacaccacggcggattcggagacaggtgagtagagaaatgagcctcagtccctcccagggccgccacggaattccaggatccggaaactcttcctgcttgctggtcaccccaggaaggcagcgcccgcctctgggccggtctgatggacaactggcttccggccgccccagaggaaaacccaaaactaagggggccaatgaaaaaagcctccattggtcccccgcttacaggtgaggatcctaattttatacccccgagtggtggccccccatcaaaggtctgcagttgaccagccggaagacgcggtgactccacgcctgtaattcccgggaattttggaagaccaatggcgggcgaaatcacgttgaaggtcaggagttcaagaccacagttgtggcaacatggtgaagccccttctctaactaaaaatacaaacatttacgcgggcgtgttggtggtaaggcgccaggtaggttcccagatactcggcgggctgaggcagacaaactggggtgaacgcggggcggaggacagttgacaggagccgagaccgcgccatgcactcagccggggggaagagcctacctctcacaacacaccaacacaatgtgaaggcgtcccgcaaggtctagacggggagggccagagcgtgggacaaagtcggaggcgccgcgtattaatccgcccggactgcgtgtgcggggggaaaggcaccagcgag

SEQ ID NO: 546507 - DNA, 214 bp, Homo sapiens
gtgaagctggcggagagttaagtgatggatcgagcagtctgaatgccagaactggataaccgattagctacagcatatgtaattgcttagtgtgcttagcctcatgtgtccacgcatctacatggcagcactacattgcacagagtcagtcgcatgactatcgaagtccagcttcaagataactatcagtgatttgacttatagggatctagcg

SEQ ID NO: 546508 - DNA, 218 bp, Homo sapiens
ttctgatttgaaggttttatttatcatactctggatactagtcttttgttagagatgcagttggccctccttagctgagagttccatatctgcagattggaccaaccgtggctcacgcctataatcctagcactttggaaagctaagccaggcagatcacttgaggctaggagtttgagaccagcctggccaacatggcgaaacccagtctctactaa

SEQ ID NO: 546509 - DNA, 908 bp, Homo sapiens
taaaaaagaagcgacctgtcttgcttccttcctctcctttgccctgtccaaaggtgaatgatatgagtcgggcggggtgctgtttcccaaaaaaaaaaatgaggttcagatgtgatcggtgtccccggggagggggtgcctcataacatgtcagacattgactggcaccgaaaagctttctggggctgtcttcaccgtctgtgtctgggcttgggactcctgagctgcacaataaggatgtgcatggtgctgctgaccgtatgttcccccgaagttccaggaaggtgcagagtgcttgacagccagccctggagcttgcccttgccagtgcttactctcagaactgactccgtgagggagggcaagtgtctgaatggactttctccaggttctcactcttaggaagatgcggggggagcttactcggtgattctcccctgttaggatcagtgtctctggggatgccttccccttccttgacctccagtggggccttccttcaggtgatcactcagtgttcctgctcccagcgaggggtctgatctcaaagggttctgcatagagaactgcgggccaggcacaactctccggggggatctccctcagaaagtggccctctctgccgaaaatctgtacgcgccggaggtctcggatgtgggggacatgctgggtgtactgagggcttggggccctgccggtgccccgaatgctggttggcagccgggtgtcgcacctggtgacgccgggttctgggaaaagcccactttacccggtgtataggccgaaagataggtccagggcacaccacaacaaaaggcggtaaatccggggcccgcgcccctttacaagcctagattaaacacgtaagggagcacgttgacccgggcgcccaccaattgtctccacca

SEQ ID NO: 546510 - DNA, 189 bp, Homo sapiens
gtcactgcccattcagccatttcagccagcccttcatttcacattcatttcaacatccattttcatgtttcccatatttccccaacgtgcccccatattcatgcaatcccatgcacatcccacttgcacatattttcttgttttgtggctgccctgctgtccccactctggggtgctcctcgtcgcagt

SEQ ID NO: 546511 - DNA, 389 bp, Homo sapiens
  misc_feature (1)..(1): n is a, c, g, or t
  misc_feature (45)..(45): n is a, c, g, or t
  misc_feature (102)..(102): n is a, c, g, or t
  misc_feature (164)..(164): n is a, c, g, or t
  misc_feature (173)..(173): n is a, c, g, or t
  misc_feature (187)..(187): n is a, c, g, or t
  misc_feature (232)..(232): n is a, c, g, or t
  misc_feature (297)..(297): n is a, c, g, or t
  misc_feature (317)..(317): n is a, c, g, or t
  misc_feature (335)..(335): n is a, c, g, or t
nacaaacccctttttaggcttgctgcctaggcaacatgctgtgtncctgcagtaaacctgctggttctacccccttgccccctcccccagggtgtccctggncacccaaattgctgtccatgctggcatctgtagcttcggtggcttgacattctccccagggnacttccctnttcctagttctttntccagctcctccccactctgtggcgacctttccaagccttccctnaccctccccgccagcaccctctttggggagcaggaacttaatctgctgacagagctacacctttnataacaggctcagatcactnagctccctgtgacctttntattcacccagggttcttctcagtagctctagctgggggaggtgtcagctgggt

SEQ ID NO: 546512 - DNA, 94 bp, Homo sapiens
ctccgtgccttgcgcccagtgccgctgcccctgcctccgtcgacctcaagcactcggacgggacgcgcacttgcggcgaagctctatgacaaga

SEQ ID NO: 546513 - DNA, 234 bp, Homo sapiens
  misc_feature (223)..(223): n is a, c, g, or t
tctacacggatcccgacctagacgtacacaggcaggagaaatgttttttccagcttcctccttgtggctccgacatcctgttttcagagcggttgtttttgtttggggtgtgtgttttatcatgtgaattagtctcttaaaagatgggcgtcagacttgcatacgccgtatattagcatccttcgctgtcccttagctactttggtagcttatttgatactgnttataggtgtg

SEQ ID NO: 546514 - DNA, 273 bp, Homo sapiens
cctcatgatgagggtgggtgagcgcacacttggacactatgatgaggctagatgatgctaggtgagcgcacactgggacactatgatgaggccgggtgagcgcacactgggacactatgatgaggtaaggtgagcgcacactgcgacactctgatgaggctgcttgagtgcacactggggcactatgatgaggcctggtgagtgcacactggggcactatgatgaggccgggtgagcgcacactgggacactctgatgaggctagtggtggtg

SEQ ID NO: 546515 - DNA, 100 bp, Homo sapiens
cctaacgtcctcaggcacttcgcctccttcccggactctgtcgccacagctcccgctccgacacaccttgccaagcatgtttgttcccggcacatagagt

SEQ ID NO: 546516 - DNA, 844 bp, Homo sapiens
gacctccagcctttggttcctcaggcagcaaccgaggccccttctccaatctctgcttggtcctgcctatcaaggaatccctagtcacttaggaaggctgaggcggggggaaatcacatgaggtcagcgcagttcgatgactagacgcatgaatcgactctatgggtgtaaaaggcctgttctcgtaaatagaaaattacgacatataatgtatgctgggccgtggatgtgttgcaatgccttgtaaatccctagctttcgtcgagagaggctgagagtcaacagaggatatccttttgaaactcgccgggaggcggaagattggccaggttgcgccgaggatcgagccattgctatttcagacgtagggtttgcaaagagcgaaccttcgatctcacgaaattaattacccaataggaagggcaatgctttttaggaattgacgacatgaaggggtgactaaaaactagtcttaagaagcttctagcgttgttagagagaggtcggtgagcgctggaattaagagataaatttcgaaggggcgatcttttgagtcaaccgagatgaaaaccggggggggtgaataaaagaggacctggaaatccatgacgcaagggaggacgtggcggtcaattcaagagcctagtaaacgccatccaagtaggacgcagacgaacaatgaagggactcaatcggacaggggtacgatgaaaccacctgaagaaatagaccgccgggggacaactgaggacacagtcgggaaggggacgacagatgaacgatggaatcgaagataaaaatcccgggaaacaaaaacaaaaaaaattgcgccaccaaaatagcc

SEQ ID NO: 546517 - DNA, 522 bp, Homo sapiens
  misc_feature (19)..(19): n is a, c, g, or t
  misc_feature (67)..(67): n is a, c, g, or t
  misc_feature (95)..(95): n is a, c, g, or t
  misc_feature (97)..(98): n is a, c, g, or t
  misc_feature (138)..(138): n is a, c, g, or t
  misc_feature (141)..(141): n is a, c, g, or t
  misc_feature (146)..(146): n is a, c, g, or t
  misc_feature (152)..(152): n is a, c, g, or t
  misc_feature (160)..(161): n is a, c, g, or t
  misc_feature (172)..(172): n is a, c, g, or t
  misc_feature (181)..(181): n is a, c, g, or t
  misc_feature (185)..(185): n is a, c, g, or t
  misc_feature (193)..(193): n is a, c, g, or t
  misc_feature (206)..(206): n is a, c, g, or t
  misc_feature (212)..(212): n is a, c, g, or t
  misc_feature (215)..(215): n is a, c, g, or t
  misc_feature (222)..(222): n is a, c, g, or t
  misc_feature (227)..(227): n is a, c, g, or t
  misc_feature (519)..(519): n is a, c, g, or t
cagtggttttgcttaggtnaggacatcagagatcattcccctgggtggcaccaactctggacaaagnaaaaaaacatgcatcaggactacaggananncttcaattcagcatcaatctctgaatcacagtaaagaggnggngagtntatggnacagcagnngggggggaagnctgagcgcntgtnaaccagcnttgccagtgccgngggtgnggnatcaggnaattntgcttttagtcgctctgccagttttttcttgtactcagtaaatgtattttctgaataatctgcacatagttcttgtcccttgtcaatgaaagaagatagttccttctttagtagagggcccttagcattaaaacaggtagttgagtcttcaacatcacagcattcaccaaggctttttagggttggctcaagtaccttactgaggaatacttccggaagatgagtccttctgcttagttcaaatgtatacttatccatgactttggtgtttcctggatcacacacatctttnttt

SEQ ID NO: 546518 - DNA, 134 bp, Homo sapiens
ggtctcaccctaccatgtatgcaggcacactcatcacagcgctaagctcgcactgatttttttcacctgagtaggactagaaaataaaacatactagcttttattcccagtacttaagcaaaaaaaataaaacc

SEQ ID NO: 546519 - DNA, 896 bp, Homo sapiens
gcttttttgcctgccgccatccacgtaaggtatgattgcccctcctgccttctgccatgatgtgaggcctccccagccacgtgaaactaaggagagtgcatgagattatataaagactcagagaagagatacagctcctcccgcaccagagaaatgcagctccgtgagccccgatggagccagcatgctgctgggtgctgaggagcaggcagaggcacccaggatggcggtccccaaggagaacggaggcacagaacaacgcatgaggggccacatgacttagggccgggatcggtcactcagccagcaaaaacactggaagaaaacaaaacaacttcagactctatgctgcatttccgtaatatatctgcccaaagactggacaacaagggaaaaggaggctgatgaggaaacgaaaggatccgtggttcttggctcgctgggtggctcatcaacaaagccccagcatcactcctgcagatgccctagcctggctgggctggatgggcaaaattcaccatgggactcttgttcaagagagggagatcaaagccagaaacacttacccagaatggcatgcagactaaaattcccaatcctaaaaatacttttaaaatctaacgtacaacaaggaagcgggacaatatccacacaggcgacagggcagaaaattcaaccaacgacctcaggggaatatctgggtcgggttacagagcggtaagctcagcaaggtacacgacctaaatgaccgacacccgaaaatggccctaatacggggcccacgaaatggcccaaagacgggcgggatcggcaccgggccgggcacaaaaaatggtagagccccacggaactcagggtcccaactacagaggggcaacacacacggcgggccgcac

SEQ ID NO: 546520 - DNA, 839 bp, Homo sapiens
  misc_feature (220)..(220): n is a, c, g, or t
  misc_feature (389)..(389): n is a, c, g, or t
gaaacaaaagctgaaaggtccggcgtacatggggccctggccatttaatccaggagccgcagaagttaaatcctgttgttggcctccaccccaccctgtagggcctgcatgaagggtcccgagggttttggcccccagaaaaggagcccatgaaccaaggttaaaaggttttgcggccaggtatggtggctcacgcctgtaatcccagcactttgggagnctaaggtgggcggttcacctgatgtcaggagttcaagaacagcctggccagcatggtaaaaccccatcttgcctaaaaatacaaaaaactagccaggcgtggtggtgggcacctgtaatcccagctacttggaaaggctgaggcaggagaatctcttgaacccaggagncggaggttgcagtgagccgagatcgctccactgcactccagcccaggtgacagtgtgagactccatctcaaaaaaaaaaataagaggccgggtgcggtggctcaagcctgtaatcccagcactttgggaggccgaggcaggcagatcacgaggtcaggagatccagaccatcctggctaacacggtgaaaccccgtctctactaaaaatacaaaaaaattagtcgggcgtggtggcgaacgcctgtattcacagctactcgggaggttgaggcaggagaatggggtgaacccgggaggaagagcttgcagtgagccgagatcgcgccgctgcactccagcctgggtgacagagccagactcctgctcaaaaaataaaaaaaagaaccggaggggggaactaggacggcaatcaaaggggcctggagggcgttgggagtggagagggagga

SEQ ID NO: 546521 - DNA, 172 bp, Homo sapiens
tccaccaccctaggtcaaagccactatcatctgaagtgtacgggataggtaactgattaggcagaaataaatcagctcccaatgtgaacccacggaaacaaatacggtcccaagaaaaaaaacgggagctatttcacagagctaagcctctgccacaattcattcctcaaac

SEQ ID NO: 546522 - DNA, 106 bp, Homo sapiens
gtacccactgaataccttccatgtatctgctatacttgcaaggtcacacatcatcagccaatatccaactcacgtagacttattcgtaatagctcctccctgcctt

SEQ ID NO: 546523 - DNA, 231 bp, Homo sapiens
ccccaggccctggcaggggggggaaggggggggcccaaatacccccccccccccggtttcctagcaatgaaaatttaatatttttttttggggccccggggggggggggggcggggccccccgtcaagggcccccccgcccggggtcggccccccccctgccccaaatcggggttggggggggggccccccccccccggcccccccccccccccggggttgggtttttttt

SEQ ID NO: 546524 - DNA, 164 bp, Homo sapiens
tgattcttaggttttacaggtaggcagttttattgtctacaaataatgacaattataattcttccttatgtccttcatctggctgtgcagggtagtagtgcggacactgctgatatagctgccttgctagttctgaacttaatggatggcgtcgctgaccttaa

SEQ ID NO: 546525 - DNA, 438 bp, Homo sapiens
agacacaggtgacagagggtatcttgaagtccccaaagccattagtacaccatgtatcttaggccctatttattcctgcctttctccttcagaatgttctatagaaaagaactgcattttttatcctttgtggatctgcttagtattggctgctgaggatagataacgcatgcggcttacaaaaaatgtgttccgtcccagattttcttggcctttcctagttgtactctgcaatttctctcccatacctccctcacatttcttcctactctcacttcctattcacttcctattttctactaccacggccattatttcaacatttaccatcacaagatacctggaagtgtatggtatctgagcaatatctagtcacatcctcttatctagagaagtgacctatttatttttaacgatgactacagaacctatttttag

SEQ ID NO: 546526 - DNA, 585 bp, Homo sapiens
agcgggcaatcgatgtgaccccgggcccctgcggtctcccactcctccggaagctgccccatgcccacactgtggcagctcccgtaatctctagagcccccaaccagagtcctccagacaccgacccgcggaggcgtcgaagcagcctgacgactgcaggagcccagcatagacaggggacacagaaccaacacgtgtggacagcaaacaccagtgacaactagaccaaacgcagcgcgaaacagcatacgaagcgagaaacaacaagaagaaaaagaaaagaacacaaaaaagatacgcaacaccaaggcaacaagcccaacacaagaggaacaacaaaacgaacaacaaagaagcacaaagaaatcacaacagcacagccaacacaaccagccccccccccacaaacaccccacacagacagaacaaacaaaacacaacgacaacaccacacacacaagccagccccacaaagcagtacacacaatcgcaggaatcacaaggcggcaaaccacacagaaacacacacaaaacaacaaacaaaaacaaaaaacaagcaacacaaacaacacacgacacacacag

SEQ ID NO: 546527 - DNA, 437 bp, Homo sapiens
  misc_feature (437)..(437): n is a, c, g, or t
ccgcctcccgacgcgggtggccgaggcgtatggctgcgagccccgcacccctgcgaacatggcgctgagagtggtgcgagagcgtgcggtccctgctctgcaccctgcgcgcgagcccgttacccgccgcgccctgcccgccgaggtcatggcagatgagggtgggcgccgagcgtccactgcgcactggaacagctctgatctaggtgcgtcaattcacagagaatcacgaatggggatcaacagagcatgacattgcaacagtgctgatgagcaattttgcacaggaagcgatgtgagatgtcgtgtattgccaactccctgaagttgggacaaatatgtacactcatgactgagttgctgacttagaaagcgaggctgctagtgtactatattagtctttatcagcgagacagaactgagattatggctcttgn

SEQ ID NO: 546528 - DNA, 403 bp, Homo sapiens
tcctctgcatcacgtctgtccctagtgcctgcaggagcaggcgctcagcacagatcatgatgtgctagctggccacgatggcctggctggggtgcggtgcaggtagctcaccacagtcccggtcaggaggagggctacccacgcagctcacctgctgggaaaagtgggccgcctgtcggatggtggtgagtcaccaccaagtctcacagattaccctccactttttactcttcaaaaggggaaaaagcaaagggtgagcctcaaataggaagtgcccaggaacccatcaaagctgaacctggaatgtgggtccaggccccaagtcacaccccagcatgaacagtgctccaaggtttgtgcgcagcatggtcaggcatcagcctccacagcaaagtgcaggact

SEQ ID NO: 546529 - DNA, 655 bp, Homo sapiens
caatccctgacgcaccgccgtgatgcccaggtaagacaggtcgacctggaagtccaactacttccttaagatcatccaactattggatgattatccagacaatgttctcattgttgggagcatgacaatgtgggctccagagcagatgcatgcagatccgctatgtcccttcgtgggtaatggtctgtggttgctgatgggctaagaacaccatgatggcgcaaggccatccgagggcacctggaaaacaacccagctctggagaaactgctgcctcatatccgggggaatgttgggcttatgtagttcaccacaggaggacctcacttgagatcgagggacatgttagtctggccaagtaacggtgccagctgtcatgcccgtgtctggctgccatatgctcccatgtgaatgtcactgttgccagcccagaacactggtctcgggcccgagaagacctccttattccaggctttaggtatcaccactaaaatctccaggggcacctattgaaatcctgagtgatgtgcagctgatcaagactggagacaaagtgggagccagcgaagccacgctgctgaacatgctcgaatctcccccttctcctttgggcttggtcatccagcatgtgttcgacaatggcaggatctacaac

SEQ ID NO: 546530 - DNA, 412 bp, Homo sapiens
tagagagtctgtgttacgagtcataggacgacgtcaggctactgtcatgacagggttttcaagatgaagtttcactcttattgcccaggctaaagtgctgtagcttgatctcggctcactgaaacctccgcctcctgggttcaagcgattctcctgccttagcctgcggagtatctgggattacaggtacccgccaccaggcctggccaattttggtatttttagtagagacgggggtttcaccatgttggccaggctggtctcgaactttttttttttttttttggaaagggagtttggctctgaccccaggtggaattggcgaggggcgcaaatctgggttcataaaaactttggcctccgggggtcggagcagatactcgggcttggcgctccgagagacagggggtca

SEQ ID NO: 546531 - DNA, 432 bp, Homo sapiens
aatgaagaaaataaattaggtaattgacaagaaatgtttcaccgattacaataggctataacttagtatattatgaataaaatatatggcacatcatacattttaacatcacagattcagtgttaaacagcaattcagacatgataaagcttagacttgacaagaatgatgtaaatacaatgaggcaactgaaactgaaatggcatgtgtaagtaaaattaatccccaaattaaaggcattccttagatagggcacataataacatcttctgagtacactttggtcaatcactggtcattaagataaacgccattcacttttagttacaaaatcagttttctgctgtagtttaaatacaaagtacaagcacacagtgtcataacacataataaaaaccatcttaatattgcttacatcctaatactattagt

SEQ ID NO: 546532 - DNA, 338 bp, Homo sapiens
  misc_feature (97)..(97): n is a, c, g, or t
atagtctcaggtttaaccttggaatcggccgggggccccttcgccctattcttcatagccggatccccaggcctatttataataacaccctcccccngttcgttcttcctggggacaacatatggcgcactctcccctgaactttacacaacatattttgtcgccaaggccctacttctaacctcccggtttttatgaattcgaacagcatacccccgattccgttacgaccaattcatacccctcctatgaaaaaacttcctacccctccccctagcattacttatatgataggtctccatacccattacaatttccagcattccccctcaacccta

SEQ ID NO: 546533 - DNA, 1021 bp, Homo sapiens
ctagttctagatcgcgagcggcgcccttttttttttgtgtgtttttattatcccctttcttaaaagacaagctagtatactggaaaaagaaaaaaataataataaaataaaaaccaagacaactttattaccctcatctttattggggaaggggagggggaatccgtgggtcgcccaccctcacccgtggctcctcccttctcagctaagctcgtccctcggtgccccccctttgggtgggcaagtgggagaggaccagggtgggcgtggaggtgtcgtggaactagcaaagggtggtgaggtggggcaggtgtggaggtgggagcataccgtgggacccggggtcgggggaaactcggggtgcccaggacgggaaaggggcagctagcattgcgtgcatgcagtaccagggtgaaagggctgtggcccaggcagactggtcggttacactatgtccaaaacgggggaagggccggggctgctgcgcttcgaaaggtctggctcccttgggaccgggtctcccatctgaccctcaaggccttagctaggcctcaatgtcaggacaggtatccacctaaccaggctgacaaggggaggaggagggaacccgggaatggggtcaggaagaaagctaaaggtggccctggcaagctggagctggggcccccgcaagacggcacaaccaataaactactacgggagctacagcaaatccgagacccgaagagatcatggcgccaaacaataccatatagtaaccggagcaacaggtcaaccccaagagacaaccaacaaaaacacacaagagagaacacagaaacgagagacaccgacagacacaaaagacagacacaaaaaaacaccacacgaaaaacagaaaacaaaagaagaacgaagcaaagagaaaaaaaaagacaacaaaaccacagaaaacaaagaaaagcaaagcaacgcaaagaaagagaaacagcaaagaagaaacacaaagagcaaacaagaaaaacagcagcacgtgaacaaa

SEQ ID NO: 546534 - DNA, 971 bp, Homo sapiens
  misc_feature (871)..(871): n is a, c, g, or t
  misc_feature (886)..(886): n is a, c, g, or t
gtaaaccatggggttaatattcaactcatataacagcaaaaaagttaataatataaagtgagcttgtagaaaccaagaataaaaaggtgcaactcattataaaaccaggcaaagtatatgaacagatagttcacaaaaaagtgaactcaaatggccattaaatatttctcaaatctgcccccttgaaagctcagagactagggttttcaaagataatttggagggcagggggctaaggaatgggtgctactgattgcttaggaatgaaattatagagatgtgagaaatgtcttcaagtgctgagtttgtttctgggtgaggcagacacaggacaggtaaagtcagttccttgctgtagaatcacaggtctaggtagtgtcagtaacttttccagaatgcaaatgtctgaaaaatatctcaaaggtcagtcttagattttacaatagtgatgttaactacaggagcaactggtgaagttacaaagtgtgacttctggttacatgactcctaagcagtaagcaagctagggaacaatggctggttattgcttaactatgcttatagcttagcagaattgagacccctaccatctaccataattctaatgctgtggaattgcattaatttcacaaaggggtttaggtccctgaacaagaagggagttggtttcaggaagagactgttgtcatccttgctttaaagttaaattataaactaaattcctcctatagttagcttggtctatgcccaggaatgagcaagaacaaaatacaaatctttaacaactctattagcaaggctgtgaggaaacagacactctcatgtgttaccaaaaagtgctataactctgatggaggcaaatttgaaatanctaataaaattgctnacattgttgtaaggattttgcatcattactctcaaaatatgatctgagaaaccctgaggatacatgagaatctttcaggggatag

SEQ ID NO: 546535 - DNA, 453 bp, Homo sapiens
  misc_feature (82)..(82): n is a, c, g, or t
gggtttatagctttcatatttctttattattgtaaatgggggctgtggaaggtgagaaaacacatgctttcttaaaacagangctctctccttcattaatttaaatatttttatcggctctagaaaatgcataaggttagtacaagatcagtagagagaaagtcaaagattacagaagtgctgaagcagaccattcttcctttcttcccaatgtctattaagatcacacataggtaaactgttacaaatccagaatggtgaaagagtccaacaatggctgagggaagtagaggttaagatatagctcaacagtgaaagtagcagggaaagagctgggcaaggccaagaccatcttttgtaccgttggtacagtaggctaaaggtacggtgttccatattaaatacagcaatatgaagaaaaataaattaagtcccttatacctaaaaaaaaaa

SEQ ID NO: 546536 - DNA, 967 bp, Homo sapiens
ttttcatcattgagagctactctgaggacgatattcaccgttccattaagtataatattggtgcagcacagagccatggtaaccacagagactgggatgctgcttatcgttcacatgaacggtaaaggcacccgattacattgacttttcagtgtcaacggcagtggaacacttctgtggtggtggcagaaatgatagatctgtggtgtgactacaacgaaatgtgtcaggtgtgtggtgcccaggtagtaaaatggcaatggtgtcgtttggatgtcaggtggatgttttgtgagaggacgtttcccaatagccaagtgggaatacattcgtctatagaacaatgagaataaacagtgagccaaatctagggacactcaggaggtgcctctggaaaaggctaagtcaggtgtgagacagcattatgagtcagagtacaagtcatcgacgccacttccagttgagattgactgctgcacaactatgagaaatgccttggagggaacgaagaaagtgttccaaaggaacggtgaaggtcgtgggaaataaggaggcagtgctagagaggactgagaaaggttgcatctgtatgtcctagagagggaaggatgagcttggaggagaattaggacttttttcttgagtttacggactttccgagacgaatggagaaactggcggtaacgttttggacttcacgaaagacgtaggacttactgtcaggaattcactatgacagaagagatatacacaaaacttcgtgaggatccggagaaacggtcactatattggcttgttgggttcagacacaatgcgtgggtaggtgaaacaattatcgaattaaaacaaaaggtcaaggttatgtaacacttcccacctgagtgcgtaaccaggtgagttgccccacaggggatgtattacgcaaatagagagactaataagaggagacagtcaagaaaaatagaat

SEQ ID NO: 546537 - DNA, 347 bp, Homo sapiens
aaaatgtgggacttgtatcttctttgtttttaatgcacacacatacatgttctgtgcatgtatgtggttactgtgtatatgtgtatgagtgttgtatatgcatgtgtgagtgtgtgtctgtatgtgtgtacaactaaagaagctgcagaaactttgtaatactttgtgaaaaggattatattataaaggtttgtactgtctgagtgcacagctactggaataaatttagggaatctcaggaacaagcatataatttgtccaagatttatttcttctcagaagtgtaagtgcagtttttaattctgtatattatttaatattttaccaataaaataaacttctgacat

SEQ ID NO: 546538 - DNA, 459 bp, Homo sapiens
  misc_feature (9)..(9): n is a, c, g, or t
  misc_feature (53)..(53): n is a, c, g, or t
  misc_feature (66)..(66): n is a, c, g, or t
cagaacagnaaaaggggccccctaactgtggtagggaagtggcccccccagantccagggaggccnggatgaaatttaaaattcctgccatgtagggccatattttggggagtgatgggattatgccacacccttcaggtgtcaagataaagagataaaacccagagtttgtacagaatgagcttgctgacacacagcctaaatttgtaccgcatgtttcatactaactccctctgagtttgcacatgggacccatgaggaggcatgaagaggtaactgcccatgcccgaggattttccagcccttccttttctttctgtcaatcacctactaatcacagaatccactccctacaccttttctactaaaataactctttaaaataagtacaatgggacagatttgagctgggctcctgtctccttgttaatcaaattgcaataaaatgttttcttttgt

SEQ ID NO: 546539 - DNA, 233 bp, Homo sapiens
ttgtgggaacaccacacgaaattgatctggaaacacatgtgagagagacggaggcgctgtaactacaggaaactacacgccacgtatcttggaggagcaggctcctgacacgcgggctctgtgacaccagacggtctatttgttcaccataactgaagggcatctaagaattaggtacaggtaaggcatcgacagcttgcttggagaattgggcaccagaaccggcttgcgtc

SEQ ID NO: 546540 - DNA, 286 bp, Homo sapiens
tcagcgatagacaatggcgcaggaaagaaaaggaaaagaccttatcagataagttgatttaacagaaaagagagagagagagataaagtgggtagattttcacaagtgtatacagccgaaaagaggacatcttttgccgtgaggtcacgggaatattgtaaagagatatcaagaagtccctattgttgcatgagttgccacattcacaaattctcgtgcttctctttcgacatagccaaaataattttgcttgagggaggagcgcataggagcaagtcattgtggg

SEQ ID NO: 546541 - DNA, 187 bp, Homo sapiens
tctagaggatccctgcgatgttctcaccgaacactactaaggggtgtgtcttgtccataccttttttcttgttctgttttttgttttttttaccccggtgcgataacctttcttttttttagcccctcccttgtgtatctaaaagtcttaacaaaaccaaaaaaaaaaataaatggttttggggccc

SEQ ID NO: 546542 - DNA, 861 bp, Homo sapiens
cttttatcggcttgtcccggggttaccctaaggcctggtgaaccagaggggggggcgaatcaaagagtcttactagttagaggcctctaagatctgggttgcatacttgccggcggcatcttaaaacgcggggacccagttgtttctaatatagcgaaagctgcgacccccttttgacgcgatcccattcacggcactttgtccacacaagtctgcacacttatattaccaccttggggggtgcccatctttacgcacacgtgggtgctctgccacccgtttgtttcgtcacgcaactacgcgagaacgaactcttcatgatttacttctacatgtcacaatcccaggcacctttgggccccaatttatatgcccttttgatctcgcaaggatctgacgcccagtagtcaccacaccgggtacccaccgtgtcagtaccgttgcccgaaagagggtagtgtctcagaacattagtcatcacaggctttctaacagatcctggatattactgcccacgccagggccccttcgcacacatatcttcgttgtatagcccgaataccctccacaatttatgtataatgaaacaacacctgcacccaacctcacatatgcttcactaggcacaacaatgatgtacgcaactctcgccctgtactctaccacaacatttttttgtcaccaagaccctacttgtttacctcccctgcttcttatgaattcgactagcataccccccggattccgctgcggcccatttatacacctccgtacgcgtacttcctcgcatcaccctagcattacttatagatatgttcccatacccattaccatttccagcattccccccttcataaccta

SEQ ID NO: 546543 - DNA, 457 bp, Homo sapiens
  misc_feature (2)..(2): n is a, c, g, or t
  misc_feature (181)..(181): n is a, c, g, or t
angtctcccttctgcaacccctcctcaacctctgtccctttttgcaggcccctgaaatctgtttcccagctagctttgtccctcccacactaaatgaggacccaagaaaaatcaacaatgattcctaagcgtcatggagacttaggtatgctctcaaaagtgaaacccaggccgggcatgngtgtcacgcctgtagtcccagcactttgggaggctgaggtgggcagatcacttgaggacaggagttcgagaccagcctggccaacatgatgaaaccctgtctctactaaaaatacaaaaactagctgggtggaatggtgggtgcctgtaatcccagctaattgggaggctgagacagaagaatcgcctgaacctgggaggtggagggtgcagtgaaccaagatcatgccactgcattccagcctggatgacagagcaagactccattaaaaaaaaa

SEQ ID NO: 546544 - DNA, 313 bp, Homo sapiens
ctgttggtcgtctctagagtaatccccctgcctggttgctctactgcactcatacctatcttgcacatgagcatcaaccctctgtgtgtggctttgtccacgtatggttacagtgacctatgactttgtcatgccgaaaggctgtgtggtgggaaccacgaagcgggtgctcaccctccgcaagtccttgctggtgcagaccaagcggcggcgctctggagcatagattgacctttagttcattgaccccacctccaagttgggccatggccgcttccagaccataccagaataggagtatagcaaccggcgg

SEQ ID NO: 546545 - DNA, 296 bp, Homo sapiens
tgtcacccaggctggagggcagtggcacaatcacggcttaccgcagcctccctgactcagatgatcctcctacctcagcttcctgagcagctaggaccacaagcgcccgctgccacacggccaatttttgtattttttgtagagatggggttttgccatgtttcccaggctggtctcaaactctggggctcagcgatccctctgcccaggcctcccaaagtgctaggattacaggtgtgaaccaccatgcttggctactttatattatcataaccatattgttggtaaattttttg

SEQ ID NO: 546546 - DNA, 482 bp, Homo sapiens
  misc_feature (52)..(52): n is a, c, g, or t
  misc_feature (71)..(71): n is a, c, g, or t
  misc_feature (106)..(106): n is a, c, g, or t
tcttaagctttccccccatagtgcctatagttcccaaaggaaacttaacctncctgggtaattaaccttanttttattagaacactgcagttggactgaaaacatncagatgcactggaagagaaccttgtgctgaggtaatggcctcccactgccgcctgagtgctgaaatgagcttgaggtgttcttcaaagccagtgtcactgtgtgggtcactgtgaggtgactgcatggtgcctggccctggcacagctggtgacttcccttgtagagtgtttgcgtagtggagtggctgtggctcaccaccccctttcccaagtgctttaatgaagacacctcccttgtgtttcaaccaatcagaaactactttaactaaatgtactaacctttttccctcctaatttgctttgaaaaagtttagtaattcaattaagcgtgattctatcttagaagaaataaactcagtattaattcatgtctaa

SEQ ID NO: 546547 - DNA, 113 bp, Homo sapiens
aattacaattgtgaagatgatagtgtacagggaaggttaatggttgatattgctagggtggggatcaatagagggggaaatagaatgatcagtactgatctataggagtggtg

SEQ ID NO: 546548 - DNA, 286 bp, Homo sapiens
gatgggatataactggacgggagtaaagaggtgttgtgactagtataccagatcatgcgtgtaaaggacgaggattggtagtacgtggagagtcaagcaggagtggagctcgatgctggcctctgcccaggagcagccagccaacagctcccttcggtcttcagcccttcagggaggatgcgctgcacaaagaagagcgggcctggccaagggcctgttctttagtatccagagtgaccacctcccttggtcaagggcccgagagtagggcccgagagcagggccc

SEQ ID NO: 546549 - DNA, 610 bp, Homo sapiens
cccccccctacccgcaaaagggcgctcagacacgtccactaatagaaccacaaacccagagaacaacctgttcaccactcctgggtgcatgattgaaggtgaggcgtccaccaacacttcaaggggtccatagtattttttttttttgctgcctcaaagtccccaaagccttccagcaaaagtggcagtagatggttgccaatcagccaatgcagactttcactgggacaacaagaaagcacatcttctgggttgtggagggaacttggcactggagacattcagctgatgcattatataccccgtcagagcacacttgtatcttttaccttgcctttgccccatgcccccaaactgacttaggtgttctctgtccctctactgggtggtgacgacgagatcatatacaaacaggcgtcttttgctaaaaaaaaaagaaactggacctccctgccctcagggcgggaaactatccgcgcccgtcccctctacccgaggttaattgcatgaccctccgtgcttgcctacgttggactcggcaaccccgacccaacgatccatcgtgaggtacgctcaagcgccgcacccacggtctccaccctatggcgcg

SEQ ID NO: 546550 - DNA, 257 bp, Homo sapiens
  misc_feature (5)..(5): n is a, c, g, or t
  misc_feature (14)..(14): n is a, c, g, or t
  misc_feature (124)..(124): n is a, c, g, or t
  misc_feature (131)..(131): n is a, c, g, or t
  misc_feature (142)..(142): n is a, c, g, or t
ggagncgagcgcgngggctgctcgggccgctggcatcgggtcgggtatggggccgggaggtttccccttggggctttgttccggaactgtgtccccgccttttcccgacggtgattcagaggtnccgacgncgggttccggncagtcgggcctccacccgttcgagtttggtaaaagaaaatggcccgaaccaagcagacttctcataagtccacctgtgggaaaagccccccaaaaaaagctggacacgataagac

SEQ ID NO: 546551 - DNA, 419 bp, Homo sapiens
ccaacatatgaactgcagcatatcactttttctttttgggcctcaggttcctcagctgtaaaattgaaaaatatatgtattaataatattattaataataataatgggaatgtagtacttgtttgtaaagcactttgagatccttgggtgaaaggcaccataagactgccaagcaatataatgaggccaaggcggttatataaaatgggaagttcccaaacgccacgaaagcaaggggtcgattcaacgtcacagagtcacccgtaagatatacagtaggacagccccatatatagtggccattgaaacaagcagaattatatacaccgggctgtaaaaaatcaaagctaccctaaggggcttcccccaccggccaaaaagtgccacttaataaaacgcccaaaatttcttctacggag

SEQ ID NO: 546552 - DNA, 1457 bp, Homo sapiens
  misc_feature (629)..(629): n is a, c, g, or t
  misc_feature (992)..(992): n is a, c, g, or t
cggccctacacacgtgggggcaaccaccagcgggtgtgggcgcctctttgtgtaccttcgagggcccccagggtgtccagacagccgggcgtgtgttcttctcgcgcccttttatttatcccgggtctttaaaggtttcacagctcttggggttgcgagattttcgtgcccccggacgcgggggggcgttttaatgggtttttcttaagagtgagaccggggcataattgtccctttcgaccaacgaccaatggggtgcccccggagacttctctttgaaaagtggggacccggttggaaccctccaaacttgtgtgtaaactttgttttatggaggaaagcgtttttagtgggcgccaccgaagaaagtttgccttgtcgcagacacgcttctttggggtggtacaagagaataggggaaaagagggtatatattcattggggtccgtcacgagaaataccaaaagtggggtgggggaaccccgaccccaaaacccacaacggggtgtttccccccccccacgtagacaccacaaggggggtgtgtgccctgtgacacccccacattggggcccccgtgggcctccccccgcagctgggcggtatgcctggagaggtaatataggggnccgccacattgttctcctctggggttatccagagagccccaccacagggagggaaatcctcgggagagatataagagaaagagagggcatatacttcacgctttgtcctggggtgtggacacctcttgtggggagagaccacaaaatatcttgagagcgctgtttcttcacacacttggggtgtatgttttgtgatacataaatatagggagagagagaacagcgaataattctccctcgggggactcggagcctttgagagtgtctacacacactggtgctcttttccccgcctcggggcgctcccccaacaagagagtctattgcacatgagattcccgctcaagactgttgtgcacaatnttctctgtctatataagagaggagtgagaagtgttctcccccagcagtaagtttgtgtaagaaatagacctcctttaaatataagaagagaggtatagaaaacacttatgggaccccaagccacctcccagagaattctagcgggtctgttgtgttacactcccacggtggtctcctgccagccactcaaacggcggcggtgatatgcttctgaagaaaaccagcggtaccccagaaaaaataaaagaaagagaggctcgccagaaataatagctaaacattttggcccagagagaaatagaagaggaggcttaaaggagaaagcccccagaggcaccaatatgcgaagagaccccagacatttcctcttctgcgagcgttttacattttaagatttgaatacccgtccaggaataaagatatttttggggggcaccaaataaaataaagatccagacttctgga

SEQ ID NO: 546553 - DNA, 144 bp, Homo sapiens
tttgttccgcatcgcagtctccccggctcggccctcaccgctgtcctccccgccctttgggcggccacgcccggcggctcccttgaggtccaggcatttcgcacatagcctggcaaacatggtgcaaacctctctcatcacact

SEQ ID NO: 546554 - DNA, 127 bp, Homo sapiens
cttcattcctaccatggatattctaacagagtgcagaaagccagatctcagatctgcattcaccgtactcacacctactagtctgttacttcggcaagtaccccatgcagcaccccttgggatatga

SEQ ID NO: 546555 - DNA, 390 bp, Homo sapiens
aacgatggtccgtcagcttcacttgtcatgttgcaagctgcagcaggatccaccaagcagttccggcactggcagtgccagtgtgtgcaatcatctgattactataacctccaactcctgtgtgctcaagcaatcctccctgcctcatcctcccaagatagctgtgggctatagtcaccaggccaccacacctggctagatttttcacttattttgtagaaacggggtctcaacgctggtcctccactctgtgggttctgcatagtggcttcaaccaaccgcgtatcaaacatattcaggaaagaaaatgacacgttgtgtctctactgcacatgtagactttattccttggccatagttccctcaaacacataccatataaaacactat

SEQ ID NO: 546556 - DNA, 1112 bp, Homo sapiens
aacactacctcgtcccaaccattatattactaccagcggacatgactttccagaaaaacacatagatttgaatcagacacaatcctacccacagcctaacttattagcatcaatcccatctactcatttctattaaacgctacacattcatgcaatcgaacctatttagactgtttcccctaatccatgtttcctaccgtaaccctcctaatcaatcctcctcctcctatatacttatacttaccttgatctacctatcactccttcaccaactcactgagctaagccttcaaactgtccaagcgtgtattccatgtcgtacatccgacatactacaacgtagtacaatatacttctactcgtctacatactactaaagttctcccctttacccaaagaatgcttccacatatagcctctcattacacccaatttctagcgagccgcaagacaagggacatcggtaaatcgcactcatttcctgataggtaattcctcatcttgtgtcgaaaagaacacgtaccaacgtggtcattcacgcccgaaccgttctgaggccctcacttccaattcccactcccgcattcgaacggtggctcacacctcacagcctctaggagaataactgaacccggtggtaccatatgaccaaggtggccatacaacataactccttgtaccacttaatccaccttaacgtaaccccccttaatgactcaagaggacgtcctcgacattagacgcaacaccttacactttccaacatcggtctgagacttacaatattgtcatcgaacattaccaggctaaacacacacctccacttcacggagaccttcacccataggtaacaaacacagatctcttccggttacccttgaagcatatcacaagctttcctgtccaaacgtaggaccccccgaactgagacacaccgtgaattcctagcaaaagcttaccccattggcaagggcccccaacacccactaatcgatcttaacgttgatctgcaacgttgatgtggctctgaacctagacacaacgttaaggcacgttggatatacataaaggataccaagagaggacgggccgcctatcagttgataaccagg

SEQ ID NO: 546557 - DNA, 786 bp, Homo sapiens
ccacacccagctaattgttgtattttcagtagatacagggtttcgccatgttggccaggtgaatctctgtctcttgacctcgtggtctgcccacctcgggctcccaaagtgtttgttttcctttttgatacaggcatttattgttataaagtaccatcttagtactgcttttgctgtatcccataggtttcagtatgctgtgtttctactaaatttccttcttaaattatttaattcatccagtagttattcaggagcatgttatttaatttccatgtatttatatagtttccagagttcctcttattgatctcttcatgttttctattttttcatggttcaatcttggtaggaattttatgtcccgggatttttatgtccaataaatgcttattgatttctagtttcattccattgtggtcagaaaagatacctgctatgatttggatttttctgaatttctgagacttgtgtttcggcctaacatatggtctaccctggagaatattttatgtgcccatgagaagaatgtgtattattcagctatcgaatgaaatgttttgtaaatgtctattgatcaatttgttctgtagcgcacattaagtcagatgtgtctttgttaacttttctttctaggttttttgtccaatgctgaaagtggtatgttaacttagcattcccaactatcattgtgctggggtctgtttctctctttatctctaataatatttgctttatatatctgagtgatccagcataggttataatatattacagtcttatatc

SEQ ID NO: 546558 - DNA, 129 bp, Homo sapiens
ttcgaactctgtatcagtgatctgctgccttggcctcccaaaatgctgagattacaggcatgagtcaccaagcccagccttctttcttttttttgacgacagagcctcaccctgtcacccaggttggag

SEQ ID NO: 546559 - DNA, 351 bp, Homo sapiens
gaagcacgccagcctccgagtagctgagatatggcgctgcaccacgctagccagttcttgtacctttagcagagacaggtttcgccatgctgaacaggctggtcttgaactcctgaccttaggtaatctgccgtgccttggcctcccaaagcaatgggattacagacatgagccactgcacgcccagcctgaagtgctgtagtgtgatcttggttcactgcaacctccgactcacaggttcaagtgattctcatgcctcaccctcccgagtagctgggattaaaggtgttcgccaccacactcggctaattgtggggcatttaattatctattttttttattttttttttt

SEQ ID NO: 546560 - DNA, 378 bp, Homo sapiens
  misc_feature (49)..(49): n is a, c, g, or t
  misc_feature (57)..(57): n is a, c, g, or t
  misc_feature (81)..(81): n is a, c, g, or t
ccaccctaaagctgacctttgaatctagactactccagcagcccatttntaatcccnccacctccaatctccaaaacaaancagaccttaagctacctttattcagccaaactcctgcatgcctaaatcagtctcagggttcactgctgcctctgccttatgtaactcctactaagtcttatttgcctatactatactgcaggcttcttaggaggcaagtcctccccgtccatcccactgcagccccacatagtttgtcttacccaacatctaggaattttttcaaaagaaggttttacattggtagacatccaactttaaaaggagtaccttcacaactctaagtgaataataaagtgcatttaggctcgtgccgaa

SEQ ID NO: 546561 - DNA, 132 bp, Homo sapiens
tgagtctagcctgggagccaggatactggggtccttttcccagtcttccactgactggctgtgtgaccttaggaagtctctgcccctctctcagcctccagtgtcccgaaggccccgaagcattccattctc

SEQ ID NO: 546562 - DNA, 125 bp, Homo sapiens
agtgtatccacaaacaggaggataaaggaggtgcaagaaaacctggctgagtgtggcggcgcatgcttgtaatcccagctgcttgagaggctgaaacaggagaaccactggaacctgtttgtgga

SEQ ID NO: 546563 - DNA, 101 bp, Homo sapiens
tatgggaatatcagtagtggaccgcctgctggtcacaggggtccctcctcatctcccaattcttacatgtcaatatctcagttctacatcacaaatacaag

SEQ ID NO: 546564 - DNA, 125 bp, Homo sapiens
ctcatacctattattcgtgtgcattagctgtatctcctagtgcacagctctaaacctccttattccagccgagctgggccacccaggcaaccttctaggtaacgaccacatctaccatcgttatc

SEQ ID NO: 546565 - DNA, 288 bp, Homo sapiens
actctagcggatcccttatatgctgtctcaaaaaaaaactaaaaattgctgggcgccgtggctcacgcctgtaattccagcactttgggaggtcgaggcaggcagatcacgaggtcaggagttcaagaccagcctggccaagatggtgaaaccccgtctctactaaaaatacaaaaattagctgggcatggtggcacttgcctataatcccagctactcgggagggctgaggcagagaatagcttgagcctggggttgacagagcaaaactccgtctgagaaaaaaaa

SEQ ID NO: 546566 - DNA, 780 bp, Homo sapiens
agcgtgtttccgcttttacattgcttcttaagtgatttttacttatttctgtttgtttaattctaaatatgatgttttgtattttaagtacttttataattggtgttttttcatacaaatgttcagttattatgggttttttaggtgtattacatactcatgaagaagatatactgggtatagactccatctgacacacatacagatttctatcagtttaatagctatcacaccgccagagcctgaaccaatcaggagtaccacagagagtgtaaagaggactcctctaagaacaagaagtctagcatccgagatgaacaagcagaagagcaacaagcaggaagccaaagaaccagcgcagtgcacagagcaggccacaggtggactacgacactcatctgcagaatggggactagctccaaaagagacgctgagaacgcggcagcagtcccttgggggcttctcttgaaaggccgtgggaccaaagcggatgtttggatgctcaagtgcaaaacagacccagtatccatcggaccagttggcgaatccaagtacacagggaagtgcgtcttataccatgtcaagtaagagagtggcctgttgccaggaagtggagcgtattgagctgaaatggcggccactgcgcgacacacacagcacgcacacacacgcgcgcacacacagaacacacacacacacacctcccttccagttcccgctgccggtgcttcttgactggtaacgccctaaagtcttcattcaaaagggcagtgcccccta

SEQ ID NO: 546567 - DNA, 174 bp, Homo sapiens
tagagtattatgaatccttaggggacctcgtagaagtaatcatttttaagaagctgcacatgagtaaaggagataaatgctattagatcctctcagtggaagctatagaaaagttgatcttgaatcctgaagttggaccagaatggaacatttgtaacaaagggctggagaggg

SEQ ID NO: 546568 - DNA, 975 bp, Homo sapiens
gcttgtcctgtggcgagcagccgagctgatcagtgagcgtggctgtctcctctctccggccatggacgtgtgctcgcccattgatatcggtgtactcctggaaaagggggagtcatctggcaagaatgtcactttgcctgcatgtgttcaaggctgcctaattcgaccagatgttgtgacactttgttcactggcaaacttgcatcataaacttcacagcacagccctatatttgtccagttgaatgagtaggtcaatcagactagtgctgagtctatgggggtcactggctagatgctgtgtgctcgaatacccagagtacgaggtggtgggactcgacgctctggccatgagctgcttgtggaaaagcatgtgtccgtggagggccgctatgttgtgcaccaaccaaaagcctggcgccgtgtggcgatcgttaagtgaacgactaacccattcgaacgagtacgccagtctgtgcctgccctggcgtgctcacgctcctacgcagcctactggtcagtgtctagaaggtcatcgtagtgaggaggtccctgagacttcctttggtagtcgaagatatgttgagggctacaggaagagccaggaagctgatttgctccttaagataacttcaggctgtcatgatatcacgaggtcgatgcctctcagcggatagaggtggcaatgggaagtgtaagacgacgcgagaccagggcagggccggcgtcccttttatgagagaggggtagcaaggcctcaaaaatccttgaatcctggttagtagcattgacacttgaggtggcccgagacagtggacgtcactattgagcaatggcacggagagaagaatacggacgcgagacgcccaaataacctccaaaattagcggtgagttagcccataatttcccatacgtcactacgagttccacaaagtgtatggtcgcttgctagaaatcaactcccgctccctccg

SEQ ID NO: 546569 - DNA, 239 bp, Homo sapiens
  misc_feature (9)..(13): n is a, c, g, or t
ataaaagannnnnttccgggcgacatagctccaccgtttgaggccaacgacgccaaatgtttattttgccaaggttgaggactctatccgtgacggagcggtggggaagtcctgacaacatgtgcccagggtgggcagggcacagcttggttttatatttttaggaggacataagacatcaatcaatatatgtaagaagtacattggttcggtctggaaaggcgggacaactggaatca

SEQ ID NO: 546570 - DNA, 690 bp, Homo sapiens
  misc_feature (533)..(533): n is a, c, g, or t
  misc_feature (574)..(574): n is a, c, g, or t
  misc_feature (623)..(623): n is a, c, g, or t
  misc_feature (635)..(635): n is a, c, g, or t
  misc_feature (661)..(661): n is a, c, g, or t
  misc_feature (690)..(690): n is a, c, g, or t
ctgacttcaagaatgaagttgcggaccttcacggtgagtgttacagctcttaaagatgacacagacccaaagagtgagcagcagcaagatttattgtgaagagcgaaagaacaaagcttctacagcatggaaggggacccgaacaggttgttgctgctggctggggtgaccagcttttattcccttattggccccgcccatgttccatttctgtcctatcagagtgcccttttttcaatactccctgcatttggctacttttaggatcttgctgatcggtgcattttacagagtgttgattggtgcattttacagagtgctgattgttgcattttacaatcctcttgctagctacagagcactgattggtgcattttacaatccttttgctagctacagaacaactgttggtatgtttttacagagcgctgattgatgcattttacaatccccttgcgagctacagagtgctgattggtgcattttacaattctagctacagagtgctgattggtgcgttttacaatcctctntgtagacagggaaatgttctccaagtaccaacccaaatgtncatcaatgatacactggattaacaaaatggagcacatatacaccatggnatactttgcagncatggatgagttcttgttccttgganggacactgatgtagcttgtcatcttctgn

SEQ ID NO: 546571 - DNA, 405 bp, Homo sapiens
  misc_feature (29)..(29): n is a, c, g, or t
  misc_feature (37)..(37): n is a, c, g, or t
  misc_feature (46)..(46): n is a, c, g, or t
  misc_feature (82)..(82): n is a, c, g, or t
  misc_feature (127)..(127): n is a, c, g, or t
  misc_feature (389)..(389): n is a, c, g, or t
gagatgccccagaaaagaccaggacatgnacccgggnacgacctgnttcaacaccaatgaccacgattgcggccaaccctgnaccgctgcctgtgcccagcactgcccggaaggccatgatctgcgntcattgccaatccggttaattccaccatccccatcacaggcaggaagttttcaagaaggcatgggagtgtacaaccccaacaaaatcttcgggcgtggacgaccctgggacatcgtcagaggccaacacctttgttggcagagctggaagggtttggatccaggctcgagtcaacgtccctgtcattggtgggccatgctggggaaggaccatcatccccctgatctttcagtgcacccccaaggtgggactttccccaggnccagcttgacagcact

SEQ ID NO: 546572 - DNA, 301 bp, Homo sapiens
ggagttcaaggctgccgtgagctatgattgtgcttctgcagtccagcctgggcgacagagaaagaccctgtctcttaaaaaaaaaaaaaaaaaaaatcttagataagaggatgcggggcctcccggggggtcttcagtcacccatagtccgggcaagagaggagggccaggagagagcttcacccacctgcggtcctgcccatgtgacatccgcaggtgctgccagggccacgatggtggttacactcgagctgaggaggccggttgagcccaaagaaagggcgcccaatgcaggggcaat

SEQ ID NO: 546573 - DNA, 175 bp, Homo sapiens
agtacggtgttccactacggtctagggtaaaatgggggcaggatatagcggaagtggtgggccaaaggcaatttcggggcgcacaaacaggaatggctgtcctcttttagggccactggtctatcagacttgagtagtggggcatttgcctggggatctgccctacttctaccca

SEQ ID NO: 546574 - DNA, 319 bp, Homo sapiens
ggtctctgctgagaaatcagctgttaatctgataggttttcctttataggttacctgatgcttttgtctcacagctcttaagattccttcgtttggactttagataacctgatgactatgtacctgggtgatgatgttttgtgatgaatttcccagaagttctttgagcttcttgtagcaaggccagagaaggaagttttccccaattattccctcaaataagttttccaaacttttatatttcccttcttcctcaggaacaccagttattcttaaaatatatacttttttatttttatgagacagagtctcgatctgt

SEQ ID NO: 546575 - DNA, 123 bp, Homo sapiens
gaagatagggttgggacagggtgctttggaatgaaagagtgacttagagggctcttgggcctcaggaatgctcctgctgctgtgaagataagaagggctcttactccagtaatgatgagtgac

SEQ ID NO: 546576 - DNA, 239 bp, Homo sapiens
ccaaggaatccttactccgttttctgaaggatagatttagctggtgactgattgtcggtttagaacttctggactggcagcacactgttgttgcccaacgtaatcaccttgcaggagaacctcctgtcgctaactagcatgcgaatgaaggagaccgcgcagttccaccttcccaccagttgctcactctgaaagacgagtgggaggagcactgccaggaggcacataacgtggaggaa

SEQ ID NO: 546577 - DNA, 333 bp, Homo sapiens
ccgatagcttatagtagcaaaaaaaaaaaaaaaaaaattccactcttcagaatttggacctggtggttattctggtccagactggccgtaacagaataccatagatgggggtgggcttcacatatttacacaacacatatttatctctcatagttctgggaggctgggaaagcccatgatccggggtacgggccaacgtggtcccgggtgcgggccctttccctgggcttgcagatggcctcgttttggctggtgttgccacatagcagagagtgtcgcaggcaggcaagccagctctcgggtatctctggtttcaagtacactattaagctt

SEQ ID NO: 546578 - DNA, 174 bp, Homo sapiens
  misc_feature (2)..(2): n is a, c, g, or t
  misc_feature (102)..(102): n is a, c, g, or t
  misc_feature (148)..(148): n is a, c, g, or t
  misc_feature (161)..(161): n is a, c, g, or t
cngccatgcggtctcgcaccagtgcccatccccaggggcttggtgctggtcacgatgccatccctgccttgggctgggcaacggcggcacacgctgggacanaggaagtggaagtggacggtctgacggcctacgtggcaggtgagcnccctgacccactnggtcccaggtccc

SEQ ID NO: 546579 - DNA, 259 bp, Homo sapiens
aatgaggccggtacctgttgctaggtgcggtgcgtcatgtgtgtaatcccagcctttggaggcgaggtgtgtggatcatgaggccaggcgttcgagaccagcctgccaagatagtgaaacccgtctctactaaaattacaaaaaattagctgggcctggtggtgggcgcctataatcccagctactcgggaggctgaggcaggagaattgcttgaacctgggaggcggaggttacagtgagctgagatcgtgacactgc

SEQ ID NO: 546580 - DNA, 113 bp, Homo sapiens
  misc_feature (63)..(63): n is a, c, g, or t
cccagctatacacttggaagtgccgagcagaggatcacttgaagccatgagttggagagcagnccagacaacatagcaagaccccgtctcgtacaaaaaaaaatgaaaaaaaa

SEQ ID NO: 546581 - DNA, 572 bp, Homo sapiens
agactttcaaggacaaaggtaaaggatgccattcatgggccttttgcttcttctttctctcgctcccttttcccccgcttctctctctgtctctcatctctgtctcttttttaataaaagctttattgcatataatttacataccataacagttgcccttttaaagtgcacaattcggtggtttttagtgtatttacaaaattgtggaaccatcaccattgtctacttccagaacaattttatcaccgcaataagaaatcccatgcccattcgacattttggtttcttttaaaatttattgcaatattacttgaatgtaatcccagcactttgggaggctgaggcaggtggatcacccgaggtcgggagttcgagaccagcctggccaacatggtgaaaccccgtctctactaaaaatacaaaagttagctgggcatggtgacgcacgtctataatcccagctacacgggaggctgaggcaggagaatcgcttgaacctgggaggcagaggttgcagttacccaagatcatgccactgcactccagcctgggcaacagagggagaccatctc

SEQ ID NO: 546582 - DNA, 108 bp, Homo sapiens
  misc_feature (94)..(94): n is a, c, g, or t
ctcaggtaatgtgggtcaggttctcctcagcatcgcacgtcgctgctctccatgtgaatggtgggtcgaggttcccctcagcactcgcatgtcngcctgctcttcatg

SEQ ID NO: 546583 - DNA, 305 bp, Homo sapiens
  misc_feature (219)..(219): n is a, c, g, or t
ttttgcggtgccctttccatagtgtggctccacagagttttgttcatgcccagcctccttcatataacaggtgtgtaatgttctggctcagaacactcttttggatgtaaaagttttgggtcagaatcttaaggttgaattttgaggtgtagaaacatacccattttctatccctaaacaacacttagggatagaaggcattagtgaggaatgacctgngaatacctacatcttcattccaatcttcaggcccccactcctcttgttgcagtcctccatgcactcgtcccatcatctgggtcaaa

SEQ ID NO: 546584 - DNA, 285 bp, Homo sapiens
  misc_feature (43)..(43): n is a, c, g, or t
agcgaagacatcccaggtcgggtgaatcttccagccctggggngtggaggtagtaaacggccatggaccattgcagaacaatcttttgcccggtggaaatctgtggacgtccatggggctaagcccctatcggtggcaggtggacactgcacaccgggcctaagggcccgatttcgcgagcatgctggtgtccacagtggggctttccagcagggttatcttatgaagggcttgctgggggaaaccgttaaacgcaggaacccgggaaaggaacccaaaaaaagg

SEQ ID NO: 546585 - DNA, 302 bp, Homo sapiens
cagtgttatggtgccacacacttttaaatgatcagatctcacaagactcataacgaatacagcaccaagccacgagggatccaccccaaagatccgatcatctcacagcaggccctacctccggcacgggggattacaattcaacatgagatttgggcagggacaaatatcaaacagtatcagaggtggtggacggcgggctggagagcaggtggtctgggctatctcttgtttccagaagtgactcaccttgcacgctggaccagtcacttcatatccacatgcctcgacttcgtcctctg

SEQ ID NO: 546586 - DNA, 664 bp, Homo sapiens
gacaccacgcgagagacgcacggcacgaccgcacaggaaaagcaaggacacacagcaacacgcagaacaagaccacacacaaagcaaccaccccctcactacccacacaacagcacaacccacacttacaaccccagcgcacaacagcaggcgcgggacggaggagacgacgatggcggacggaacgggccgcggaagagagacgaggcgagagggagcgagcgaggcgcgcgcgacgcggcgggcagagggcacaggacgcgggcgggacggggccgcgagctcgcagcagcgggcgcgcggcgcgagagagtagcaggcacgcgcgcggagggggggagcgagagagaccagagacgaagcgaggagggggacagcgagaagggcgaaggagggcgaagcggaagtgacaggagagaccacgcgcagagaggacgacgggagcgcgccacaggacgcgacagcgaggaccggcagcgggggcagcggggcggacggtaggggagcgagcgaaggcaacgcggagagacgccacacgcgtgggagcgagaggcagacacggcacgccaggacgcagacagctggcggcagcacggagacaacgagaggatcagggagaggcgccgcgggccagcccagccccatccagggcacgcagcactcg

SEQ ID NO: 546587 - DNA, 165 bp, Homo sapiens
cattggcagagggggtcgcatttgggcaggcacacaggtgtggctcataacactttgttactgcaagcacagcaccagcaggcattcttcgtgacattgcagcactttctcacaatcactcaccagtggaggcagctgccccatgaatgtggctgcaccttcatt

SEQ ID NO: 546588 - DNA, 247 bp, Homo sapiens
acacggacagggacagtagggaagatacgtgtcccagcgcagctaggtaaatggagaatgcattgggagattgatcacaaaagaggaacgggaacagcaatacagatggggatagtgaagagtgatgaggaacgaggaaaagtgatggacgaaacacctaagatcttcacatgaagaaatcataatctgcactaatttgggagacgtgaatgtatctgttatgggtaccagagctcgcaattctgta

SEQ ID NO: 546589 - DNA, 221 bp, Homo sapiens
ttcgcggccgcttttttttttttggctttaatctctacgacattatcttagtctgacatgcgatatatatcatactatacgacaatttacccaaaaccatgtgtaaacgtaacgagtacagatcaatgacttaaaacctaaagagtcatacgagtcaaacatctctagtgttgagcatatgtaattcattgtcaatcagtgactagtcacgcaaaactcta

SEQ ID NO: 546590 - DNA, 371 bp, Homo sapiens
tgaacaggaaggattcttgccaggttaccaggggctttggtgatagaagtgaagtggactaactacgtatccatgttgaatccacaggccaagatagtcaatggaggtgcaaatctaatgtcctctgcctttcgtgaggccaactcaggaagtgaaagggcgattcgtattcccgctgcgaatacttttgtggatgtgtgtgcacatgcagaggcaggtgtcagagcgccaccagccatcaatgccaggatgccctttaacttcttcttcccgttggaatgtcattgatctggtgcatcgggtcgtgagtagacacgtgaaatttgaaaactgtacgtgcggtgagagttaatttcatatgctgctggcga

SEQ ID NO: 546591 - DNA, 109 bp, Homo sapiens
  misc_feature (43)..(43): n is a, c, g, or t
acctcggcagtctcgggataaggtttttggaagagctgtcctngtgccacacctggaaggaggcctctggtttaagctgggctaggcctctgagactgcctcgccaaat

SEQ ID NO: 546592 - DNA, 239 bp, Homo sapiens
cacggctgagagacaggattttcgccatgtggccaggctgctccctaaagtctgacctcatgtgatccacctgccttagatctcacaaagtgctgggattacatggcgtgagccactgcgcccagccgatagtgggagactttaacaccccactgtcaatattagacatcaacgagacagaaaattaataaggatattcaggacttgaactcagctctggatgaagcagacctgttaga

SEQ ID NO: 546593 - DNA, 1179 bp, Homo sapiens
  misc_feature (422)..(422): n is a, c, g, or t
  misc_feature (1152)..(1152): n is a, c, g, or t
ctagttctagatcgcgagcggccgccctttttttttttgtggccccccatgctgttgatggctaattgtaacagtctgatcgtgacgctgaataaatgtctttttttaaatgtgctgtgtaaagttagtctacttctataacccactctgggttaaatttcccccaacacgtgtagacggttaagaatcgccttcagggttgattcgccagggttcatattggcgaattttatatacacccttgcttgtgggtggaagaacgccatgtgtcttcgaaacacctgtggtgtagtgagacctgatagtacactggtggtaacacctggaaatttccaccatattaaaagggggtattcaccccagagcaaaaatatctatgggcatatgggtgttctatcaacagatgtctgtatctgtgttgngcgcacactataccttaattgccaattctattatcgtcacatctgcgggattcaatggctgtccccgagtatacaatattctatatacgatggggcgacaagtgcaaagccgttttggtgtattactccccatttatctccagttgtgttgctcaatctccaaattacacgccgcgaaatgaagacattctccctctatgtgcaacaacaaacaacatcaacaacacaacgagggggggggcgacgccgcgtcacatcgataaaaaaagtataacacccactcaagaaagggggcgccccacaaaggtattatacacagcgcgatctaacccccgaaagtacatatctaagcgttgtggaccccacaaaacgagggtgggcgcccccccataaactaataagcgagacaagcccaacgaatacataacaacacaagaccgctcaaacgaagcaccacaatgtgacgccacccgctgcgaagttctaaatacaaacacgagagggtacaactgggatgaacacgtgtgggtacaacaacaacacacgagacgcaacactaccgatcggggagaacaaccatcgtgtggtgggacagaaaacgaagagaaccacccaagaaacacctacaccgttcgaggtatgaagtgagtgtaaacacacaacaaacaggcggaacaacaacacagcaaccgccaacagacagcagagagaaagattcaaaccgacagcngtgtcagcaggcgggcagaccacctaa

SEQ ID NO: 546594 - DNA, 103 bp, Homo sapiens
agagatgaggccaaaaagaaggtagagcagccagtcatcgaggagcagctctgaaaaggaagtataagcgttgaggaagtatatgcgttgacgaggtatccag

SEQ ID NO: 546595 - DNA, 113 bp, Homo sapiens
gccgagtagttacacactgaggggtctaaaatcctgtatcctattctatttagatcagtttttttttatgatttaattaaaaaaaaagaaaagttatctacccagccattctg

SEQ ID NO: 546596 - DNA, 371 bp, Homo sapiens
aggttttccaggcttcctgtgctgtcttggggacctgctcagaggctggaccgcgtcatgctcagaaggccctgttttctttagacgctgactcctgctgtctaccagatcctcgtggtacaatgactggtgtagactggcttgttgaagtcactctctggatctgagcaacgctggctgagccgtgatgaagtattcctatccatccactatgcttcacagtgggaatctctcactgttcatcaccgctgccctagcaccgcaggttcaagagctgctgggatatagcagttaagagatgaaccctgcagcctgacttcctttgctagaatcctggcactgttacttattccttgtatgtctctagggat

SEQ ID NO: 546597 - DNA, 462 bp, Homo sapiens
atcgggcgatcaatgtagatgtaggcgtagagactgctcgcgcactacactaagatgcccgcaatcgagcgggcaacataagccataaataccagtcagatttgaaggttctcacaggactgtcctaaggacgttaaataggagaacggctacaaaacagttagcaccagtttgcagtacttagaaatctatcagagtacagctagtacccttccgtactgagtcctctggtattacataaaaatcagatgagaaatcaatagcaaacataattcctcatcagatttcagataaaaacccaactccattccctgggttctctaaatcatgcacatctgtcctccacctgcttctgaagctccaacctcctccctcaccatattgcagccatagtagcctttctcatccaaattatgccaactttctatctcctcatgagatatttgcacctgccgtacccag

SEQ ID NO: 546598 - DNA, 410 bp, Homo sapiens
  misc_feature (399)..(399): n is a, c, g, or t
aggagtggagaagagaatctctgtggttgtttgtctatgagcacatgtcaccaattatgattttctgcaactattttcctaagaaaacggatccttacgaatggcagagacttttccagggagcaattcttttcaacatcttctgtcattcacagcctccagatttgttttgccactacaagaatccagttctcatttctccccaattatctccagggcttgtggccgttcctgccccatgttagaaaagcaaacccagggacagagccctccccccggcttacaaggcagttagtgctggatttgctgtatttgttcaatatttaagggttgttccagtttcacactcattcccctggcaccattcttttcccttctggattctggcccacacaggantaggaccagtg

SEQ ID NO: 546599 - DNA, 621 bp, Homo sapiens
  misc_feature (107)..(107): n is a, c, g, or t
  misc_feature (116)..(116): n is a, c, g, or t
  misc_feature (121)..(121): n is a, c, g, or t
gggagaactgctcgaggccaggagttcgagaccagcctggtcaacatagcgagacaccccccccatctcaaaaataaataaatcaaaataaaacaactaaaggaggnaggccgggnaaaanaaaacaaacaaaaaacacaaaacacaccaccaaacacaaaaacaacacaaaacaaaaaaaacaaacaacaaaatgtggcggcggcgcggccgcggcgccccccgagagaaagttttaggaacaccctccgcggtgtggcgggcgcggggcgccccacggtaataagggcacacaggtgcgcgacagcgcggtgttcccacgagaaaagcaaccacggcggcgtacaacgaagagcaggctggtcggggggctgtctctctaccccgctaaataaaaaagacagcgccccggcggggggacaaccaagccagcagcggcttttagagaaggacgaaacacacaccaggaaagagaggagtccgcttgggcaggcgacaccaacctcaacgggggggagccaacactcaaccagagagcgagggccactaccaagacgagaccgcggcacgtgaagtaaacaatagattagacgcgccgcgcccgcccgtgcgtgggcgaga

SEQ ID NO: 546600 - DNA, 815 bp, Homo sapiens
  misc_feature (37)..(37): n is a, c, g, or t
  misc_feature (62)..(62): n is a, c, g, or t
  misc_feature (497)..(498): n is a, c, g, or t
  misc_feature (672)..(672): n is a, c, g, or t
  misc_feature (703)..(703): n is a, c, g, or t
  misc_feature (709)..(710): n is a, c, g, or t
  misc_feature (726)..(726): n is a, c, g, or t
gtgaactgtttgtaactagcgcgcattgtgttggtanacgggatattcggccattatggccnggggacaatgttttttattcatggggtgcggtcgtagatgaacactactgcgttccaacggaccctgaccataaaactctacccatcatattgctggagctcgcatgcgaactttcgaataggatggactttcaagacttggggaacaaagtagaactgacaccaacccttttttccaccaggtgagagggttgagcaaaacaacctctccatttacaatacaatgcttttaaaggtggactcatttccacacaaattttaggaaacgatgcacatgaaactgccagtgtacatcactaaacgtacccttttccatgccgatccaatttggcctggataaggaaaacaaattctgacccttggaaagcttttagatgtacaatgattacaacatttatgtttaacacagtcgataattggctaaaaaactgtagnnggaaaacctctttgaaaaccttaatgggtgcctgaacaaatgaggaaggtagggccccttttctgacccatacccccttttttaaaaaaggggaataccaaaaaagggttgttaaaccgccaatagtacaaacctgcggtgcctgaaaacgttttcggcttaattccccccttnaacataaaaaaggcccccaaatccttcctgncaaaannttctaattaaaaaacnccccaaaaaaaaaccttttaatacggggaccccctttaaatgttcgttgaacaacttttacaaaaaaacttcccctcccctcccccttt

SEQ ID NO: 546601 - DNA, 502 bp, Homo sapiens
  misc_feature (53)..(54): n is a, c, g, or t
  misc_feature (64)..(64): n is a, c, g, or t
  misc_feature (66)..(66): n is a, c, g, or t
  misc_feature (69)..(69): n is a, c, g, or t
  misc_feature (71)..(71): n is a, c, g, or t
  misc_feature (73)..(73): n is a, c, g, or t
  misc_feature (82)..(82): n is a, c, g, or t
  misc_feature (84)..(85): n is a, c, g, or t
  misc_feature (87)..(87): n is a, c, g, or t
  misc_feature (98)..(98): n is a, c, g, or t
  misc_feature (118)..(118): n is a, c, g, or t
  misc_feature (135)..(135): n is a, c, g, or t
  misc_feature (147)..(148): n is a, c, g, or t
  misc_feature (416)..(416): n is a, c, g, or t
  misc_feature (431)..(431): n is a, c, g, or t
  misc_feature (433)..(433): n is a, c, g, or t
  misc_feature (435)..(435): n is a, c, g, or t
  misc_feature (440)..(440): n is a, c, g, or t
  misc_feature (444)..(444): n is a, c, g, or t
  misc_feature (455)..(455): n is a, c, g, or t
  misc_feature (460)..(460): n is a, c, g, or t
  misc_feature (466)..(466): n is a, c, g, or t
  misc_feature (469)..(469): n is a, c, g, or t
  misc_feature (499)..(499): n is a, c, g, or t
ctgctgacttatttgtagaagttgcatatctttagatttattgtaaaaactannggcatatgantngtntntntcatgtagncnnanagtaatctttnccttaatggatatccaattnttaaatggttcatattnttagctaaattnncaggagtgaaaagaaaaagaggaaggaagaaacccctctcaggcaatcatgtacagccacccgaaacaatgaaatgtaatacattcataagacaagtgaaagaagagcatggcagacacacagatgcaactgtgaaagttcctattacttaagaaatgcaaggaagcaggacttcttaattacttacttgaagaaatattagacaaagttcattcaattccagaaaaactcatggatgagactacttcagaatcagactatgaagaantcgggagtgcacttntngnctgtngatngttcgaagacncattngtaaanttncaagcagcaatagagaaaaaaattcatgcntct

SEQ ID NO: 546602 - DNA, 818 bp, Homo sapiens
ccgacaaagaggggccccctctaggaatttcgccgccaccgcgctcgcgcgcgaagcttgcaaagaagatctctcccgcggtattggggcggcgcgacacaccccccccgggtgggcgcaagaccccgcccaccccctcgtctctcgggcacgcacggacacagcaagccctatatagagcgccgctctccctccccgcggtgcccccaaacgcggagatctgtatcgctatcaagcatcgcgcgcgcgtggagatctgccccagaaatacatcgggggcgctcccacgcgcgggaacacgcaagttttggttccccccgctagagtgacacattaacacggcggcacacactatcgctcatttctttcaggagtggtcctccacacaatctcgacgcctaactcacagggtgtttttactccaaagacactcctctgacaggctttctgcggagactcacggagagacactattcccccccactgtgagtgggtcaccgccctctctgtaattacaacagagtgttctgtttgtgtgtggtcgcgcacggcagagtcccaacgtgtcctgacacacggatcttgaacgctctcaatactccgtagtttatactccacccctcctgtttttctctaattaagtccttcctaaatttccccacccccgtgaccactcacaagccatcccaaataagaatcatatcgccctcctttcctcctcaagccagcccctctccctccttcaacaaggacatctcctctcctacatcttggttttaaaccccaccaccccaccccaaacccgggctttcaccaca

SEQ ID NO: 546603 - DNA, 526 bp, Homo sapiens
  misc_feature (3)..(3): n is a, c, g, or t
  misc_feature (21)..(21): n is a, c, g, or t
tcnaccccctcctccgaatancccaataactgccataaacaaaaactgcattcaaaatttgagaatttaaaatagtcttgtttacaatcttgtgtgcccagaatttgggaaggactcagctgggcagctcatttctgcttctcatggaatgagctggtgtagctctacaggtctggagaattcacttcccaaggtggctcacttccacggtgcaggctgctgggtagggagccctgctggggctatcgtctggggcgttggttccttttcacgttggcctctcctatggcagccaggtgtctagagcaagtgttccaagcagacaggccagaaaccgtgtgtcctttttgacctatgatctataatatcagaagtctcaaaatatcacttgtactgcattctgttgttcaagcaaggcttacaaaactcagccaacactcagggagaggggaactaaactgtacttctcaatggcagatgcagcaaagactttgcagacatctttaatctatcacaaccgcaaaac

SEQ ID NO: 546604 - DNA, 103 bp, Homo sapiens
ccgaggtaggcagcagcagaacgctgaacgcaggggatacttcctattctacagcctagtaggctccttcccctactcatcgcactaatttacactcacaaca

SEQ ID NO: 546605 - DNA, 255 bp, Homo sapiens
  misc_feature (7)..(7): n is a, c, g, or t
  misc_feature (12)..(12): n is a, c, g, or t
  misc_feature (211)..(211): n is a, c, g, or t
gcaggtnctatnctcattggcaacatggcaaacagatcacaggagtcaaagggccttgctcaaggtcccagcttcagcccaggcctaagcagcgtcagaacagtcaatctgcatttttcatcagtcattctatagtgacatcatcccagactgccttctgtaatccctgtgtacagtctccctctgttctaaggttagaagtcagaggtgntgtgttctcaattccacagccaatgggggaagaggtaagctagg

SEQ ID NO: 546606 - DNA, 120 bp, Homo sapiens
cgctcctttcaaagcggagatctgcggaaggagaaacgctgacccgggtgatggaggttgtagtgagccaagactgcgccattgcaccccagcctgggcaacaagagtgaaactccatct

SEQ ID NO: 546607 - DNA, 124 bp, Homo sapiens
atagctgccagcttgagcgaatacggctcgcagggctgcgatagctgacccttgccatgaccgacctggagatcagatcgaagcctgaagaagacgtggctacctgaagaagaaccatgaggag

SEQ ID NO: 546608 - DNA, 860 bp, Homo sapiens
cagaggaaggaggagtgcagaggttcccaggaagaggccgggggcttgcagtgtacccccagacagtgtccctgtgaacgctctcatcaaaggttctgttccgttgcgcaaagaccaattttcttttcaaacatagcttgtgatggaaaccccgatttcggtgagcccctctgtgcaggctccgagactcgaccccaccatgccgagggctgacaggctctgccggtgtccatggactatgtgacacaaggcacacggctggacatataagaggtatcctgtctttatgtattaatagaaagaaatggtgtaggggagtgctagaaaaccaattttaggtcgctcctacaatgattcaccactgtgcaactttactagtagcaccaatatttgtcattcttaagaagaattaaatcaaaaggacctgtagaagtctaacgtgaaggctagggactcctgcgcgtgtcttcccttcaggcagcctgtctgtgcctccttctccggcagatgctgctgggttgggaagtcggctcctggcagccgtggcttctgtagagcgagcaccagctggacgttgtccatgaatatgtcacgagttctgggtgtttcctggtctgtagtcgcggaggtccctgccatcggtcagccgatctcacggatggcaacgaggagacaaattctgaggtagcctccctaggtagcctatgggcttttcctccgccctcttctgtaagcatgatggacaagtgccctggggatgttccggggccacgccaggtggcggggggccatgcttcacgaagcagttgcctgccggtttgcattccccactggggctgcttcttctccttggggttgtg

SEQ ID NO: 546609 - DNA, 924 bp, Homo sapiens
  misc_feature (40)..(40): n is a, c, g, or t
cacggcatggggctacggccaggacgacggcccctcgcantggcacaaggctgtatcccatggcccaggcagatcgccaatcacccatcaagtatcatctccagccaggctgtgtactctcccagcctgcaagccactggagctttcgcgtagtgaggccttgcagtgtcctctcagctatcaccaactaagtggcgcacttcatgatccatggtagaccttcgattgacagcgatgaccgaaccgtggtgactgggggcccccctgggaagggccactatcagtcctcaacgcaagttgtcatttccagctggggacaagcaagcacgatgtgggttctgtagcagcagcggctggacggcaagtccttccccagcgagctgcatctggtgtcactgggaagtgccaagaagtacagcactatgggggaggcggcctcaggcagctgatggcctggctggggttggtgtaggattggcacgacaggagacgatgcagcctagtcagtgaatcgtctgactagatgcgcgtctacatggtccggttcaagggcaccaaagccccagttcaggctgcttcaaccccaagtgcctcctgcctgccagccggacactgactggatcctaccgcgggctctctgacgagtcccccactcagtgagagtgtcacctggattgtgctccgggagcccatctggatctctgaaagtgcagatgggggaccgtgccggagcctgctttttacctcggaggacgatgatcaggatccacattggtgaacaagttccggtcaccacagccactgaagggccgcgttggtaaaggcctccttccgggcctgagctgccatctggctagccggcactaggcaccatcttctcaagggcttcaatgtcagcagaaacaaaccatctgagggttctcc

SEQ ID NO: 546610 - DNA, 271 bp, Homo sapiens
acaaggtatgttacctaattagtctttacgtatacctcccattcttaatggctaatttgtcaagcccagggaatctttcctttactttgacttcccgagtttgttcattcataccattgacacattaaacttattctggcattcttgaaatcttccttcgaatttcccatcacaaaacccgaacgttattcttgccactggtcattattcctccaagcatacccgatacccatccatccaaaaggcatttgtatgcattaagtttcgtgcc

SEQ ID NO: 546611 - DNA, 135 bp, Homo sapiens
gggctgactgcgaccgtaaggtagcgtactgtctccctcttactactcgctcaactggaggtgtattcctttgtgtggaatgctgtctcccacatacccacaggactctcttcctccctccacgtctttctcaga

SEQ ID NO: 546612 - DNA, 974 bp, Homo sapiens
gcctgagctgagtgccggtgcagctgctggaccctgctgcagtgagtgagtgctggcgtgggacacctggctgagatccccagcagtgtgcccctgtggctccctgtgaagtgtctccagccacctgcccttcccgagaagagagagctctgggccttcttcctgccagtctggtcttcgatgtgcgttcaggacagatagaccttggcacaggctgacccgagattcctgcgacgctgatctgttccatgccttctgtggagcatggaacccacagagcttccaggacggatcatagacaccgagccatccaggagggcgcccatgtgcgggtcactgcgacggtccctctcagctaccccatgccagccagacctctgaggccggatccgtgtaccggaaatgccctcgggcaaactggatgaggccatcccagagcgggatccataagtgtgccacgcgcaccaagcctcacacctgaagcacccccagtagcccttccgcattgtcacggcttgccaaggcaagaatgtccactggctgtagcccacagatccacagtgcaacagacccgggatgcgagaaacaccgggggcggaccaaccaaccaacccacccacgcagaacacacaccgataacccgccccggcaccccacagcacaagccagaagcagccccccccgaccagcccacccacacccgaaatgcccagccaaggatgaagaaacacactgcacagacagagacggaaaaaaggcaccggcaacgcgcccaggagccaacacatgaggcacagaaagaaaacaacgaagcaaagggaagaacaaacgaaaacaaaaaaaaaaacaaaaaaagaacacgacgaagcccacaaccaaccggataaaataagaaagaaaaacaacacaaaaaaaaaacaaacaaaagacagaacacaaacaaacaaaacgcactaaaaaaaaccacagaaagc

SEQ ID NO: 546613 - DNA, 128 bp, Homo sapiens
acatcaggcatgtttccattgtgtctgtcatgccatcgcgggtcatcctgcagtcaacgtcgcgggccattccggcatcaggccgcagcaacagtgtatgtgggcacaggcacagttcagcatttcac

SEQ ID NO: 546614 - DNA, 931 bp, Homo sapiens
atgatcacgggtcgcgaacaggaaggcatctccagcagggtgtcggtgcctgcaaagcctgaatggaggaacttctcttcccaccgttctaaacaagtctaaagctaagaaatcctggagtggtagaaggcgtatatctgcaatgctcaaggatagtccgtagacaaaaacaccacatttaactacatctacagtataccactagaaacatgaactacttatcctagatagtcgtacccgagtaacttcgtaacgttctctaagaagtaaaagcctagccagaagatgactccagggaacataagtagagaccccctagaaatacgttcacccacccattaaaaaggaagaggaagacaaataaagggagatatctgtcgaaaaagatatcataggattgataacctcttaaagtgaatgtcatcagctcttgtaagtacagcattgttatgcatgtattgcttagtaactacttggtccaattgggcattcaccgatgtaaaatgatttacatggtagttgaaagacaaagatgcactgaattatgccccaggaaagtagcactggagaaagaagtacccatgaggtacaccgtttctgtaaccaacatcttcatgaaaaaacaatatatcggtataaaacgaaggatcagggacctagcgagcagtatgccccaggcatgtacctccaagacgctcatggcgcatcaagatgttccttccaagtccatcaagcagtccattaagtaggcaggaggttgtgtacaacagtggtggtgccaattggctcctcaagtccttgtctacagaattgtggaaacggacttaaattctggacactttacactttctacaagacaaggaaacgctatgcatggatcctgatgaacccagtcattatcacttagtttgtaaagaaataaggcaagcaa

SEQ ID NO: 546615 - DNA, 83 bp, Homo sapiens
ttttgtatgtgtataataatttgagatgtttttaattattttgaatgctggaataaagcatgtggaaatgacccaaaaaaaaa

SEQ ID NO: 546616 - DNA, 1286 bp, Homo sapiens
  misc_feature (292)..(292): n is a, c, g, or t
  misc_feature (1002)..(1002): n is a, c, g, or t
agcgggctggtgaaactgcacagctgggcgccgccgccgatcttgtgattgcgctggatcacacatccgactgcgcgcatgcgtaacatccttatcggggtgcatataggctgaaggagaatggggtgcttccgaatgtgacaagctctggactcagtctacggggacttgcgcactctcgctctctcacacgagatcgagtctgctgtgtcgttgttacaagattgctgtttaccagtaaagcacattgtaaaatggacctagtatttggatcgagtagttagccttgagnctcttagtcgttcgagaacagctggatgaagggaactaggcggacagtgagacaagagcatggagagtggaaggaaggacttctcaactcctaaagatgaatcctgtagaatggcaaggcagttaataaggagtctgggtaatgagttgaataatacgaaccgacgaggcgacgggttaatagaaaccatggatgggtcgaaccatgactggcgtatcacgttggcgcgtcagcatcactcgtacactttccgaagccacgttctcacgtgataggccacaaggcctgggcatgttgcaagtgcgctgcgagtcttcattaggctctactgggatatagccctttcgtggctcgtacgcgcgagcgcgtgttcgaaagctcgaatcgtctacactgaccctgtctagagcgttgccacacgtgaggttagggccttcgtgtaagctaaacaggaaagctggggcgttccacacatagcgtggcttgagaagcatttttgtggggtatagcgccaaaacctttaaaggttggttgcaaacacaaaggagagggataagtgggacattaataacaggacataaattgtgtgggttgatcacttagtagcatgcgaacttggggaaggataacttagctttccccggaacgagtaagagactagaaggaaaggggaaggaattccacaagttccagtttttgtggctaaaacncaagtgccacttcgcaacacgttggcggagactcatttggggaaacgggggttccattgttaaacccgttttcaaaggcgttacaggcagcacattgaaaatgccccccacagggccacccacacgcacaagggaagccaaacgtgtgcgaggcgcacccaattgtgttttcttacaacgcttctgaaactttttggtgacacgtgacaccatttgatacagaacagtgtttccgcgaccccaattcggacttttcgcgcgccctccatgtcgcgaattattac

SEQ ID NO: 546617 - DNA, 446 bp, Homo sapiens
aatgtttgataagaccatgtctgaaaattttaaaatatctctaaccaggatacaatttctgctgtttcctgaatgacatgatattcagcaataacatggttcagagagaaggaaggaagtgtgggtagttaaggtgatctaaaagttttaagaaaacctagaaatttatatttgtgatttggaaattatggcatgcaaacgcctgctcctatgacatgtaattctcctgttcttgcttcaatattctttcttccctgcttcacctaaagaccgaagcatcatctgttacgttgactctcctccttctagtctgtggccacgacaccacaagcacaatctaacatatcgtccattccagccccacgtctcccccactacttctatgactcttccacgacaactaaccacctcgtctttcgttttctccaacatcacagcaacaaaac

SEQ ID NO: 546618 - DNA, 424 bp, Homo sapiens
  misc_feature (273)..(273): n is a, c, g, or t
  misc_feature (275)..(275): n is a, c, g, or t
  misc_feature (339)..(340): n is a, c, g, or t
  misc_feature (412)..(412): n is a, c, g, or t
ttctgaagctggtgcctataattagatctcatgagtttgggtcaagacaggacttagtgtgaagaatttgatcatattcgttgaagactaggtcacgaaacacttgggtcaagacgttgttctcaagcgacagggcagtcgtctacttagagatacatgagcacagggtctgcgagatccccattcaatgaatctgttgtatttgcacacacacaaaggctgtttccaggtatccaatccattgccaatcacaacagtttgcaccaaggcgtnancaagtttgtcagttgccaaattgctggccagcatgcagccttgctaacttgcttaccaaagctnngccactgaaagcgagggacgaggtcccttacagaccactcactcgaaaatgccacgagtcgatgcttcgatncctgcctccaga

SEQ ID NO: 546619 - DNA, 591 bp, Homo sapiens
ctactctgggcattataccctgagatcgcctggaaacaggtagttggggcaagattcaggttctattctggtactactacattattggccaaatacatccttaaccatattgatctcatcctttaataggtcccctcttcccagttctcaaacatgtgaccctgaacaaatgaggtacttgacctaagtgtcaatttcttcatctggcaaaatgggaccagtaatgcagtcttcatacacttgatgtgaaggttaaatgacttaatatatgcaaaatagtgagcacagtgcctggctattatagcaggtgctcagtaaatggttgctattatttttatagctaagcagtatagtgtagtggctaagagcatggctttcggagttaaacggctctctctggccttggatccagactctgagcttagcacctgtttgaccaagggaaattagctctctaagcttcaatttcctcaataataataataataaaggaatagtaatagtacctctcttagggttgctgagaagattaaatgagattctatatgtcaagtacttaacacagaaacacagagtttgcacagaatcgtg

SEQ ID NO: 546620 - DNA, 356 bp, Homo sapiens
tcctggtatttcgccaattggcaaaagggggatttttttcaaggcgatttaatttgggaaccccagggtttttccaattccggcttttttaaaaggcggccattttattgttattcgcctcctttttgggggaatttggttccgggcccccccccaagtttttttttttttttttttttttttttttttttgttgtttttggtttttttttttttttttttttttttttttttttttttttttttttttttttttttttttttttaggctatttatttatttatagaagatggtatttctctcgtgtcgcacagtctagagtgctatggtattatcgtggttctctctcgtgccgt

SEQ ID NO: 546621 - DNA, 383 bp, Homo sapiens
  misc_feature (1)..(1): n is a, c, g, or t
nctggtctaatatcaggcaatcttaatcagtctcaaaatgtcgtgctcctactggtatgccacaagcactagtgatgcagttccaacagctggatcatctcactcttggttagcatgtgcactgcacagcgtcagttactgttcacctctcgaagtgatccaccattatgtgtcactgttcgaacagcctagtatccagtgcatatcctaatctcctcagtcccccggttctatcagacccacatgtcattagttccgccatgataggctccttatgaatcctaataccccctaatggttgactctctgtgtacattcgccctttcagagtcctggctccctgattttctgaaaacatatttcagctcatgacttgacgttct

SEQ ID NO: 546622 - DNA, 225 bp, Homo sapiens
agaggatccccggtatgacgagcagcacgctctcttaataggtggctgctttcaggcctactatgggtgttaaatcttttactctctctacaaggtttttctcctagatgtccaacagcgctgttcctcttaggactaacagcttaaatttacaaggaggatttacgagggttctagtgggcaaactttaacagttgaactacagattctatctatggacaacca

SEQ ID NO: 546623 - DNA, 387 bp, Homo sapiens
cctcgttgtgagcatgtctgtatcttcactgtatcattgtcaatatccggttatgagactacatggtagttttgcaagatgttgccattgggggaggctgggtgaagggtacacaagatccctctgtatcattacttacaattgtgttgagtttgcaatgatctcaaaatagaaagcataatttaaaaacaaagtacaaacaaaactgcaggtttttttaggtgtttttgtttttgtttttgctttgcttttgagacagagcctccctcggtcacccaggctagagtgcagtggtgcgatcttggctcactgcaacctctgcctcctgggttcaagcgattcttatacctcagcctccagagtagctgggattacaggtgcccacca

SEQ ID NO: 546624 - DNA, 137 bp, Homo sapiens
atcactcgattaacaagagtgttttattgtacttttagtacgcaccaatctcaaggagccttggaggcttgtgaaaaagacgtccacaaagatgctgcatttctagatgtggggtgaattttgttagcgcgtgctgt

SEQ ID NO: 546625 - DNA, 706 bp, Homo sapiens
gatcctgactagaccctatcgctctctgagttatagcgagattcctctcagatatgtgagtacagggctatacgacaacgctatcggactcgcgcgcataacagagacgagaagcggagtagctagacattctcagatacattctaggcgcagagtcatcatcccttattgatagtattaaccatagcatgagctggtgaataatctaatgtaagtgactcgaattgtaggacgacatccttatgacgagggcctgactggatataccgaagtatggtacacacccgtacatacgtacgctgctcatatcagtcggtagaaagtctgtgtcatactggatgtcctcaacaggatagcccgcatgtatacagacattccacgcatatgttgatagagttaacccccttgtgtgaaggatcgcattagcaataagtgggaggaacaacacattgctactcaggtacagatgcctatgtgggaggagagacatacaacaccactgtgcattcgtaatggaaggaagcctaggaacgaaagaagtgagtcgcacacacacactaatgaagagtacaggaagggtcggacccaaagacgattgaaacagtggggcacatgtacgtcgaacacaaggtggattacaaaccgatcatctaagcaattgccaacgataaatgcataatacaagaaaaactacaatcacaatttc

SEQ ID NO: 546626 - DNA, 148 bp, Homo sapiens
tacaaggcccgcgggagactggtcttcactctcaatgtagcctcctctggaacctcatcctgtcacctgctgcagcgtctctgggtgggcctgctggctggctgtgcctgggcagtgtggcctgctgcatggactgtgctctgctgag

SEQ ID NO: 546627 - DNA, 137 bp, Homo sapiens
ggtactctagaggatctctggtgtctgggggcggcccgtggctaggaccaatcagagaggagagcctttcccaggccaagatgggccccggagttctgtcctctgggcaagggattcagaaatgacccctctgggtg

SEQ ID NO: 546628 - DNA, 777 bp, Homo sapiens
ccagcgctgggcaacatagtcgagacctcatctccaaaaaagaaaacaaaaagacaaaaaaaggaaaagaaaaaaaaaaaaaaaaaatgaaagaaaaatttggaagccgacgccgacgcctcaaagaaaagtcagtaaacaataaacttcagcgtggaggagcgccgcgggcccattagagaggtaaggatacagctggggactgagactactttccgctgaggaagaaccctggagacaaaaatacaggagtgggagtactctgcagcatcatagaagaaacaccgcggcgtgctaacacagggggcgtatggaaataatcagcagaagaggtactgacagagcacaaagatgggggtctactataatagaacgctcactaacagcgaagtgcaacagcttcacaaatatgcacacccacggttggcccgggtggcatatactggtgggcctgaaaataattttgagaaaaaacaggttacctttgtttattcaagacttttcactaactatctaatgcctgacgtattttcaccaggtatctttcccaatgttacttcagcttttttcgtattttcaaataaaggtcagaccttttatacttttgaccaaatagttatttcctatgttggacacttagtttattgccaaagcctccgattgtgatgcaggttgtaagtccttgtaaacaatatatacagactatacaagaatcaattttatggggcctttcaaaaccatatttgcattccaaaaaccaaatcttaatgcagaaca

SEQ ID NO: 546629 - DNA, 242 bp, Homo sapiens
aacgtctgctgtcaccctcagcgtaacagttttaatcctgagtcagccaaaaaaaaaaaaacccagacaaaacaaaaaaaacaaataaagccatgccaatctcatctggttttctgcgccaatttaggtttggtcaaaaagggttgtaccgcacctaattcatattccgcctaaaacctttggcggtgaacaatggaggggccgaactcgtcatactcctgcttgctgacccacattttgtg

SEQ ID NO: 546630 - DNA, 138 bp, Homo sapiens
  misc_feature (60)..(60): n is a, c, g, or t
acgcgagaagattaattaggaacaagcttagcaggagatgagtgcagagaagtgacaggnaagctacaggttacaacagatttgtgaactcagccaagcacatgtggtggcagggcatagctgctactcgtgtgatgg

SEQ ID NO: 546631 - DNA, 328 bp, Homo sapiens
  misc_feature (12)..(12): n is a, c, g, or t
  misc_feature (17)..(17): n is a, c, g, or t
  misc_feature (49)..(49): n is a, c, g, or t
  misc_feature (202)..(202): n is a, c, g, or t
catatattcacncaaancctgtatatgaatgctaataaaagtcaattgnccaggtgtggtggctcatgcctgtaatcccagcactttgggaggctgaggcagtggatcacctgaggtcaggagtttgagaccagcctggccaacgtggtgaaaactcgtctctactaaaaatacagcaattagctgggtgtaatagtagccncctgtaatcccagctactggggaggctgaagcagaagaacctcttgaacccgggaggcagaggttgcagtgagctgagatcgtaccactgcactccagcctgggcgatagagtgagactctgtctc

SEQ ID NO: 546632 - DNA, 431 bp, Homo sapiens
cctgtatgcttgtggacgatctctagcaggatcccccgttactggcatttccattccttatacgtttagaatcagaatacaagttgtatttcaaagtatctcagccatgtcacactcatcccttgtttactaaactcgcatttggaaaccactaaagtaggtaagttccatgccatgttaactatttgaattgccttgcgtttatcacttattttgaaatctattgggttgatttctccctatatttatttttgtacatttgagccatgtcacacatactgattatgacaggtcagccgtattctatttggttagaagggttacatggtgtacatattagtgcagtttagctatagcagtgtttgctccagcttcatattggctaggtagggtcacctatggaagcacttgctcataatctgtgacctgtc

SEQ ID NO: 546633 - DNA, 406 bp, Homo sapiens
ttgataaccaggtctcggctcctcgatctgctcagtcctatacggcgcacgtggcagggctggaggtgtgcgctcgccgtcgccgccgtgcgctgagctgcagcaattccaccaggtcgctgttgtctccccttggccacagagctttcagtttgacgaggacgacggtgacggggaggatgaggaagacgtggatgatgaggaagacgtggattaagatgcccatgattcagaggccaaagtggcgagcctgagaggaatggagttacaggggtgcgccagcactcaggttgaatcagaaattaccaagaagtacagaaacaggtgcgcttaccagaaaggcggctgacaccatgtgaggtgtggtttattggcaaagaaaaagaagaacgtgaccggctgcaac

SEQ ID NO: 546634 - DNA, 225 bp, Homo sapiens
tgataaacagtgcacagaaggattgtctgagaacagtgcctatcgctggaccgttgtgaacacagaggagggaaggcaagctctggagccgctccctcgggtcatccaggagtctctgaacgactcttcccctgggggatccagcaggacgttgttaatgatggaacctgaatgattctacagaggcaaaacagtggcatttcttctgagctaaggagacataag

SEQ ID NO: 546635 - DNA, 642 bp, Homo sapiens
  misc_feature (257)..(257): n is a, c, g, or t
gcgttaacctgcggggatcaaccgatccagttccggcagcagcgaatatttgccgccagcccatttaaggaacgggcgttgccagctgcgcagcgccggttcttctatgggcatcgccgcagctccactgcaaacagatccgtatctcatgctgcctcctgcctttcccgatattcctcagcgagccgctgcgcctttaatggattgctgaccacttcaccccatggtattagccagcagttaccaatgaaggggangcacagtgtgcctacgctgatgtcgtcgtgagcgtgagtcataggatggactccatttcgtcgatatagaggccctgagcaatcaggcggcgacggcgtgctgcacgttcaatgcactcctgccgcctgccttcctgcgactgctctatggcgcgccgggtgaacagccgagatttaccctgcggcgtaatgacctttggcttcgtaaccaggtcgaatgtccggtcgcagatgccgtcctcgttgatccatttttccgactcaacgatctgcgctatctgtccggtgccgcgggtgatgccgttggcgacccggttaaactcaatgagcgatacgccaaacttctcggcgatttcgctgccagtgaccgggcggccgcaagctt

SEQ ID NO: 546636 - DNA, 131 bp, Homo sapiens
aaaaaaaaaaatatagctggtccggaattctatacattgacctcttgtttggttataacacatagcagtacaacgacgtgtcacacaatgacgctggtttgcatgggaaactagatgggacgaagactgcg

SEQ ID NO: 546637 - DNA, 170 bp, Homo sapiens
gaagcaggatggtctaccttctgctgacctgcaaaggatgaatacacatcatttgacaagcctatatgaaagttattcgttggacgtgcgcttgttcatgttattgcagctaagataaaaagttcaagtaccagcaaataaaataaaaataaaaaatgcgtcgtatcgat

SEQ ID NO: 546638 - DNA, 377 bp, Homo sapiens
ttttccccatgccgctctcatgacagtgagtgatttctcacgagatctgatggtttcataagtgtttgatagttcctcctgcatatattctccttcctgctgccttgtgaagaaagtgccttgcttcccctttgccttactgaggcctccccagccatactgaactgtgagtcaattaaacccttttcctttgtaaattacccagtcatgggcagttctttacagctgtgtgaaaatgaactaatacatgtgagaaagcatggattactctatcctcactcaggagaaaatgttagagattgtgaggtggtttctaatagtttgcacgtcgtgtgtccactagctccccttttcatgcacacactactccctccccc

SEQ ID NO: 546639 - DNA, 379 bp, Homo sapiens
attaagttctctagttatagctagtaacattgcaagcagagccataacattgtacagagtgtagcatttgtgattaaccctagcctgtaaaatccagaaaccttcaaccattacttctgtgaatactttagccctgggataagggtattttctgttccggtgtagtgtctgtagccggacatggacacaccatatctagctgctggcccaagggaacgtacattaataatactatccaaataaagtattatgtgctagtacagtgtatagtcaaagcacttctctttttcattactaaaaagtctggcataagatttgcattattaattacctctctatgaactataatactccttattccttactacaacaggtatag

SEQ ID NO: 546640 - DNA, 201 bp, Homo sapiens
gcatagtaaccaatgcgcgcgttctcagaccattttacggtgccgctgtccggttgcagatcgcccaccagcgttttcagcagcgttgatttaccgacgccgttggtacccagtaccgccagtttttcacccacttccagcagcaggttgagatttttaaacagcggaccgttatcaaaccctttggtcagaccttccact

SEQ ID NO: 546641 - DNA, 537 bp, Homo sapiens
cgacctagaggatccccgagatacgtaggtgtggggcatggagtaaacgttgagtagctaggaatagcgtccactagttacgtgataatactaaactatgtccaattaagaatggttatgtgatggttgtacggtaaaactgcgataattcatcctatgtggttaatggaggattatgctaagatcttgcgtacctgggtttggtttaatccagctcaactgcctgctatgatggatacgattgagagagtgaggagaaggcttacgcttagtgagggccgagatccggcatatgattcgagatgggggctagttgtcgccatgtgataagaagcaggccggatgtcagaggggtgcctagggtaacctctgggactcagaagtgaaagggggctattcctagtcctatggctatagccattatgattattaatgatgagtattgattggtagtattggttatggtgcattgtccggagagtataattgttgaagaggatagctatcagaaggattatggatgcggttgctagcgtg

SEQ ID NO: 546642 - DNA, 952 bp, Homo sapiens
  misc_feature (154)..(154): n is a, c, g, or t
  misc_feature (160)..(160): n is a, c, g, or t
  misc_feature (169)..(169): n is a, c, g, or t
  misc_feature (171)..(171): n is a, c, g, or t
  misc_feature (174)..(174): n is a, c, g, or t
  misc_feature (193)..(193): n is a, c, g, or t
  misc_feature (211)..(211): n is a, c, g, or t
gagtgcgagatccgctgctggtgaggagaggagcgtcaacagcagcaccatggtagctcaacagaagaaccttgaaggctatgtgggatttgccaatctcccaaatcaagtatacagaaaatcggtgaagagaggttttgaattcacgcttatngtagtnggtaatctngnttnggaaagtcgcattaatcanctcattattcctcacagnatttgtattctgccagagtatccaggtccttctcatagaattaagaaagactgtacaggtggaacaatccaaagttttcatcaaagaaggtggtgtccagttgctgctcacaagtagttgcataccccaggatttggagatgcagtggatcatagtaatggctggcagcctgttaatcagactaccttgatacgttaaactttgaggagctacctaagatgcagaaatcacgagtgagacatgacgtcagatgcctgataaaaagaggggcgagtgtagtgaataccttcattcggctccttcaggacatggccttagaccatgtggatattgagcttatgaagcgtctgcatgaagaacgtgattatcatcccacttatgccaaaagtagacacactcacaccaatgaggaatgcctacaggttatgacagcagatatgcaagcaagtcaagaacgtaaaggtagatgttcgaatttcagagaacgatgcgtagcacaactacgtgctaacagaataggaccggtacacctgcgggcaggcgaaaccatgcactgaagttccgggaccggcccagacgcaatcctggggtgcgcactggcagggcaacggagccacacaacagtgtgaaacagcgggaaggccatccacgaaacacaacactggtatgaggtaaagaggaacccgaaaaaaaggccgaacgcgcagactgctttcgtagcctctctcttctccttcctcg

SEQ ID NO: 546643 - DNA, 214 bp, Homo sapiens
agtggtgttggtggtgatgcaaaaacggttgtgttagatatgaattctaaatttctcttcaaagaatcaatatgtcagtatggtcaatctttgccttttacttttaaacttaacttcctcgtaaagcaacctttttccatcacctgctccaccctgactcatttcaatcacctgctccaccctgactcattccgatttccatcaccaccaacac

SEQ ID NO: 546644 - DNA, 361 bp, Homo sapiens
attgatatgcggatgagggtggtctatgatattgccccaccaccgaagtgttacaatatacttgtgagatcggacacacacacacaaataatgatcaatcaaaaattgtgaatgctaaggatcaagaagcaatttataccttgagggttgggggagggaggggtaggagagggatggagtgatcagagaaggctcaatgaaggaggtgacgctgaggaagttctccaagccttgagaggacttgggtaaggggagacggccttccaggttgggagagcagcttggaacattggcaagaaggtggccatgtgaaagggcattgttacagacaacagatggaccctcatcctgttattcaatg

SEQ ID NO: 546645 - DNA, 1012 bp, Homo sapiens
ggatctttgtgctgcggcgtcttcaatgagccagtggccatggtgcgagctcttcctcagatatcaacctcctgctggcccagcgctggggctggggtatgctgtcatattatgtcagcctggacagtctctcgctgaatgatgaatgtcgctagactcgtgtctgcacccgtggtgttaactagtcttcgttgcatacctacacgacgagtattggcttaccgatggggccctacaccctaagactggagaatcatgtagctaggcactatcagagtggttgctaggggctagcccttcctgtctgagagaaccccgaggcgggtatcctgtcccgctcctttgaccttggaccgccagattactgttccactggacagtgaactggtcgctaactcccagaggcgctcttcctgcatcgagccgttccaccatggaacctgtatgactgacacacctcggccctgctcctgctgttggccctctgaaggtggcacaggacaggggaacagtatctagtgcgcatgctgagggatcccgtccaaaaggaaggttccagcccagacccgttagagccaagcagatcgtgatctacccatcttcaactgcaacttcatgggcatctgcattcagccgatcccctccagtaaccagttctacgtctggtatttccacaacacgtgcccgtaactcctgtgggccatgcctgcaacgctggctcacagacctgctcaaggtagataggtgctgggggctcaatcgaagctctccctggacacacattaccctatccaaattctgcagttctggtggccttgaccattatgccaatgccgtcatcactgcttgacagcttctgggcttgaggaccgggagacttttaccaccaagaagagaccaaacacagccaagaaaagcgcactgaaagttcaacccattttccctaagggaacctgaatataaccctacaaggacctgggagttgagatggacatcttgcacttcaaagaag

SEQ ID NO: 546646 - DNA, 289 bp, Homo sapiens
cacgaggttaaagattatttcactgcaaaagcaaacacgtgccgatcatgggaccaggttcaggggatttgttgctaacggggactacaatggccacgtcgatctgggtgtctagtgttccaaggctgtgcccaccggcatccgtggggacatcatccttcctatgctctcatcaccgtgcgcagaggctactgggggacaactatcagaaactcccacactgtcccttgcacagtgacatgccgctgccgctctgtgctgttacccctcatcccaggacccaccggca

SEQ ID NO: 546647 - DNA, 943 bp, Homo sapiens
  misc_feature (484)..(484): n is a, c, g, or t
atcaaaggcaagggaaacctgtacagtggagacacaaagggtcactggcagatttcaaatgatccaagacatcctcaaactttttcatatctgttgggtctataatgatggtcaccccaaccacagcttcatttctgatattggacattgagatctgctggttggagatcttagtgcccaaggaagaatgcttgcaaaaggagatggaacagtgtttctgttgcattggccactgagaatatctggttattttgaatttgtcacagtctgcagctaaaaggcgaacaggaaaagaagagagagcggtaatttgaatgatagcagatttcacatcaggaaccaatgaagctagataagaatgcaacatctttgatgtctaaaagaaacaaaaagccaaccttgaattctttatttagtgaagttacccttcagaaatgacggcaaaataaagatgttttccaataaaagacaactatgagaattnttcaccagcagtcctatggtatcagaacagccaaaagaagttggtcagcctacagggaattatatcaaagggaagacttgaccttgaaaatgaatgaggaatataagaaattgatattatctgggtaaaaagaaaataaattttttattctatcatctttaaaaatgtatgactatttaaaacaaaaattataatatggcagtgtgaatttcaatgtatataaatgccatattgtaagactactttaacataaaaaacatcagtaaatggaacagaactataagaaacttatatagatgcaagtatctaaggttttacaagaagcaatgtgaatattaactctaagtgaactatgaagaatcctattttttgtaactacaggaccatattgattaaagtgggtagggcaaaaaagtggactctcaaatgttataatcccataaggggaaggggggaaaa

SEQ ID NO: 546648 - DNA, 218 bp, Homo sapiens
  misc_feature (40)..(40): n is a, c, g, or t
atgaacttgcatagttgaacgacagctgccaactggcggngttgcgcacgaagttgaggtacaggttcaggctgctggcgtcttcggtgaaggttgccgccaggttgggcgtgcgcccgcccagcgagcgcgcatagaagatgcccggggtcacctgccaaccgggcagcagggtgccgtcgtaggtcaagctgaagtccaggttgatccccgaagaa

SEQ ID NO: 546649 - DNA, 882 bp, Homo sapiens
  misc_feature (423)..(423): n is a, c, g, or t
atcaaaggcaagggaaacctgtacagtggagacacaaagggtcactggcagatttcaaatgatccaagacatcctcaaattggacattgagatctgctggttggagatcttagtgcccaaggaagaatgcttgcaaaaggagatggaacagtgtttctgttgcattggccactgagaatatctggttattttgaatttgtcacagtctgcagctaaaaggcgaacaggaaaagaagagagagcggtaatttgaatgatagcagatttcacatcaggaaccaatgaagctagataagaatgcaacatctttgatgtctaaaagaaacaaaaagccaaccttgaattctttatttagtgaagttacccttcagaaatgacggcaaaataaagatgttttccaataaaagacaactatgagaattnttcaccagcagtcctatggtatcagaacagccaaaagaagttggtcagcctacagggaattatatcaaagggaagacttgaccttgaaaatgaatgaggaatataagaaattgatattatctgggtaaaaagaaaataaattttttattctatcatctttaaaaatgtatgactatttaaaacaaaaattataatatggcagtgtgaatttcaatgtatataaatgccatattgtaagactactttaacataaaaaacatcagtaaatggaacagaactataagaaacttatatagatgcaagtatctaaggttttacaagaagcaatgtgaatattaactctaagtgaactatgaagaatcctattttttgtaactacaggaccatattgattaaagtgggtagggcaaaaaagtggactctcaaatgttataatcccataaggggaaggggggaaaa

SEQ ID NO: 546650 - DNA, 720 bp, Homo sapiens
tttgtagagtgatggaggacatttgttagcagttcgttgggcttgttggtttatgccagggtctagggttgatgcacaggccctctagagccccttatgtccttctagtcttacaccttgccctgcctgggctttcggtgcagactaggtgtgcgatttgagctctgtgactctatagtctactgcctggctctctatgattgctctgcggtgctgagtgctggactcaaggacatcatctaggcaggtgggagagcctgggctgaacagctgtgacctaactcccttatgccccacctctgccccctccacttcctgccctctgttccatcttcccccttcccaaaggccacagcctttattccaggtccagggatgtatggatgggggaaggaggaaacaggaagcccagagagggcaaagggcctacctcggggcgcgaaccatgccccagactattatctgagggctcttctgggcacgtgcacttcagcgtggcaccacctgcccatgccctgaggccagttggcgacgggagtggctccatagatgggttatttatacccttcgtttgctaatgtataattttgcatcataagtttctacattgtacccgagtgtcagaactataattcattccatttctctctgtgtctgtgccaagaaacgcaggcatctgggcctgccccttgcccaggaggcataacaccggggctagtt

SEQ ID NO: 546651 - DNA, 156 bp, Homo sapiens
aagtctaccaagaactctcccaccgagaaagcttgtatacagcaagcagcctcctttcaaggggactggatagtcaaaaatcaaaagctcgtcctcccctaagagcagaccaaagaaattctgacatctcttcaccaatccttccatatcagtgtg

SEQ ID NO: 546652 - DNA, 110 bp, Homo sapiens
ccaatgctcaacccatcaagttaaggctgaggaacaaggagggtattggcggccttacacgagttagttaaggaatttgctctgttgaaatgttggaacaatttcttccc

SEQ ID NO: 546653 - DNA, 975 bp, Homo sapiens
  misc_feature (516)..(516): n is a, c, g, or t
atcaaaggcaagggaaacctgtacagtggagacacaaagggtcactggcagatttcaaatgatccaagacatcctcaaaatccttccaaaccacaaggaaaatcaccaggccaaaagtgaggtttgaagtctggacatgtactggttttctctagcaatcgactcgcaatttttggacattgagatctgctggttggagatcttagtgcccaaggaagaatgcttgcaaaaggagatggaacagtgtttctgttgcattggccactgagaatatctggttattttgaatttgtcacagtctgcagctaaaaggcgaacaggaaaagaagagagagcggtaatttgaatgatagcagatttcacatcaggaaccaatgaagctagataagaatgcaacatctttgatgtctaaaagaaacaaaaagccaaccttgaattctttatttagtgaagttacccttcagaaatgacggcaaaataaagatgttttccaataaaagacaactatgagaattnttcaccagcagtcctatggtatcagaacagccaaaagaagttggtcagcctacagggaattatatcaaagggaagacttgaccttgaaaatgaatgaggaatataagaaattgatattatctgggtaaaaagaaaataaattttttattctatcatctttaaaaatgtatgactatttaaaacaaaaattataatatggcagtgtgaatttcaatgtatataaatgccatattgtaagactactttaacataaaaaacatcagtaaatggaacagaactataagaaacttatatagatgcaagtatctaaggttttacaagaagcaatgtgaatattaactctaagtgaactatgaagaatcctattttttgtaactacaggaccatattgattaaagtgggtagggcaaaaaagtggactctcaaatgttataatcccataaggggaaggggggaaaa

SEQ ID NO: 546654 - DNA, 157 bp, Homo sapiens
cgcggtggctcacgcctgtaatcccagctctcagggaggctaagaggcgggaggatagcttgagcccaggagttcgagacctgcctgggcaatatagcgagaacccgttcctccagaaacaggaacaaaaaacacaaagaataaaaaacacacaatg

SEQ ID NO: 546655 - DNA, 303 bp, Homo sapiens
agaggtgattccccctggagcagatgagacggcgctgttggggctacgctggaggtggtctcgcacaaggttcagagcgtcattcgattttccgcgggagatctgaaccaaggcgattcccttaatggcttccaccatgtctggatcgcgcttgagcgcttcgttgaaagaggcttcggcttcgttcaggcgtcgctcgcgaagatacagttcgcccatcttttcatagcctagcgggctctgcggaattccttcaattaaccgcttcaagtccaactctgcggacgcaggatctctctggat

SEQ ID NO: 546656 - DNA, 935 bp, Homo sapiens
tgttggctgcggcgtctatcgcgcgtgggtttgaattacggcgtcgcgctgggtgggatgtagcgtggtgctgccggcctgctggtgccgcggcaggttgacaatagtccctcgggggcggagttggccgcgcgcggcacggttgtttgtgccccgcggcgccgtgtgtgagcggtgtatgcttgcggtgccccctcgtgtgcgagtggtggtcgtccgcgccgcccgcgggcagtgatttactcgtcgcccctggttgcgccgctgggaagaagggtagcgcccaccagtgaggttgttctcgcacgctggcttgctgcggcgtgagctcaccaagggcgtgtgtccccgcttgatgtcgggggccagcctcttggtggtgtcattcatgaggcggctctctctcctgggcggctctaactgtgggctcactcctctctgacaagggttgtgtcgtacgccaggaatggggtggtgacgctctcgctcgccgcgcgggcgatcacatcacacgcatggggggccaccgccgctcggtagacgctctgctcgtccagagggccgcggcaagacaatgatggcgttctggtttcggcactctctcgcccgcgcgtatgatggagcttgtcagagctatcgctcagggcgggcaacagcttgtgatggagcagccaccatggcgcctgtttggacactcccccggacggtgttcagtgtatggaggcacccgtcgtcggttgtttctagcaatggtttgaccctgaatagctccatctgttccccgcctgctcaagtggagcaaacgggtggggacgtctcccccccagcaagtggactgcgcgtacgtatggttcctatcaaccaccacgcccccccctgtctcgtcccccccccccgggggcccccataaaaaagggttggctaaaaaaaaaaca

SEQ ID NO: 546657 - DNA, 125 bp, Homo sapiens
ctcgtatcatctcccttttgtccacccttcatacagtatggatttgcttgtgatgtccaggtctaggtgaatgcttaggaatatactgcatgctcccttctttcttccatagctgctacaggcct

SEQ ID NO: 546658 - DNA, 483 bp, Homo sapiens
  misc_feature (418)..(418): n is a, c, g, or t
accaggaaaacacatcctctgcggcacaccaggaagctcagatgacaaagcagtggaaggaagtataattacaatgatgaaatcaacacacggaaattcctaagtggctgcagttaccgtaacaagggggtacaggacctcagcctcctgcactggaactttctgccgcatcccagaaaggctggctctcctacactgtgctctggggtggcagctgtcttttctggttttttgttttgttttgttttgttttttctgagatggagtctcactcttgttgtccaggccggagtgcagtggcgcgatcttggttcactgcaacctccacctcccacgttcaagccgattctcctgcctcagcctccccagtagatggggattaccggtgtccggccaccacacccagctaatttttccnatttttaagtagagatggtggtttcaccatgtggtaaggctggtctcgaaactcctgacctcatg

SEQ ID NO: 546659 - DNA, 750 bp, Homo sapiens
  misc_feature (719)..(719): n is a, c, g, or t
gttttctactcgtggcggggagacacgtaggacattattgcctccggcctcactggacccctcagctctgtataagatatgctgcggcattcgaataccatgcgcaaagaagagatggatcgttgcccaactgtcactatagggcaaaccgcgcaatgcattgccacattggtgtggacaggtaggactcgccaaacgccgatgttcatctgccacaatggcctctgggtcgtcctgatcgcaggggtctctcttttagcatagagggccctgccactccctgggaacaatgagtcttaatcggaactggcgaaggccaactgtcagtggccaacactggtccacacagctaaaggaagtactcgtatagcccctcatgtgttatacctggaccgggattcgacacttgatgtgggaactaagaagaggcctgcagatttcccttctataccagacctggggggcgcccacccgggtcctactataggacccctgtatggcgcttgaaagccctgtaacaataagaggctgccagatggcccatccctagcattattaactttaccaatctttttggtggggatgctatcctaaaaaactataaaagttctcaccatgtggtcccgcctctaaagcatttccgggaaatacaggcgaaagattgtagatgggagccataattgcctaaagaggggaactcatgccacttgtactataancgacgccccttcaatcctccttgaactggat

SEQ ID NO: 546660 - DNA, 738 bp, Homo sapiens
tcatctcacagccaggcggtctggggcatatgagtgaagggtagcaggaaggacaggaccagctgggctggtagtgagatctgtggcagagctggtagtgacagtcgtggctgtgcgggcactggcgggatagccccaggagtgcccatgtcactatggagaaccacctcattgcatgcagcttcctacctagtcagccacacagacggttacaacggggagagtggtcctgtcccttcataagtccgacatctccagtggcccgcactggaactccgggggacctctactggacttgcttagcgtggagactagtcactcgagggttaggcggggaaagggccacgaaaatgaaaccattgagaaagaagccctttcaaggaggcccccagaacaagataaaccaataccaagacataacaaaaggcgcgcgggcgccgttcgcggaaagttaagtcctctacggacgtggccccaaagccacctacgcgcatgttgccccaggtttgtcgctgggcgacgcaggttctggggaccacccaaaatgatgcgtgccgtcagtgaattccaataagaggaaaagggcgccctgggggcacgcacaaatttggccccccacgttgtagtgggacggggagaaccacgtgtggctcagccctttgggcggagacactctgtggttgacgcgccagcccgtattcacaccttggggggtgcgttgccccttgactgtggctg

SEQ ID NO: 546661 - DNA, 99 bp, Homo sapiens
gtgccaaggaaaaacgggccagaaaaatgtagatctgatgagacaagttctctccccagtggctgatgtattccaataaaccaatagatttcaaaacca

SEQ ID NO: 546662 - DNA, 122 bp, Homo sapiens
ttggggttattcagtgctgaggaaatatctcaagcagacatgtagaggtatgaaagacacagggcaggaatgcaaaagagggagcacattgatggatcattgccagggaaggtatttgggac

SEQ ID NO: 546663 - DNA, 336 bp, Homo sapiens
gatttgtcccatggaccaacaggggtggaagaataggggatctgaatgctgtactatctcatagggcatacaacattacactcttctaaattcccaccggggcaagtgagggtgcgaaagcctgtatcgatgagcctttctggacgtattatcctacagttctgtgactgtccagcttaacgggagtctctggagggactagggaaattatcaatacatacagggccctaatttcacgctccttaacccaacctcagtcctggagcctaaaaccacaatctatacataacaatgatttctccctcctacctcctcaaacttggcttcctgccccca

SEQ ID NO: 546664 - DNA, 107 bp, Homo sapiens
agagttgtttcttctccctctactcgctaaagcagcctctctcgctaaagcagcctctctcgctaaagcagcctctctcgctaaagcagcctctctcgctaaagcag

SEQ ID NO: 546665 - DNA, 358 bp, Homo sapiens
cactcagcatagggcgtctggtatctactccaacaagatggcgcgcaccatctggttcttctacacactgtcctgcactgcctggtcttcctggtgctctacaagctggcatggagcgagagcagtggcgagggactgtaccacgcttctgcgccatgaagtacgatgaccacctgcacaagttccacgagaatgacaaaggggcagcggctggtgacttgtggcatgtgataccccgggccctcccccgtgacagtgacggttgcgcttccaccccgactggctcagtgcatctaattcactaagactcccctgaggaatccctcatgaataatgccgagtccgctgcatcggggac

SEQ ID NO: 546666 - DNA, 190 bp, Homo sapiens
tcagtagcagcattactcataaaagcccaagcgaaacacctcaaggtgtccatcacgatgaatggataaacaaaatgtaatatatccacacaatagaatcttattcgtcaataaaaaggaatgaagtactgatacatgctataacagagatgaacttcgaaaacatgctattgaaacttctaaaactagg

SEQ ID NO: 546667 - DNA, 793 bp, Homo sapiens
  misc_feature (110)..(110): n is a, c, g, or t
  misc_feature (112)..(112): n is a, c, g, or t
  misc_feature (132)..(132): n is a, c, g, or t
  misc_feature (142)..(142): n is a, c, g, or t
  misc_feature (163)..(163): n is a, c, g, or t
  misc_feature (178)..(178): n is a, c, g, or t
  misc_feature (379)..(379): n is a, c, g, or t
agcgggagtgcatctggaatacgcagagtcagtaagaccatggctacgtctcgatgtctaagggttgcttgtttttaagccaaactccaaaaagagaaagatctctctgncnatagaggactatttttaacnaggggaaaantgagcctgaggacagagcttngattcgaacttatcngttgatatgggcccgccgattgtagatctggagaattgggcgaacgtaccacgacgggagtttaattataaaccctgtgtgacgcaacttctggagttggagtttctcggcgcaaaatcctccattttctggggtttcccgaaaggaaattctccgaagagctttggggccgggtccccaataataaacttcccaagaaanttttccacactgggtggcgcctctggtgcctcttggggtgttgaaattggtgctccagggagttcacttggagttttggaccactttccgcggaaaggtcttaaacaagaaagggcccttttccagaaataaatgttgcacacccatattgtatgtctcactttgcgacaagcgtaaaaagatttgtgcccacgatattggaaaaccttttttttgccaaagttgatctcacagttgatggactgctgtgttgatatataaatccccaagaggaggaaagtgttcacgtcacccaaagaaagacacattattcaatggattcactttccagttggtatatgactgtcgcaccagaagacggacccaaaatgctaagcaaaaaaaggactacttctagccatggcagtctcctcc

SEQ ID NO: 546668 - DNA, 211 bp, Homo sapiens
ggctgaccttaaggatctcaagctccaacaagatagctgcagcccgtcagagagagctctgcacgtaccaagtaccaggcccagctccaggccccaactcgccagctctcccgctctggatctgcactctaacactcgactctgctgctcaatgggaagaacagaatttgctcctgcatgcaactaaattcaataaaactgtcttgttggg

SEQ ID NO: 546669 - DNA, 402 bp, Homo sapiens
  misc_feature (110)..(110): n is a, c, g, or t
  misc_feature (112)..(112): n is a, c, g, or t
  misc_feature (132)..(132): n is a, c, g, or t
  misc_feature (142)..(142): n is a, c, g, or t
  misc_feature (163)..(163): n is a, c, g, or t
  misc_feature (178)..(178): n is a, c, g, or t
agcgggagtgcatctggaatacgcagagtcagtaagaccatggctacgtctcgatgtctaagggttgcttgtttttaagccaaactccaaaaagagaaagatctctctgncnatagaggactatttttaacnaggggaaaantgagcctgaggacagagcttngattcgaacttatcngttgatatggcagcagatgaaatctgaaaatgagcgactacaagaggaattcaataaaaacttgtttgacaatctgattgaatttctgcaacaaatccacattcctgggggaatttttccccccaaggaaaaagcaaatttcaaagcagacttgggcggtcaaataaaactcagagaaattccaactgctgctcttgttcttggtgtgaatgtcacagatcata

SEQ ID NO: 546670 - DNA, 420 bp, Homo sapiens
agctggagtgcagtggcacaatcttggctcgctgcaactggtgtctcccaggttcaagcgattctccagcctcagcctcccaagtagctgggattatagccgtgcaccaccacgcctggctaatttttgtatttttagtagagacagggttttaccatgttggccagtctggtctcaaactcctgacttcaggcgatctgcctgcctcggcctcccaaagtactgggattacaggcatgagccactgtgcctggcattttttttttttttaatttttaatttctttggagatagggtctcaatctgtcatccaggctgaggcaggagaattgcttgatcccaggaggcggagcttgcagtgagccgagatcccaaccctgcactccagcctgggtgacagagccagactctgtctctaga

SEQ ID NO: 546671 - DNA, 310 bp, Homo sapiens
tttgccaagaaacccttaagagcttcaatttaggtctactgtcctataaatgccctaccttcatctttttatttattttaaacatccttacttttgggtcccataaaatgttccagattcatcttgtatttatctgccctagcccttgttccttttattgaagaacatttagaaaccaaaatctgggcactagctgtgcttactgttaccagggtacacaatatattcttttttggaggcaggtgtcactctgtcacccaggctggagtgcaatggcatgatcatggctcactggagccttgacctccca

SEQ ID NO: 546672 - DNA, 752 bp, Homo sapiens
  misc_feature (2)..(2): n is a, c, g, or t
  misc_feature (135)..(135): n is a, c, g, or t
  misc_feature (142)..(142): n is a, c, g, or t
  misc_feature (152)..(152): n is a, c, g, or t
  misc_feature (178)..(178): n is a, c, g, or t
  misc_feature (206)..(206): n is a, c, g, or t
  misc_feature (273)..(273): n is a, c, g, or t
  misc_feature (277)..(277): n is a, c, g, or t
  misc_feature (398)..(398): n is a, c, g, or t
  misc_feature (419)..(419): n is a, c, g, or t
  misc_feature (440)..(441): n is a, c, g, or t
  misc_feature (456)..(456): n is a, c, g, or t
  misc_feature (464)..(464): n is a, c, g, or t
  misc_feature (475)..(475): n is a, c, g, or t
  misc_feature (477)..(477): n is a, c, g, or t
  misc_feature (479)..(480): n is a, c, g, or t
  misc_feature (507)..(507): n is a, c, g, or t
  misc_feature (679)..(679): n is a, c, g, or t
  misc_feature (686)..(686): n is a, c, g, or t
gnacgggaccagggagagaggggagggatatttacagtgcatggtggtacggggacaaccactttcctctgagtagccctgagaactttgtgctttttttcttagttggtgccgagctactctgtgaatggattngtgtatntcttctttanggaaagatgtattaaccaaagcacantccagcccaatttctcggctgaggattncacgatatcaatccaaacatcacactatttaattccccaataaaacattggaaaaaggactatcagngctnacacatttacatataaaatttccacctaataggtaaaaaaagcctatgtaccaatttctaaaacagtaataagaaatatacacaattaggggtatataaaaaaaaaagaatattacaaaanattaaaggcaatcctcctggnccacggacccttgtagccgcnnacttgaagttggcanaatctganaatgcatcaanananncctgcaccaccttgtagcagaactcanactgttccagtgtctggaccatgtgtggcctctgtagccgcagcttgacagtatggaagacatccaaaatcccctctgcatacacacgctccaggacggtgctcagggcacagaaggtccccgtccttcctgccccggcgctgcagttcacggtgatggggtggttcctgantgctgcngctgcttctgcacggcggcgatgatgctgaacatgccctttccgtcactggggatgcccacttcag

SEQ ID NO: 546673 - DNA, 1007 bp, Homo sapiens
acatacccatggccaacctcctactcctcattgtacccattctaatcgcaatggcattcctaagtgcttaccgaacgaaaaattctaggctatatacaactacgcaaaggccccaacgtcgtaggcccctacgggctactacaacccttcgctgacgccataaaactcttcactaaagagccctaaaaccccggccaaatttaacaatcaccttctacttaacggcccggactatagctctacacacatgcgctcttctacatagtgaacccctcctcccgatacccaaccccctggtcaacctcaacctaggccttcctatttattctagccacatactagcctagcccgtaactcaatcctctgactcacggctgcagcaccaaactcaaacaacgaccctgatcggcgcaccgcgacgcagccagccccaaccacctacatactgacacgtcaacaccttagcccatcatatcctacctatccaaacattacttacctacagtggcatccgatgaaccttctacgaccccttatacactcattcctcgaacacacgtctgcaattacctccctgaccatacacggacgcccatgggagacaacaacaatggatcacacctaacacccaacatcacgcaggagaacacacaacacgacacccacacgtcacagaaccaatgcccgccaatgcggatctcccgaacacaacacacagcgacctccaaacaatccgcaaaaaccgcagccacgcccacatccggacgacaattattagcgaaggagccgaaacaatccacgcaaacacacacacacacgccagaacaccacacccacacaacacaaaacaaacacaatccgaccgccaaccaacataacgacagcaaaactaccacgtacaccgccaacacaacaagatcacagagaggacacaaaccacacacgcaaacaccaccccgagacaaaacgaaagctggaaaagcaaacccagcaaccacgatcagaca

SEQ ID NO: 546674 - DNA, 444 bp, Homo sapiens
tctgatcaagctcgaacttgatccaatatacgcacaggaaggtttaactttaattaaaattgacagggttgaagaggaggctggaacggaatacagtatctagtaagatctacacatgtctatgcgtgtcaaaatgctagtaggaatatgttttgtcaatacatgataggacatgttgttgttttaaatagatgagctgaaggctgataattgaagtcaatttatgtaatattcatagttaaatatttagattttattcatatatgtatctatatttaaatatatggataattttattattttaaacattaataattaatttatatttatcaattatttcaattaagttatttaaaatttatctttgtattttttatatcttataaaacttgaatttattgtgattatttttttttgtattatttaattctaagtatattttag

SEQ ID NO: 546675 - DNA, 973 bp, Homo sapiens
gctcaggtgccctggtggtctttgaggaggccttcttctcgttctgtgagcacggcgaaccagctggagtacctggtgggctcgttgtgtggatcggcttctggctggatgttcctggtcctgctcatggtggccctggtaggggagctttctggtccgcttcgtctccgcggttcagcccaggtagatcttcggccttcttcgatcatcactcatcgttcgatctgagtaagacgcttgctagcaatgctggtgaaggatcttccaggaagcagtcccgctgcgataggctcgctcatggctccaagcagctcagagtggtggactggctggtgaagaacattgacattggagcctggggtaagaatccacggctgtggagacagtgacaagaggacgcttgggctgaggcacgtctgggcaaggggaatgccccgcgtggccatgtcccaaaacacggccctgctgtcgctggtgctcatggccggcaccttcttcatcggcttcttcctgcgcagattcaagaaacagtcggtccttgtcctggccggatccggcgggtgaattggggactttgtgggtgcccatcgccatcctcgatcatggtgcgttgtggaattacagtattgaggacacctatagccagaagcttgagcgttcccatgtggatatcggtgactggcccaagaaaagaggggctagggtcatcaaccccctgggagagaagagccctttcctgtgtggatgatggtttgccagacctgtgccgcatctggtcttcattctcatcttaatggagacaaagataaccagctcatcatctcaagaaggaggcatgctgcagaagggtcggttccactggaactgatggtcatagtggcatgggggattgagactttgggctgcctggtggttgtgcaatggccggttgaacacgcaagggtcacagcaagaagagaggctggaaaccaat

SEQ ID NO: 546676 - DNA, 599 bp, Homo sapiens
catacatgtcacacagactaaggtaaaaaatgtacattatacatatcaaggcatgcaattacattaaatacaacataataaaatacccatgtcaactataatcacagcaacatcaataacaacaatgacgaatgaaatactcttcaacaggtatctcagatgtatacatccatgattctagacactccataggagctcggtaacagtttgtataagccatctatttaatggggtcttcagggcaaaattttctttactttcatgatgcaaagcctatgaaggatcaacgtgtctgatacctcgaactttattcaattcctcttgaagttaagtctcacttagtattaatattagcaagctgaaagcggagtttagatacttccgatatgagttggctatattcatcttacaactatcaacaacatgcttgatttttagtaacaaatactgatgacccaataatagcaagctcttctctcatttggtcatcatgacctaatgcggttagtatagttatagttttattccatgagccaacattctaaggctggaatgttggtactccgggtctatggctgaagtccaaacttagaatttcg

SEQ ID NO: 546677 - DNA, 156 bp, Homo sapiens
tccaccttctggctcctgcatctccatgattgggtgactatgttctcaccaggatccagactggcatacttgaaggagcaaaaagaatcacacagaacaggcaacatggaccagacggcggcgcgcgtgcacacgcgctgcgccctgcaaacgctc

SEQ ID NO: 546678 - DNA, 1450 bp, Homo sapiens
ttatttttttctcatttaacttttttaatgggtctcaaaattctgtgacaaattttgggtcaatttgtttccatataaaaagctactgatttttaaaaactaattaactttaaaacgtgccacacgcaaaaacagaaacaccaaaggtggctccacaaaacattcctccttttcctttcatgagaggtttttacgagtcgcttgtgttatcatttaaccgagtctctttttccttcacttaacactttaacatgtggccaaatgtgaacacaaacagattcgtgaagacaccgtttctttcacacccaccgtgatttacagacagtgtggggtgtggcccaggtatatttcagggaataaactatctcatatcctacgccctttcgtgagcccttctcccgtggcgcccagcaactttgcggtgacaccattgccccgaggctctccgacgccagcccttctcttgtgtgtcaacactgtgcctttgtgcatctgacccccccccacccgaccaccgtgctcgtgtcctcgatatccacagaaacacagggcaaatggcagaccccaaaaagggtgtgggtatagttcgtgagaacagcctcctccacacaacaccatttggcgcctatgcccacggaaacccattacttcacccactgtggccacgcaatctcacccaaagacctttcaacaagacatttctagggcgccccaatacgtctcacacgattcttacttccacaaaaaaacggcgaaatccacattctattcaccatatcagccttacacgcacaaatcttgcaacgttgcaagttgtaaaccccgttctatggcaaattccaccatatacaaggagagccataagcccccggccgaccatatactctgccccctagagcattgggtctccacagcaataaattccccctttgtcagccgaggttgaaaagcccaggcatcgctaccccactgtgggcgggagcatcaactctacgcgactgttcccctagaccactgtcgttcccccagtcactatacctctcgcctgaccagcacccgacttccttcggccacttagcatcccccagtctttgtctccccggggacacagccttcccctcaccgcctccaggaggccatcatcgcacagaattataactacagcagcacacctaacacggaaccacagatccccccccccacaccactcctacacacccacacccacgcggcccagtaaacacaaacaaatccacacttagtaacctccacagcacacaacacagcaatacacaccatcacgtacacaagataaccatcaccaacgcaaggaagacacacaaccagagcacacacccaccacacacgcaacacccacagcccaccacacacaccgggtccatacaaccacgagcatacaccaccaacaaataatacaccaacacagatc

SEQ ID NO: 546679 - DNA, 326 bp, Homo sapiens
ggtgcctgttgtgtgcctagtgactgtgtgtgccattcatagagtcgacttgcctctattttacagacattcaccgagaagagacgacacatttacagacggaccatatgatgcttttgcgtcttacctgaatgcccacctgaacatctggtgtataagatctgcatattggacagggacgtactgcctgcaggagcatgcagcgatgatatgcactcactgatggcatatatgccgaagactagtcatttgttctaagtaccagtgatatgtctactgaggtcaggtatgaactggagagcagtactgctgcagcatttggcggc

SEQ ID NO: 546680 - DNA, 838 bp, Homo sapiens
gctgcggcggcaggaaatcggggctcggccctgcggcgcgcgacccatccccatcccggtccctgcagagcagatccccgggcccagatatggactgcagcagagcctggtgactccccccagtgtcctgagggcaggaagaggtacatgtgacatcttccgtgagcctggacaacctcgaaatctcactggtggaactgtgacccttgatgatgcttggctggagaccctctactctcatgaagacccagaacctgacaagacccctacagccacattgttacccaactgaatgccatgctgttggagctggccctccccagagggtcctgtacccctcacaggggagcgaactggacttgcgtgctcattctgtgacaaatggggggtgtggactgcaagcccgtggaatatgccagagacctggagccgctatgccaaggaactgcttgcctggactgaaaagagagccagctattgagctggacgtttgctaaagaggcaccattgaaggatcgcctgaagcttggcaaggttgtccagttcaagcagcatgagcccacattgcctcgtgcgagtacatctacaccctgtatctggagcacgatctcagcctgggaaccctgggccatggagaccagtggcccagcagaagagaggactattaccagtcccatcgacggtccaacagtgtgactgagaattgcagatagtggctgcacatgtagttcacgggagcaagtgtgagtgaaggatgcagaagcgtgatgccactgacggctgtgcatggcacttgcggagcgcccagctggagtactgtgcaacccagtgaagcact

SEQ ID NO: 546681 - DNA, 449 bp, Homo sapiens
  misc_feature (427)..(427): n is a, c, g, or t
ttacaacagcttctcctgccaaagctggcaaccagacacgtctgctttcacatagaaccaaaacacatggaaagaagatatgaggagaaaccctggctccctcccacgtgttggcttccctttccaacagcctttcaaagccggagtctcctccaagtgggtgagcatgcctcccattcaccaacagcgagcttctctgtaggaaaaggctggggcctctctcagcccccaccgcccaccaccagagagcctagacttgctccatgagcagacaccatgggggcctgatggaaagctcattcaaggtcacccccaggaatttctctcgtgcaggaggtgagaggtgaacaaccatggctaggtggcaagtgagcagaaggaaagatgcaatgtgactctttaagaaaaggcattttctaatactttntcttttgaaatagtgcaaagat

SEQ ID NO: 546682 - DNA, 640 bp, Homo sapiens
  misc_feature (60)..(60): n is a, c, g, or t
  misc_feature (223)..(223): n is a, c, g, or t
tggtgaacccagtattcaccaaaactgggcagagacatgaggttttgataccagttttcnccaaggcctgaagttctgatgtcagacctctgtgaaagccacaagcggcaaatttgctggaccaatatgggatgaggtaaggaatcccttcgtggccgcacactgaagccactgtgacgatgtggccatgatttctctccatcatcgatggaagaagtgcttntgtgatccaaaaatgtcctaggatgttgacctcaaatgtcttggtaatctcttcatccttggtgctgagaagatcggctggatatactgtcccagcattattcaccacgattgttacatcacccacttctttcttcacctgatttagagagcgatagatccggcactcagctgcagtttcctccacaccgcgcttattaatatcccacagaaccaatatgctctgtcgttttgcaaattcataagtagtctgcctgcctattccatgcccagctccagtaatgagaacaatctccccagccacagattttctcctctgaggaatgaaaaacttcaccaacgactccaagtaggagtagatgatggtgatcagaagcagaaggatttctaggatgatgttcatggctttgctctgtcc

SEQ ID NO: 546683 - DNA, 237 bp, Homo sapiens
cgctctcacccacccccaggctggacagcggtcacgctgtatccagtactttgggaggcgaggcgggcggatcacaaggtcagagatcgagaccatcctggccaaccaacatggtgaaacctcatctctactaaaaatacaaaaattagctgggtgtggtggcgcgtgcctgtaatcccagctactcaggatgctgaggcaggagaatcgcttgaacccggggtgggtggagagcgg

SEQ ID NO: 546684 - DNA, 694 bp, Homo sapiens
  misc_feature (60)..(60): n is a, c, g, or t
  misc_feature (223)..(223): n is a, c, g, or t
tggtgaacccagtattcaccaaaactgggcagagacatgaggttttgataccagttttcnccaaggcctgaagttctgatgtcagacctctgtgaaagccacaagcggcaaatttgctggaccaatatgggatgaggtaaggaatcccttcgtggccgcacactgaagccactgtgacgatgtggccatgatttctctccatcatcgatggaagaagtgcttntgtgatccaaaaatgtcctaggatgttgacctcaaatgtcttggtaatctcttcatccttggtgctgagaagatcggctggatatactgtcccagcattattcaccacgattgttacatcacccacttctttcttcacctgatttagagagcgatagatctcttctctgttgctgcagtctaccacatacgcatgcgcagtgacgcctagttttcggcactcagctgcagtttcctccacaccgcgcttattaatatcccacagaaccaatatgctctgtcgttttgcaaattcataagtagtctgcctgcctattccatgcccagctccagtaatgagaacaatctccccagccacagattttctcctctgaggaatgaaaaacttcaccaacgactccaagtaggagtagatgatggtgatcagaagcagaaggatttctaggatgatgttcatggctttgctctgtcc

SEQ ID NO: 546685 - DNA, 420 bp, Homo sapiens
ttcttgttggtcgtctctcaggatcccccccgagaagctgacccatgttctcccctaatggccccgtgcgtaggcccctgcctatggcctgcctgggacacactaactatcaccggaacacactggactgatacatcaatgacgccagactgcacccctgcctgtgcctcccaagagcgaccccgggacagtgggtcagatctaggtgtcgtacactggccgaacacaagggctggacgccacactgtgatcgctcggacactgaacggcacgctatgctctgcagccgtggctacatatccttcgcgtattactccattcctcagggtttcaccgggcttgtgttcggagactccctctgctgacacgatgggcacactccccttcgcgtatgactccattcctcatgcgttctcgggg

SEQ ID NO: 546686 - DNA, 199 bp, Homo sapiens
cggttttctgatttggtgttccctcctccccactgggtgtctgttctggaggccagggtgagaggtggaggaggatggtcacgcagatcagaactcgggggagacagtgtaccattgggtaggaggagtacagactgtacagaagactgagcgaggatgaactggtgcagataggcatcgagcagaggctagcggacaa

SEQ ID NO: 546687 - DNA, 255 bp, Homo sapiens
  misc_feature (1)..(1): n is a, c, g, or t
  misc_feature (106)..(106): n is a, c, g, or t
  misc_feature (237)..(237): n is a, c, g, or t
nttccggccgcatcttactttatttgtgatacaagcaggggtggggaaagagaaatgagcagacttggaagcttctccaggggggggagaatacctctgggctccnaacaccagacgccaggagaaaggagggggggtgatgactccccactctttctccagcccctgctcctctgtgtctccccttcacccactgcagcttcctcagggcctgggtcccgtgccggggggtgttcnaatgacctcctttctatc

SEQ ID NO: 546688 - DNA, 120 bp, Homo sapiens
gcggccgcctactactactttacggttgcaagaaaacaacagaaaaaattggccaattccccaaaggtcctaaaaacccacggcctcttggtttgaccccattaaaaattgttatttccc

SEQ ID NO: 546689 - DNA, 124 bp, Homo sapiens
ggtctcttttcccccccttttccccttcccttttccccgccccccccccccaaaaaagaaacttcttcatcccggggggcgattattttttttaactaaaggaagataaaattttattttttta

SEQ ID NO: 546690 - DNA, 466 bp, Homo sapiens
  misc_feature (14)..(14): n is a, c, g, or t
  misc_feature (429)..(429): n is a, c, g, or t
  misc_feature (460)..(460): n is a, c, g, or t
gtagcgggaatcantcggaagaaaccggggtggggagataatgtacggctcctaggcccatgtaaaaacttaatttttttttattgagaactgagaacaattgaattcatcccaaaattgtatttttccctttgaaaaatagcctacatgagcctatattacctctttacactgataaaacattaaaagtactttttggctgggcacagtgcctcacacttgtaatctcagcactttcggaggctgaggcaggcaaatcacctgagacccaggagttcaagaccagcctggccaacatggtgaaaccccatctcttactaaaaatacaaaaattagccaggcctggtgccacacacctgcagtcccagctactcgggaggctgaggcaggtgaatcgcttgaacccgggaagttgcactgagctgagantttgccactgcactccagcctgggcgacagnagggac

SEQ ID NO: 546691 - DNA, 380 bp, Homo sapiens
  misc_feature (324)..(324): n is a, c, g, or t
aaaaaaaaatttcagttctatcttgaaagatctcacttccaacacacatgctgtctagcaacactaagtagaggggaccattcttcccaactcacggctgctttgtccacttcccagacctgcagccccagcacctgcccaccttggcatctcccattaagtcacataatgagggcagagagcaggggcctgtttttgcggacacttgaagtacagcatggaccaggcagagcaaggcgccggatcagatcagttccagaagatatgcagcagctgctctgatttcagtgaaatgtgtgaaaccatgcacaggactttggacanctctcagctgttagcaaaatcccagtttccccttggggctttccagaaggcaaggg

SEQ ID NO: 546692 - DNA, 869 bp, Homo sapiens
ggcctccgtgctgcccctgtcagactgtggcggccggtcgctgcggtgcgctctccctccctgcccgcagcctggagaggcgcttctgtgcttgcacacccccggtcctgccggaccggcctgccctctgccgtgctccgcctgccgcgacttgatgcccgcgcgtgacatgtgacacgcacctggaacgctggcaccagcgcccggtcggctcctggggactggcgaagatgggcaaacccaggaactgtggctgctcatcacggtatcacaggccaggatggttcctacctgtgttgagtcctgctggagaaaggctatgaggtccatggaatttgtaccggcggtccagtacaatttaatacgggtcgaaataaggagcattctgtataagaatccccaggctcacattgaaggaaacaatgaagttgcactatggcgatctcactgaacaagaacctagcctggtgaagatcattaatgaagtaaagcccacagagatctacaagcttggaagccccaggagccaacgtcgaaattacctttgacctcgctgagtacactgcggacgttgaccggagttgggcacctctacgaccttctagaatgcaggttaaaaatagtggcttaatcaactcttgtggacggttataacaaaggacctcaaaaggtaaacttaaatggggacaagctgcctgaatagcccagaagggagaacacccctatatatcccgataccctaatgggaagaaactatcatgctaatgattgggtaacaatccgagaagcgaaaaactattgaggaacagatactcaaacagagagccaaagagacaaagagaacgaaaaaccggcaaataaaactggaa

SEQ ID NO: 546693 - DNA, 961 bp, Homo sapiens
  misc_feature (17)..(17): n is a, c, g, or t
catcgatctctatgtgncccaccagcaacgagtctgttagaccactccgcccacatgtgccggcgtcgtgcatgtgtggcgcccgcgtggctcccctatgtatacacatcgtcgtgtgataaccccgcggtgttcgcgccccgcgagctgttgattcgggttctgccacgaggattccgccttccactatatgcctgcccccctttgcggccccggattgtggcgcccaactccttcggtcccatagggggggggcccgcacacccacattactgcgggggctgcaatccccccacctggtgagaagctggcagaaaatctctcccacaacgtcaggatctcacgaccacttcaccgccttttttcccctctgcaccaccagggggtttaataaattaccgcggacaaagcttttttcccagggctcgcactccgataaaaccacccttggtgctgaccacaacccaagagctccaatgttccaaccgaggtgacaccacaaagatttgtgcgctcccaaattgctatgacacaccattattataattgctgtcactaccttctctgcacatctttttcttctgttgccacccacccggtgagacaataccatcctgaaaacctcaaactcaataatcaggaaccttcttgtcaactcccaattcatctctactcattcaccgcaaatttatagctccccttaagatgcaccccgtggggacatcatcaacaatgatacaaaggcaagtcgtccaccctttttgtgaaccaaacaaattaataaggaacaccaccctactctctcccccaccactagtgcgagagtcgcgcgcctacacgccaatttggatagaccagcctctctatattcgctaaaatatgacgctccacttatcactcataaaaagaaagggacaacttcaaccaaccaattttccaccacccccccccaaaaaaaaca

SEQ ID NO: 546694 - DNA, 800 bp, Homo sapiens
  misc_feature (436)..(436): n is a, c, g, or t
ccccacaatcctaggcctacccgccggcatgtactgatctattctatttccctcctctgatctgatcccgctagcactcgcaagatatctcatcaaacaaaccgatgtaatcaccacgcccaacgaatgactaatcaagctaacctcaaaacaaatgataaccatacacaacgactgagagagggacgaacctgatctcttatgctaggtagtccttcaatcgatttttatgtagccacgagacataaccttcgctcggacctcctgccgcacgtcagtggtagcagcctagagccaaccccaatctatcgtactaagccttgagccgcatggcgctatccccttactgagtgcgaggcgcagatgagtgtatagggcgtttcgactctacagatataaaacatgccgcatagtcccacgttctataccacaaggncagcgaccgtacaaccccgtatatcccgcagtactgagttagtaactgcggaaagccagtgcaggcactactcagttcacaccaagtaagccctgtgcgcgtacgcctgaaccgcataagcattagctggcaggccaccgtactcatgcacctaattcggaagcgccaccctagcagtatcaaccattgaccttccctctacgacttatcaatcttcacaattcgtaattgctactgacatatgcctagaaagtcgctgtcgccctaatccaagcctacgtctgcacgactgtctagtaagcctctacctgcgcgacaggcttatgacccaccaatcacatgcctatcatatagtgaacccgcc

SEQ ID NO: 546695 - DNA, 247 bp, Homo sapiens
  misc_feature (4)..(5): n is a, c, g, or t
tgannatccttcacatgcaccacatcaaaagaaccaggatgtcattccctgttgatgatcacaccaacacgaccgaggttggctccagcaatcaccatacacaaattgcctgtatcaaatttgataacgttgattatcttgccagtccctaactcaatctgcacagtatcgttcaccttaatgacaggatctgggtagcggatggtacgagcatcatgagtcaccaggtaaggaattcccttcacta

SEQ ID NO: 546696 - DNA, 428 bp, Homo sapiens
gacgaatcgttccgagtggaataggagggaatcgtattcgagtggaatggaaaggaatggaatcaaccagagtggaatggaagggaatggaatggaatggaaactaatagaatggaatcaacccgagtggaatggaatggaaaggactggaatggaatggaatggaatggaatcaactcaattgtaatggaatggaatggaatggaatggaatggaatggaatggaatggaattaacccgaatacaatggaatggaatggaatggaacggaatggaatggaagggaatggaatcaacacgagtgcagggcaatggaatggaatggaatgcaatggaatggaatcatccggaatggaatggaatggaatggaatcaactccattgcaatggaatggaatggaatggaatggaatagaatggaatggaat

SEQ ID NO: 546697 - DNA, 870 bp, Homo sapiens
  misc_feature (861)..(861): n is a, c, g, or t
agagaagagggagaaggcgaaggttaagaagccagagagcaagccaatacaaaagaccccatccttttcctccctcctcccctgtggctggcaccagaaagccccattttctcgctcacacattagagcacaaacaacaaccctggcgcgccgggggcaagcctaaggcagacttcggtaacccaacccggaacactccggtactgtcttccaagggactggccggccctggggcgatccaactcgaagccccccggaaggggcgacggagggtttggggtatgaacgtggcgggccttaatttagttacattcaaataaaacttttcgtggcaactcgggtagctaacattggtgtggtatgcctttttttttttttttttatttttttttcctggttacgccggtccatggcagggctaaaatactatttacaattatagaaaaataaaagattccaaaagcattaacactggaactttactggctttgggtatatattgcacactcccattggattaacatcatattgcataactacttggtattttggaaagtaaggaccaatagaacaattactggagtctccgggttaacctaattgttgtgatcccggggctattggggcctgaggcgctggaggatctctctgtgacctggaaacacttttcagcctaggttcctatcgtgaaggaccttctcactaagatccaatcacggtgtggagctaatattagccataacgcaaaccataatcaggatactagattgtgtccactgatgcgcaatgataactggcggcacatgaggcaaccgaatgcggtacgccggaggtcaccgctggtctcgttcgagtttttcntgtggggtg

SEQ ID NO: 546698 - DNA, 942 bp, Homo sapiens
cgcggacgaaaggtacgtgactcctgcggctctcgcattgcctctgctatcgcttccggaaacatggccctccgatgtggctgtctctgatggtgtcatcaacgggttcaacgacatgaaggtgcgtaagtcttcaatcagccagagagagagtgaagaagcagcacaagcaaggacggtgcacttctgcctgagtgagcgacaagaagaacatcatcctgcaggagggcaaggagatcctggtggtcgatgtggtccagacatgtcgacgacgcctacgccatctattgtcaaggatgctggcagcataaggactgcctgcatactgccctctatgatgcaatactatgagaaccaatggtagcagacaagcaacgatagatctggtgtttatcttcatggagcccccggagtctgcgcccccttaggagagtcaaaaatgagttaatgtgccaagtctccaaggaacgccatcaagaagaatctgacatgggatcaacgcatgagatttggccagcaaatgtgctagctacgcggaggtcaagggatcgctgcacgcctggcagaccaacagctggtggtggcagtgccgacatctccctggagggcaaggcgctgtgtagagcaccttctgggccgctgacctggagcagttctggcaagacgccaacaacattgccccattgcggtggttggcaagtgcatgcccccctttacctggtcatacccggaaggggctgggtggtgattcctagtagggggcgcggcaatcccctttcatccaacgatggccaaaaagaaaccacaagcacctgagattacctttctcccttccatccctagaacagatctggcttgcccaaaatggtttagcattagattcttctagatagagcataaattttcccaagacccagttgggcgcttaatttaaaaacatcc

SEQ ID NO: 546699 - DNA, 811 bp, Homo sapiens
  misc_feature (184)..(184): n is a, c, g, or t
  misc_feature (701)..(701): n is a, c, g, or t
  misc_feature (742)..(742): n is a, c, g, or t
ggccatatatggcccgggagaacctcatagtgagatcgaactgcaacagcaccatatcttcgaacttgataatcatgccgaccctcgatgaagggataggcgggccaaattttcttgcagggagcaaggcggccctctccgaaggagaccaaaaaaagaattatattaaggtggcaaaacggcnggtacgtcgcgcggcgcgcagggcaaaagacttgtgacacaggataacctaaagagaactgatttgacacatggaacaacgtgaagcagggtgaaacttgttaagcgaggcgagacaccctgtccaataggcattgtggacataacaaaaaactattgggccttaatgatatgtaccaacatgtgggtcgggagcgcaacttatgcatagaaggcatgaataggtttgcatgcaggaaaataaaattgaatgccgcgaaacccatttgaaaaaccacaagaaaccacgggggtgtccgaaaaagacgaggcccttggcattaacaaacacgggaaaatataccccgagtgggaaggggaatggaaagcaatttgcgttaatcaagggaacaccgaaaccgggaaattgagcactccgcgttggcgctaccggaacaaaaattaagggggggagcaatatcactccgaggcgggcccggatacccgaaaagcctttttgggacacaaggtccaattcnacaccagtaatacacaatgcttttacacatttgcggcagcngacacattgtttgaaaagacttcgaaaccagagggggtagacaaacccggggcattcaccgaaatacaa

SEQ ID NO: 546700 - DNA, 137 bp, Homo sapiens
ggtcggtcccgccttcaggaacatactcggaatcggtcgagcctcaatgagccgaagtaagcgggcgcgatcatcagcatcaggtttgcgccgtcagcagcggatagtcgcggatgacgccgttgttgcacgaacag

SEQ ID NO: 546701 - DNA, 1140 bp, Homo sapiens
ttgctgccagcggcgtgacgcttcggactcgcctattgttatcaatcatggctccactcgtgccggacgacagggagacaggcgagcacgcgtgtcccgcaaaccgtataccatcggacaggatatctccgactcagcccaatagtgggagggctagttgcactatagctgtatttagatgaaagagctattgaagctttaagacaggaattcgacatgaagacggtgcattggccagtgtcttcgaaccaggtttgaaagagcagctgatctctctcgatgtttcagaaccaacaagtgccttaggatgtggcagtcgtgcatggacttacaaggcagcagagtaaaaacgaaggtgagcaatagtagcaagatgtctcagataaaggccccagcatgcaggcaaataaattacaggccactcttatggcgatcgaactagtgctatacattttgagtgtgaccaactggagcagcaggacagtatggacggagcaccatccagtattaccgatattcttcaggatcagccacagccttctgtaggccctgacgatatcggtgggaaaagatcccaaggagcatctatttgaggatgaactagttgccattatttgagaatagctggaactatatggggatcttcgtactaatgatggatccacatcaaatggtgctcaatagaggtatatgcgttagtccactttatgtacaatgcagaagcagcaacaaggaggactgataaacattgtactaataaatcatgaaatcgtgctgggaaaccatattggagtctggatctcagttgcaagaaataggttatggggggactattcctaagagtaaaccaagggaaagattcttgaagacatacggcaagtaaacaaagggtttatagaacgtatatatatcaacaaactgcatacagaaaacaaacgccgggatgaacactgacatgagaacccagaacaggggccaggcaagagaagacagagaggcccacagagaggaaaaggaacagaaaggccacccgcaacaccagaaggaacaacaaggggagacaacgacaagccaacgaaaagaagacacaaaaaaacgcaagaacacacaaaagcagcaacccacagccgcccacccgct

SEQ ID NO: 546702 - DNA, 742 bp, Homo sapiens
ctgatgatgttctcgtcggctggctctgggtgcccggtgagccagagtaagcctccaagaaggaggagagatgagagaaagtgcggctcttcccgtgccctaccagatgcttctggtgggcccaccttgtgagctccgcggccggccctcactgtgaacttgcgtcccacgctgtggagtggctgtcctgacctgtggcgggcacgctgtgcccgctgctgaccctgtgacgtcgcctgctgcagcccctgtgttccccaatggcagagtgaaataccctggtggagccctccttccatagaaccagagatggcatcttgttggatttcaaggacctattcgtggcatcagtgccctgcacgagctgcctgaggtggaggtttagtacaatagtctactacaacccactcattggaattaacgcggcgcgcaggtatgctagtcccgtccttagtaacattggaggcacaggacaaacacttgggtacttgcgaaattgcgccaatcggctagctctccataggtacaaaggaaatcgctatgaagttagaggtataattcggcacactcggtacgccgtttaccaaggacggagctatccccaagaatacacacggctgggattaaggagctgcccgcaagccccttgatatccaatggagtgaaaggcccatgaagcccaaaggccccatgaactcaacgggatcccattgctcgtacactctagtggcattcagatgca

SEQ ID NO: 546703 - DNA, 826 bp, Homo sapiens
tctgggactggcttttgctttaggatggtgttggaagttgtcgttgtctgctatgaacctggtccactgtaagggtgtcgggatctgaagagctatgtgtgaaacacactgaagcattgcaagggatgtggggtggtaagtatcaaaaagcgcggacaagggaaaagccgatcaaagagaagtgacaatgggccaatgtgagcccccatgtaaggtcagctgcccaagacaaggactgcccctggcactgtctgccctggtttgtcttcaaccaccttactcctccaacggccgatgaacacctggatgaacgacaagcatttcgttgggtggctctgtattgactacaccgcgtatgaatgatcgggacctgcagatgcttgaagggggatgaagctacaggtcctgaaatggaactggagactggtgtgctggcaggtcactcgtcacaggaagagaagctatgtgcccagcaactttgtggccgagtggagagcctggaaattgtgaaagggtggtctttagaatcacagggtcggaactgaggcttgagagtgcaagcttcttgctccaagtcaacaaggctgggtcctttcttatcacagagagaggtgaaccaacaaggtgccttcttccctgtctgtgcagggtgttacaccagtgggagctggtcacgccctaatacgatccgctcctggttagtgggttactctcccccgggtcactccgctgcgccgggctgtgggcatctagacgggtggtatcagttgctctttgttcgccctacctggcgtttggccgagcccggcgccgtgcaccacgtgta

SEQ ID NO: 546704 - DNA, 334 bp, Homo sapiens
gcatcgaatcatcacctctacagctatagatctcgtgggttaagcgcagtctagatagatccaactgagtatgagtcggcctgtcgtcgtactaattggccagccaactcgccaaacgtctctaaaagatgtagacaacaacaacaaaaaaaacctaataacaacacagcaacatatggcttccatgtgtaattatacatatcacatctctatacagtcatcagtctacacttagtgacattttaaatcaattatttaaaaccttcctttcccctcctttgccaaaaaaaggggggaggggtatcaaatacaacgcaccttcatgaggacttac

SEQ ID NO: 546705 - DNA, 279 bp, Homo sapiens
taatccactggagattactatcaggctaacttctttgtagctctcagtatagaactatttctgagtatatgtgtacctcatacaaatctccatcaattaagaagttggttgttctacactagcattttaaaaatagtctgtatttatatcttatgtataattgtacagtgaagtatagtactgtggagctgggtgcagtgttcattgcctgtagtctctcagctagtaggtaggctggtgccacccttgttgattactgcttggacccaacttgaaaaa

SEQ ID NO: 546706 - DNA, 306 bp, Homo sapiens
  misc_feature (4)..(4): n is a, c, g, or t
  misc_feature (81)..(81): n is a, c, g, or t
  misc_feature (93)..(93): n is a, c, g, or t
  misc_feature (143)..(143): n is a, c, g, or t
  misc_feature (172)..(172): n is a, c, g, or t
  misc_feature (255)..(255): n is a, c, g, or t
aaangggagaggggactgcaccgagccatcttttccgcctcgcccctttggggagagggccggggtgaggggcaatatgtnatccagcttaantttcccgcactccctcttcccttccgatttacctctccttgttctgcgtnatagtatgatcgttaaataaacgaacgcngttctataatgtagaacaaaatgattcagcaaggagatctcatgccgcagtccgcgttgttcacgggaatcattccccctgtntccaccatttttaccgccgacggccagctcgataagccgggcaccgccgcg

SEQ ID NO: 546707 - DNA, 167 bp, Homo sapiens
ggtttacaggcatgagccatcactcttgacttgtgaggctattttaaattgagacttgaaatataagtagctgttgacccaggcaaggtgcattaaagccctgcaggttaggagtgaacacgtgtgaaaagccagagtgactgtagcataatgaatagggaggatgg

SEQ ID NO: 546708 - DNA, 899 bp, Homo sapiens
  misc_feature (1)..(1): n is a, c, g, or t
  misc_feature (137)..(137): n is a, c, g, or t
  misc_feature (143)..(143): n is a, c, g, or t
  misc_feature (159)..(159): n is a, c, g, or t
  misc_feature (193)..(193): n is a, c, g, or t
  misc_feature (219)..(219): n is a, c, g, or t
  misc_feature (263)..(263): n is a, c, g, or t
  misc_feature (277)..(277): n is a, c, g, or t
  misc_feature (286)..(286): n is a, c, g, or t
  misc_feature (675)..(675): n is a, c, g, or t
  misc_feature (681)..(682): n is a, c, g, or t
  misc_feature (686)..(686): n is a, c, g, or t
  misc_feature (688)..(689): n is a, c, g, or t
  misc_feature (693)..(693): n is a, c, g, or t
  misc_feature (700)..(700): n is a, c, g, or t
  misc_feature (703)..(703): n is a, c, g, or t
  misc_feature (710)..(710): n is a, c, g, or t
  misc_feature (712)..(712): n is a, c, g, or t
  misc_feature (755)..(755): n is a, c, g, or t
  misc_feature (781)..(781): n is a, c, g, or t
  misc_feature (783)..(783): n is a, c, g, or t
  misc_feature (786)..(786): n is a, c, g, or t
  misc_feature (794)..(794): n is a, c, g, or t
  misc_feature (813)..(814): n is a, c, g, or t
  misc_feature (819)..(819): n is a, c, g, or t
  misc_feature (821)..(821): n is a, c, g, or t
  misc_feature (836)..(836): n is a, c, g, or t
  misc_feature (854)..(854): n is a, c, g, or t
ncaggagaatcctgacctttcctccctcatttccttttggcaacagcacatatatttgaaaggtttcgtgacttccataccacacctgggtcaaattatctattaagatttatgtattcacgtgggcaccatcaganagatanattccaggtgtcaganagaaagtacaatcttgatcatatcttcatccaanattcatcaaccgttccagtgagaganaccatgctaggggataattgtttagagaacattcaattcatgcntaatgtaagaaacnctaattganacttctgaattaagcagacttctgagagtgcatacagatgatctcatgtggtacctacagaaataattctactgaactaaactttgatatcttgccatcagcctatattgaaggaagccattaaaaacagctatgaaactcgtcattggttacaaagtggatgttgataaagctgagcaaatgattttgctttgtacaaatctttaggaatactatcaagatacagatactatctttatatttgataattaatattatcattatatatgattaatagaactttaagatgttatagttatgagtacaatctattaagtataaaaatctatcataataaatatgtcacattatatataataaatataagtatgtactatataataaaattntataanntatntnntctnttatatngtnaaatgtnanggttaatgttattaattcaaggctacatttatttctctagagnaataattcttttttatgatatagaantnggnattatggnactatcctgtgttcttttnncagtntnctagatagcttagancaggatgattatgaaatnatatatacatgaccaattcacactgagcagcttctatatattgaa

SEQ ID NO: 546709 - DNA, 982 bp, Homo sapiens
cattaagacagtatggtctcctgaactgttatgaatctaaaaacatggtctatcctaatggtgaccgctagtgaagcgattgagaaattgttacgaaattgtgagcaatcttgttattcaggtgtagaagagcactaagatatctcataaatatgcaagctcagaatgtagaagatagtaagggaagatactcggagaacgttgatgattcatgtagttataagtattaatttttagaaagacgatactctagagggataaatattctattgaacctcgcaaggaactatatacttttctatgttgaattccattcattctcagcagctttagtaagaagatgtagcagtatatcccatagtgcattcttataaacagttattaaaccgctttcactaattctgaactgggcgagtataggaaagaaagactatggttcatattatactttggaacatagatgggaaattcttttgataaatatactcagctgaattgaaatccaagctagcatatctttgagcgtaattgctatgattgacttagtgttgtatgagtgctaagatacttcagagattacgagaatgactaaaagttcggcatgtagcaggttcataccgatgaccatagtcatatatttcaccttagggctaaatagagcatgcagtcccattgagcctcttgtgatccttacgagtattttcaaacttacgtagcaacctcttcggacgcatgataagtgtcacgcaatatgcgatacctgccataatccccgagacaagtgtcttttcaagacgtgtcttgaaaatgcctaggaagtattacgttacgtaccacacgcaaaagcacccaaggacatattgaatcggatactccttgtggcaatcaccctagtgaacccccagtggagaccggctaactccgcgcattagccatttctcgcctgtccgccaaactgcgaaatacccaaaccaaaaaaccc

SEQ ID NO: 546710 - DNA, 393 bp, Homo sapiens
agccggctccaaaaaacgaggacaataatatctacctcaaacactgttgggtaggaaaggggtttgtaaacaagtaacacaaaatagatacattagcgtctgggtcagatggctcacgctctattatctgctgatggctcacgccctgttatcccaagtgctctgggaaggttgaggcaggcgtatcactatgattgagctcagaacgtttgagaccaatctaggcaacatggtaaaaccccatgtttactaaacatactaaaattagcccacacatggtggcacacacctgtgttcctagctactccggaggctgaggcgagacaatcaccctagcttaggatgtcaatgctggagaccggctaggaataattgaattggaccgcggttcta

SEQ ID NO: 546711 - DNA, 158 bp, Homo sapiens
  misc_feature (2)..(2): n is a, c, g, or t
  misc_feature (114)..(114): n is a, c, g, or t
gngtgcgcccgggccgcggatccccaagcccgccacgccgcccagcccggccccgcccgcgccggaagagccacgccggccctgggcagtgacggggttcgggtgaccatgganagtgcgctcaccgcccgtgaccgggtgggggtgcaggatttcgt

SEQ ID NO: 546712 - DNA, 302 bp, Homo sapiens
gagcccagtatggggtgcattcagggtagatcaggaggtatgagtgggcagtgggcgagccatgctgggtgttgcgtgaccagaacacttttgcctccaaaagctggcgcgtgagaccccggctatccgccaccaagatgagttgcggtctttaggggcgttgtccccacctttgcaccccatagttctttccattcaccttttttcctgcttgcagacatgcacctagatgggcatagggatggggtgagttcgagggagagtgaggtggtatcctgttctgtttaacctgctgattttct

SEQ ID NO: 546713 - DNA, 940 bp, Homo sapiens
  misc_feature (262)..(262): n is a, c, g, or t
  misc_feature (265)..(265): n is a, c, g, or t
  misc_feature (290)..(290): n is a, c, g, or t
  misc_feature (303)..(305): n is a, c, g, or t
  misc_feature (310)..(310): n is a, c, g, or t
  misc_feature (334)..(334): n is a, c, g, or t
  misc_feature (336)..(336): n is a, c, g, or t
  misc_feature (338)..(339): n is a, c, g, or t
  misc_feature (346)..(346): n is a, c, g, or t
  misc_feature (364)..(364): n is a, c, g, or t
  misc_feature (366)..(366): n is a, c, g, or t
  misc_feature (381)..(381): n is a, c, g, or t
  misc_feature (397)..(397): n is a, c, g, or t
  misc_feature (403)..(404): n is a, c, g, or t
  misc_feature (425)..(425): n is a, c, g, or t
  misc_feature (431)..(431): n is a, c, g, or t
  misc_feature (434)..(434): n is a, c, g, or t
  misc_feature (457)..(457): n is a, c, g, or t
  misc_feature (471)..(471): n is a, c, g, or t
  misc_feature (479)..(480): n is a, c, g, or t
  misc_feature (489)..(489): n is a, c, g, or t
  misc_feature (495)..(495): n is a, c, g, or t
  misc_feature (501)..(501): n is a, c, g, or t
  misc_feature (507)..(507): n is a, c, g, or t
  misc_feature (518)..(518): n is a, c, g, or t
tagacaaagatgaattcgcccctggatcctccctcaagattatgatcacgcacaggctgagaccaggcatctgctatatgaatcagacagaaacaaggatgagaagcttactaaagagcaaatattggagaactggaacatgtttgttggaacccaagctacccattacggggaagatctcaccacaactcatgatgagctttgatagacactcaccagaatatggcagactgtcataggcattctgttattgtcttggatngtngctacaattgtctaatttacagcanttgtgatcccacnnnaagcnagtttatacctcagatggggtatnananntgttttncgctcagtatttactgcnanaatggacatcactantctttcagtaagattnctctcnnaacacgtgaaaaccttggtanattgcnatnctttctggggatatatggtacancatgacttaaaacntttttttnntctattaanacttanaggggnacaaanattgaaaaagncgttcttcagaaggtgagtgggttgcgggaggcagtattatgaagtgactgctgtgtattttaactaccagatttttgatatttggccactgttaaatagtcggacaaggggaagattcggattaggcgaaagttggtatcatcctaggtaagcttatggtcagaccagtctaatatttcagattgcttcactttacagacttatactctgagttgtgacttactgtaagttgggtgtttatgaaacctcccatgcatttccagtatggatctgctgagtatgcacagtaaatcccatgtcttcgttgtttcccatttaccaagcatcaagaagggactctctggaacacaccgacggtttcgaggtggcaaagatgcatgtcgctttgacaactcttgttaatgttaccttatttcctgga

SEQ ID NO: 546714 - DNA, 151 bp, Homo sapiens
gtaactcttcatgcataaactgaaagagccatgctgtctagtctgagtcctcatttaacagaggtcaagcaataggcgcctggcagtgtcaagcctgaaaccagcataccctcatgtttcagccagcccaggccctagttacaacactttg

SEQ ID NO: 546715 - DNA, 766 bp, Homo sapiens
gcagacagtgattaccgggcaatgtgcataggagaaagcagaaggagtggtaggcccaattcttcattgtgtagtctccatgtgcacagcagcagcctcacaagaagaggaacagtggtccctttgtagtgtcacttgaggggtcttcaccctaaaccatcttcccaaataacttcctcagatgccggaaattttatttcaacacaaatagccctggaagaaattctatgctgatgtcttttaggtagaaagactcacagccgtggcagtagataagggttctaatataggtgtcattaccactttctagctgcacaatctagggcaagttaaccaacactttcaaccttagtgctttggatgtttctaaatccataaaatagagatttgaagtcctacctctcaaagtcctctcaaagtcattgcaaggtttacactagacaccatatgcaaagggttacaaagttggtgcttaaggaaaagaaagggggcatgagtggggagatgacaattagcttagctttgatggtcaagcctcccatgattagattcatcaaattcaaatctggaattctgtgtaatttttgcacaagcacgtaccttctctgtgctttgttcttcatctgtgaataggactactatggtacatttctgaaacttattatataggggcagcatatcataaggccatggcaaaatttgggccaagaaaatgagcccttgagagaaggcgcgggttagttttccggaacagggggttcccaaa

SEQ ID NO: 546716 - DNA, 197 bp, Homo sapiens
  misc_feature (72)..(72): n is a, c, g, or t
gtaatgagttcttaaatggccatgtaagaagtatgctgggggcgtggctgagtacagagcctcagagggtanagacagtggaggtccttttataggagatgtggacataccatccgagacatctaggggggatcgctctacgtgtacctatgtgggagcagttatctcaagagttgagcaaggagcaacagtctgag

SEQ ID NO: 546717 - DNA, 794 bp, Homo sapiens
taaaaatcaaaccctttttttaaattttctttttataaaaaaccttatacaaaacttttcccccccccaaaattgtgtgggaagcgagtgaccaaagcgcggtgtaaatcctatttaccctctcgtaagcggggattcagtatctcctctatcaacaccctcaacaatattgtctgaagagacccaccagcaagcgacaccccacacacgcgtggggcaacaaaagtcaccacgcgcggtgtgagtgggacccaccagctgcggcgatctttgagcacaacagagagtgtgtggtacgagaccgcgcacagactcttctctctaagcacagcgacgaggacagccctctaagacgcacgcagaggagagagacagagagacgagcacacacccccgagaagagatgtgaggacaccacgcggcgatgcatcacttatagaagagatgatctctcctagacaaaacaccatcatcagccgcggagatgtgcagaacaagcaggggggcgcacaacaaaccaggaagacgcgctgcgggtggcgcggcctacaaccacaatgtgtggaagagagagcagacaacacagatgtgcgcgggtgtctcctcgtatcaccacttctctctccttctctctctcccgagaggagacacagagagggcgtgatacaaacaaagagttgcgacgagggagcccgaccaacaatctccagaagagcggcgagtgtgtaggtgcagacgcgcgtatgctaccacctttcagagcgagggactatctgcggagagagagagtaata

SEQ ID NO: 546718 - DNA, 147 bp, Homo sapiens
  misc_feature (18)..(18): n is a, c, g, or t
ttagaggatcccctacangccaaggcgattcttcatcttggtcagcaccatggacgagatctcctcggggtagaatgccttggtcctccccgcttgtatgctcaccgtgcaccttgtgccttgtctccgtctgttgatcaccgtgga

SEQ ID NO: 546719 - DNA, 432 bp, Homo sapiens
ccgtatgggtctcagaagaattaatctattcacgctcgtaggaattctataatccacatctctgatcagacctaaactccaaagacccattgtgtttatcatagatcttccatctatgagtgtgatagctagtcagtcctttataatgcataaaccccatttattaaccctacatcctcaagtaagcaggcctgttttcagaactaaacagctgtcctcttacatcagaacatcttagttatctgacagaccattcatcacaagtgtttcctaattttcttctgagaacatcaccaatcccactaatgcaaactctgaacattacttcagtcaaatttcgctaaatgctatagctttcttcaaatgaaaattagccagaataatatctttgaacagattttttttttcattgtggattccaggatactttta

SEQ ID NO: 546720 - DNA, 161 bp, Homo sapiens
  misc_feature (3)..(3): n is a, c, g, or t
ggncgtgttccgtaggctgaggatccggaattgcggtgacattttccttgggctcatggccacggctccgatctggcattgctgcctttctatggtctgaagtcatgttctcatgccagcccctgggaggctgcgagggttaatatccccttcgcgcagac

SEQ ID NO: 546721 - DNA, 136 bp, Homo sapiens
  misc_feature (11)..(11): n is a, c, g, or t
agggcacaatntacacagctagtggtatggctgacagtggtgcttcaggaagcacttctgtcctccagctcagcttccctgggcataccaagatctacagaaaaaggatgtatgcgtgcatgtcctggacgctacc

SEQ ID NO: 546722 - DNA, 355 bp, Homo sapiens
ggcaaaacgcatccatttctctcaggctcgtgttgtgcacaccagtcagccatttcacaataggttcctcaaatggttgcagttaactcatcagcaacacatgttttggcaaatccagtcactccattcactaatttcacatgttcttcaaatgaccactcctgaagatactaagcaagcgcactcaacaccaaggctttgaaattttcttctcccaaacctttaaacctataagcaccttcattcgtgtgtgcatctccacgaaacacacctgtgaataacgccgagctagagagaaagaggagggatatagagtgttacacttctcagtgtgacaaacgcgtgtggggttccc

SEQ ID NO: 546723 - DNA, 339 bp, Homo sapiens
  misc_feature (2)..(2): n is a, c, g, or t
  misc_feature (86)..(86): n is a, c, g, or t
  misc_feature (169)..(169): n is a, c, g, or t
  misc_feature (172)..(172): n is a, c, g, or t
  misc_feature (176)..(177): n is a, c, g, or t
  misc_feature (185)..(185): n is a, c, g, or t
  misc_feature (199)..(200): n is a, c, g, or t
  misc_feature (239)..(239): n is a, c, g, or t
  misc_feature (291)..(291): n is a, c, g, or t
  misc_feature (294)..(294): n is a, c, g, or t
  misc_feature (298)..(299): n is a, c, g, or t
  misc_feature (301)..(301): n is a, c, g, or t
  misc_feature (303)..(305): n is a, c, g, or t
  misc_feature (307)..(307): n is a, c, g, or t
  misc_feature (310)..(310): n is a, c, g, or t
  misc_feature (315)..(319): n is a, c, g, or t
  misc_feature (326)..(326): n is a, c, g, or t
  misc_feature (328)..(328): n is a, c, g, or t
  misc_feature (337)..(337): n is a, c, g, or t
anatatttaaaaatcgacattataacattaaacatattttatttttatttatcaatgataccttaataaagctaaggccgaaggcnagtatttctctaactatctttacaaaatacaattcatccattaacaaatcacagtaaattaggaagaataaaacttacatttnggnaaanncctatgcnatatttctgagagnntcttccaaatcctattaaaaacatctttaaatatatttntctcagcttcttcccttatattttttatttttttcatcatattttaattttngtnattnnantnnntnctncttgnnnnnctcgggntncgggttggngg

SEQ ID NO: 546724 - DNA, 257 bp, Homo sapiens
gttatcagacgactcgtatatcagtacatgctgagtccactaccgtcctgtgtgtgatatttgttcccctacaaacgtagcacccttcagcaggaccctataaaactttcctccagcccttgcctctttgcaggtagccccttctctgctgagctgcccactgcaacatattttcacaatttctctaataaatctgcccttctttacctacaactatcttggtaaatggctttaccacctgcaaaactgaccctagg

SEQ ID NO: 546725 - DNA, 159 bp, Homo sapiens
actaaccaaaagatacagtgatatagccatgtactgtgtgagtgggacagatacagtctcctggcctataatgagaccactaggactttatacagttttccttaattggttgacatataaatggtaaattatatttaggcttatcctgtattgaaatga

SEQ ID NO: 546726 - DNA, 302 bp, Homo sapiens
aattcaagcctggtgcattactgggccaaacagtgcatttcctacaacaagtgaaatagggctgggcacgtggatcacgaggtcaagagatcaagaccatcctggccaacatggtgaaaccccgtctttactaaaaatacaaaaattagctgggcgtggtggcacgcacctgtagtcccagctacttggaaggctgaggcaggagaattgcttgaacccaggaggcggaggttgcagtgaactgagattgcgccattgcactccagcctgggcaacagagcgagattccgtctcaaaaaaaa

SEQ ID NO: 546727 - DNA, 889 bp, Homo sapiens
  misc_feature (219)..(219): n is a, c, g, or t
ttctctcgccacggggacttgggtagcgcgtcgtagttggcgcggtgaacgtgcgcgtgttgtcgcgcggtccattatcaaggccccctgtgaaacttgaccggggggtccccgggactccgtgggccaccggcccgcttttgcgaaactggacccctctcggccagcgcccggaccccggcttatttccccggagcgtgtccccaataatggacgtgnaaaaagctcgggggtacaccacttcgcgcgttcgtacttggaccgcaccccccccttcgctgtatgtattgccgcgcacacctctttcgggcgactgccgtggcccacacaacggcttttcttcaaggagcccccagaaaaatggcgttattctggactcttaacacctctcaagtttctcccccgatcgtttggggcattcctcccttgtaacgccgtgccaccatttcacaaacaaaattgcgagggcacacttccgctaaagcacattacgcccgccgtcctaaatatgcgcctgcccgcaaagtcactaattccagccatggtttctcccgcatgaacctttcccctttgctgacgcactatctagcgctttgtcgacaaaactccgttctcttctaggcgagtatatcaagggtcgaaattttgatacgacgtctttacaggcgtctcaagatggacaggccgcccccattggggggccgacatcaatgcctgttcaggtggatggctcagtcccacgaggaacgcgcagtcccatagacgccccttatctcaacaattggtgtgacccggaataatgcaaaaaatttaagctggcgaacccctggaaagcagaccctttaatgcatcgcttataaaataaacaaccccccacgcccccccgaca

SEQ ID NO: 546728 - DNA, 401 bp, Homo sapiens
  misc_feature (6)..(6): n is a, c, g, or t
  misc_feature (15)..(15): n is a, c, g, or t
  misc_feature (47)..(47): n is a, c, g, or t
ataaanccccacatncttatggcccacctcactttcaacaaaggccntcaagaaccatacattggcaaaaggatagtcctctttaataaatgcctgcctaggaaaacctagccatatgtagaagaatgaaattccccgtctctcacccatatacaaaaatcaaccctaaatgtggctgggcatggtgactcatgcctgtaatcccagcactttgggaagtcaaggcgggcggatcacctgagatcaagagttcaagactagctgggcgaacatggtgaaacatggtggcacacacctgtaatctcagatacttgggaggctgaagcaggagaatcacttgaacccaggaggcagagtttgcagtgagctgagaacacaccattgcgctccagtcggtgtga

SEQ ID NO: 546729 - DNA, 481 bp, Homo sapiens
gtcgacaccaaaaacattagacagagctgggtgtggtggctcatgcttgtaatcccagcactttgggaggccaaggcaggtggatcacctgaggccaggagtttgagaccagactggccatcatggcaaaaccccgtctctactgaaaatacaaaaatcagctgggcatgatggtgtgtgcctataatcccagctactcaggaggctgagacaggacaatcgcttgagcccaggaggtggaggttgcagtgagctgagattgcaccattgcactccagcctgggtgacagagtgagactccgtctcaaaaaataaacaaaaaaaaagctctttaaaggaaacgtgcccggcacggtggctcacgcctgtaatcctagcactttgggaggctgaggcaggtggatcacctgaggtccggagttcgagaccagcctgaccaacatggagaaaccccgtctctactaaaaatacaaaaattagc

SEQ ID NO: 546730 - DNA, 92 bp, Homo sapiens
cgctcccaacagtgtatttatgggtgtcatattatacaatatttcaatggtgacttcacatagaaaacattcaattataatgtttgactatt

SEQ ID NO: 546731 - DNA, 197 bp, Homo sapiens
acctggcgtctagggcatcagtttcatcacaacaattatcattatgaaaccccctaccataacccactaccaaacgcccctcttcgtctgatccgtcctagtcacagcattcctacttctcctatctctcccagtcctagctgctgccttcattatactactaacagaccgcaacctcaacaccaccttcttcgacc

SEQ ID NO: 546732 - DNA, 203 bp, Homo sapiens
aaaagttccctaaatggttacgtattatcaagacggataagtatatatcatgtatatctaatatccatacgagttatgatgtgtaagtctaatatacgtgagctaggtagtctacggggtctagtatcttatgaaagggcagaggcatcttgagagcaaggcacaagatatgtgatagcgggtacgagctcgaatcgaatcat

SEQ ID NO: 546733 - DNA, 287 bp, Homo sapiens
gtaaaaattttccaaaaaccctgaatttttaaccctgttatatttcagaaaaagggggggctttttcttttcaggtctttgatcgggttttattccggtaattcaccccccctattttggtagggggggggaaaaaaatggggtttttgtccaaacatgtttcccagtgggttgttattttggaaaaaatgaggggagggagtttggcaaaaatggagaaaatgaatgaagaaggcctaatttctttttttttcagtgaataaatggaaccccatttttggatttta

SEQ ID NO: 546734 - DNA, 294 bp, Homo sapiens
aaactctagacgtgacagacacgaaattcagccctctctttagtttatgaaaatttttttccatatcactttaatcattacctcttccgtcttttctctttctcctttctggaactcttcttacgactgtatgttaggtttccttgatccattcaaggctcttctcttttcctatcacgactttcatcgttttgtatttttacttcgtgctttgaaatttcattaacttgatcttttataccgccagttagcatcgatcttctacttgacctaccgaattattcagcttgagaa

SEQ ID NO: 546735 - DNA, 183 bp, Homo sapiens
ggaaggaggggggcctttgcccaattaagggcggggtttggggggggcccaacccgggcttaaaaagggccagggcgccggaccctggaattccgggggggaattggaaaatttttttttttttttccctttaggtttggggaattttttggttttttcccccggaagggcccccccttttta

SEQ ID NO: 546736 - DNA, 445 bp, Homo sapiens
ttgctgcctgactggtctgactctaaggatccccaaggactctggtacacaggggctgtgatgggtatgatagtgtggttggagacacggatttcttcctgaacaaagtctcctccacctacatagtgaacatggtatgatacggtgcttcagtattcttcctcttgaacccccgatggctgcctgccgccgtcatgtaggacaggatgtccatcttgtaagttactgaccgtggaccggtgtgtgccatcgcatgatgtgtataccatctggtcccaccaggaacttctccaagtttcagcggatttcgttggatcgtacatagccttttccgagaagaggcggtcagatgtacccaggagctccgaggtgggaggacaggagttctttaggaaagtgtcgaatttctgctctttctctccattgacatccccttttccagagc

SEQ ID NO: 546737 - DNA, 1763 bp, Homo sapiens
gtcgcacgtggctggctgacgcggcccgtcacgctggatcatcctggcgtccgcactccgacgagctgggttatcaggctcgacgcgaggcgatgatcgaaaccctcgccgacgcgttggaggctcacgtcgatgtcgatcggatactgcacctggcgcgttgatctgttggttgaggatcttttcctacttggccatcttgttctcagatgacctggtccatgctgtgagcgtgcaagaacagcacggcggccaaagagacccggtattcggtgcggcgatgtgttcctcgctaccgcagcattaggtgtgtgtgatgtctcgtctcagctatgctcgatatgcgatcgagcgatgagcaatccggtgagattccggagcggtcccgccactgtgagacacccccatgcggtgcagccagacgctctgcccgattcctgccgaacagaccgtcaggcgagggtacctgaggagaaccacatgaacgatgccacgtcacgcacccttttcggagtgggggtcggcccgggtgacccggaactggtcaccgtgaaaaccgtacgcatcttgcgcgaggcagacgtgatcctcgttccctacaccgaggccaccactgatggtccggggcgtgccgagagcatcatcacggctgtcgttcccgaaatcaccgggcgtatcagacgcatccccttctcaatgcgggagaggtccggtgtcggtgaaaagcgcaaggcctcctggcaggtctcctccgacgccgtggtgacagccttcgatgagggagcccgtaccgtcgccctcgccaccgtcggtgatccgactgttttctctaccttcacctatctgcgtgccaacgtcgaggagaggctgcccgacgtcaccgtcgagttgagccctggcattaccgccatgcaggccctatcggctgcgtccgggcgtccactcgtcgagggcaaggagatcctggccctcgtcccggctaccgtcggcatcaacaagcttgggcaggtcctcgacctcgttgactcggttgcgatctacaagggcggacgtaaactccccgacgtcgtcgagcagttgcgcagccgggaccgtcaggctgtcatcggcaccgacgtcaccttgacatctgagcagatcatcacccttgacgaggtggctgacgcgcagactctgccgtatttctcgaccgtcttgaccactccggagcgcaccaccacaggagggaaactgtgaacgaacctcaggccgcacgacccacccagcatgtgtctgagaaggctctggaggatttagaccacaacgccatcgagccgccgccggtgtcccgtcatgacatccccgaaggagctggcaaggtcgttttcgttggagctggtccgggtgccccagacttggtgagtgtgcgtggtgctcggattattgagaccgccgacatcatcatctgggcttccagcctggtacatcccgacatggttgcccgtcacaaggagggcgctgagcttatcgattccgcctccatccccttggaggaccttgaacccctctacacccgcgcccgcgacgagggtctggtggtggccagggtccacaccggtgacccgtccatctacggggctaccgcagaacagcgtgacctgtgtcgtcgtattggtattgacttcgagaccattcctggcatctctgctttctcggctgccgctgctcggatggacgtcgagatcactgtcccggaagtctctcagtcactcatcctcacccgg

SEQ ID NO: 546738 - DNA, 954 bp, Homo sapiens
acatcgcaacccatacgaggaggtaaattagagaaacctccaggtggtacgtgtctacggcaccatgatcatgctgtccctatctggggatctgcccttctccttgggatactaggaataaaaagggtgggggttgtctacgaagaaagcatctcgccgcgtagaaacgttatccatgtccgggaaagattctgtgtttatctctcagattgcttcattggggaaagaggacgggtcctcaaagaaaagtatcccaaatcgggtctcccttcgggcgaattgtgacacaagggggggggggcttatttaaaactctgcagcaaacagtaccgtggactcaaacccggggggagaaacaccctccatcgtccctcgggacaggcgcgcgacacgaccttccaattatggacggtaaagaattaaatatcgaccggacgcgaaaaaaacaaacaatgagctcctccgccccagcgggtgaggtctcacgtctgctccctttagttggggtgatttgcagattccacagtcttgactcagtcggctccggacgtgaggacgtgttagcgccgcccgctctcgccatgggcgaaccgcgcgattccgccactccggagaggcctccgacgtgaaggtgggaatcagcgtgggcccgcgtagaaacctaaagggcctaatggcggcatagcaccacgccgtacccgactggaggagacagcgagcaggcgccgaagtggtaaagaggacgggcgggaagaggaacagccatcgtatccatttaatacacctgcgacgacgcgatctctcatcatgcttgcagagacggtcagccccgccttaccgggtagcgtctgtgccgaccaccgcccaggcggggtagtcgcctcggaagcactaactctatgcagagcacttcgatgtcggggagccaaatacgtatgatccaccgcacgcgag

SEQ ID NO: 546739 - DNA, 972 bp, Homo sapiens
ctgggcccagtccttggcagccggttgtgggtgttcacctggccgtccccagtatgtcgccccgccgtgccattgtgggtagcactcttagtgggctcctagatcaatggccatggtgggctggcccgtagtattagatggtcgcacttgggtcggcccatatgagtctgcttgcggctgcggcgccacttagcaggttggtgtccgcacatgtttgccccctattgtgtggtggggcctcaacctgcccactgtgcatgtgcgtgctgctgctgccgcgcgcaggtttgggcgggtggggggttacttccccggtgtgtggaggtgcaccggggttggagcgccgcccggtcttctacgataagtaggtctgcgcaacccgattcgccgacaacaatggtgggaacgagattctgttgcaactggcaattgtctgcaaggcgcagtctgcggcccgtcacggagaatgtatctcaaggggggatagtttgccgcccctcccaggtagaacaggagatcggtgcaccaaccacccggaggttatagaagagaatctgtcgcgggttctttttgacccccgcggtgcgaaccaatttagcggtcagaatagagtgctccgtattgcaccccggtggtactcacaatggggcagaatatttcgccaagcacaattgttcagcagtcgtacgttgaggatcacgtggaacacacagtggactattgtatcaaatacacagctgcgacggtcctagattagtggggcagctcacgcttattgacgtgtgcccccgccatatgtttgttcctcgtcccgacaaaacacgctggtacagagccctttctcttcgtagtggagtttcctttctcacctgtggtatacctcctctggggagcccacaggagaccttcttgtgaccagggatttgaatcaacaatggggttttccggaacccccccaaatgtcacacacat

SEQ ID NO: 546740 - DNA, 259 bp, Homo sapiens
  misc_feature (33)..(33): n is a, c, g, or t
ctcaacgctttatacttcataggacctgagatnggttttcatattcagtagttaataagtacatattagtttattactcatgatatgggatacttatatagccatctaaaaaatgaaaataaataaagttggattcctattttactcctaacataaaaacaaatctcaatagatcaaagaccccaacataaaaaagagaagacacaaataactagaaaaaatttaacatgagaagtataaagcgttgaggggtaccgag

SEQ ID NO: 546741 - DNA, 358 bp, Homo sapiens
gtgtgccatcacatctttataatttttgtatttttgtagagacggggtttcaccatgttggtcaagctggtcttgaactcctggcctcatgtgatctgcccactttggcctcccaagtgctgggattaaaggcatgagccactacacctggccaaccaaaaaaaaaaaaaaaaagaagaaattgttttttaaattaactaggcctagtgcacatgcctgtagtcctaactactgagaggctgaggctggaggattgcttgaactcaagagttcaagttcaatgctgcagtgagccatgattgcccacttgcactccaacctgggcaacaagagcaaaactccgtctcgaaaaaaaaaa

SEQ ID NO: 546742 - DNA, 813 bp, Homo sapiens
  misc_feature (199)..(199): n is a, c, g, or t
  misc_feature (291)..(291): n is a, c, g, or t
  misc_feature (316)..(316): n is a, c, g, or t
  misc_feature (347)..(347): n is a, c, g, or t
  misc_feature (420)..(420): n is a, c, g, or t
  misc_feature (537)..(537): n is a, c, g, or t
  misc_feature (556)..(556): n is a, c, g, or t
cggggggcgggctcgggggggaggctggagcatagctcttctctctggcagcttctcttctatttggaggatgaagcaccatcagactggctaaggaatccgggtgagggacccggaatagaattgtggctggaatctcctcggttgaagcccctgggcacaaagtggtgcctggcaggaacttcactctgggccaggnccacagaatggggtaccaagggctcctggaaactcactcgaatggtactcacgtgggcagaagcggcgccggcctgtgctggatgggtgaancaatgggccgtctttctggccacancggcaggtggccctggacgggtatctcaaancaccttcgcgacactgggccctctcagagaaagggctgtggaaggtcttccgcaatctacggggggctggtantttcctggcaggtatgaagcttttgggcccacattctaaatggccacaggcccggaacacgggtgaattgaatgtacatatggccaaacttctcaagaacgggtcgcgttatagaancacattctttggggtaggnctctggtaacgggtcaggttgggcagaaggtacgaatgaaactcgctggaaattctctggcgaatcggccaaagaaagtggctttgggggcgggccaggtgggcccggcattgggatccctttggatcccagaattcctaccggctaactctctgggtgccccttggaaggcctggacttccggaataacacggtgatggacctcaccatgggcctaagttgggggatgacaggccggccagggggcccggaggggc

SEQ ID NO: 546743 - DNA, 123 bp, Homo sapiens
agaaaaaaattattctctcacaaaaaataaatacatttagataaaactgcataccatcttgagatagtcacaagattcacttgttgctattttgagccttgactgcccacgagggtagcctca

SEQ ID NO: 546744 - DNA, 1054 bp, Homo sapiens
gggtgtgccgtctcagccccatttctgagaacaggtgaatggcagaacagccctgggcttggcccaggcagctctctgtgtcgcgcccttagagcctctgccgccctcagttccgtcctgctcttggcaaattgccagaccctttcagaaatggccgaagccctgaagcctctcctcacatctgcgagctcccaagaatacagactccgaattataaggcatgcttcgtcttatcgtggtggtggtggttgttaagtttcaggacattgagaagaatcattgctccgaccaaataaatgaggataggaaagataaaatacaggggtggcgtcgagttaataatattctcgctttagaggggcgccaaatagttatcgtgatgctcgcgctagtctttctcttggatgaaagtgggtggcgccactatgatgtggcgcggtgatattatcacacagatttaaggcgcagttgccccggtttgattcaatacatggcggcaaatacgggaggacaagaacgtggaataacatcggggatatcttccagaggaaagaagcgaagcaccatgacacattaggtgggaggcgcgtgccgaacatgtaggggcgaccaaattccaccgtatcggaagaattttattacgtgcggcctgaaaggtgcatcgtacttacacaagattacctaaaagcgggtatcaaggtgtttgcgtttaaactttccttggagaatgtgttgttgcgtcccgggaacgtacaaaagtatgggggataaaggaggaggggttgaagccctgacgtgacaagcttgtgtagccacgccagggaggacgtggcagagaaaaaacaacgggcacaagacacgaatcacaggatcaagagcggaaaccttgagaggcgtcgagaagggaacaacctttcactcaccaagcaacgcgaggcacagccccgtaacccacagggcccgtacctacccaccaaaggttgccacgtaatcatcccattgaggacaaccacaaaagggaacaagtacatagcccccatgggatggagacccc

SEQ ID NO: 546745 - DNA, 669 bp, Homo sapiens
  misc_feature (14)..(14): n is a, c, g, or t
  misc_feature (38)..(38): n is a, c, g, or t
  misc_feature (41)..(41): n is a, c, g, or t
  misc_feature (94)..(94): n is a, c, g, or t
  misc_feature (504)..(504): n is a, c, g, or t
  misc_feature (551)..(551): n is a, c, g, or t
ctttcctgagggantagtgcccgggaccacaattctcnctnacctgtcgggagggaccatctactgcgctgatcgccctttacatggcttcgcngcccaaaaacaaatgggttaggctgcagaggactggtttggtttttggctttacccccttgaagtccctttttttgggggaggggaactcccccgggcccccccggtggaagaaccccctggcgtggtcttttgggggggttgtttttcctttttccccttctgttttgtgttcggtttttctttggccgtggttccttcgcctgtcgcctccccccgctccgccgcttcgccgcttctttctctgtttctctgcttcttgtctccctctttgcccccgttgtggtgttcggtcctctgtccttttccctggtcccctgtccttctttttccttcctccgttctctgtcgtcctccccctcctcctcccgtcgttctcgctttcttctttccttcttgttctctcgcctnttctccgcgacccccgttgccctgttcctcgctgcggtcgttctgtngttttggtattttccccctctcctttcttcttcgtgcctctctcctcctctcccccgcgcgctcttctccctcatctgcgccccgtcctcttcatccttgttacaaactaacaaaata

SEQ ID NO: 546746 - DNA, 439 bp, Homo sapiens
  misc_feature (18)..(18): n is a, c, g, or t
cttcaacgctgctcacanttgaaacaactctgtaactgcttataaatgataaggggggggagtgtgcattgtgttttgatgtgtgtggtgtggatgtgctgtgtgtagtgtgtttttgatataagtgatgagtgtggtgtgtacgtgtgtggtatatgtgagtgtgctgtgtgtatattgtgtggtatggtgtgtatgtgtgtactgtgtggagggtgtggtgggtgaatgtgtatgatgtgcatgtgcatatgtgtagagtgtatgtgtgtggtgtggtgtatgtgtgtgatatgtttgtgtgtggtataggtgtggtgtgtgtacgtgtatttgcggtacggtgtgtatatgtgtggtgagtgtggtgtgtgtgtatgcatttgtatggatgtggtatgtgtggtaggtgtgtagtgtgagcagctgtgggtaccga

SEQ ID NO: 546747 - DNA, 186 bp, Homo sapiens
cgatgttggacatcaaaaatgttctcagtaaatgaccgttgaataaaggaacttgtaagaattcatagaagccgggtgctgtggcttgcgcctgtaatcccagcaccttgggaggatgaagtgggcagatcacgaggtcaggagttccagaccagcctggccaacatggtgaaactctgtctctac

SEQ ID NO: 546748 - DNA, 305 bp, Homo sapiens
actcagacctgtgccccagagtcccctgccgcagaatggccccagccgcccgaccgggtccaggagcactgctcgcctgtacatactgttccctagcccacctggtgccgtgggcgccaccccaggtgactgcacagcccctccccactccgccacgcccccacccaccccgcgtgtttctgccctgtgactcctggaacctgcgtcctccccaaagccctgggagcggctgtcctccccagaccatgccccccgatgattctcttcaaccacgaaacaaatgcaccccgcaaaacacacaacaa

SEQ ID NO: 546749 - DNA, 746 bp, Homo sapiens
tgcagtggctcacgcctgtaatcccagcacttggggaggccgaggcgggcggatcacgaggtcagaagtttgagaccagtctggccaacatggtgaaaccccgtctctactaaaaatacaaaaaaattagttgggcgtggtggcgtgcgcctgtggtcccggctacttgggaggctgaggcaggggaattgcttgaacccgggaggagaaggttgcagtgagccgagatcgccccactgccctccagcctgggcgacagtctcaaaaaaaaaagaaaaaaaaaggcttccatctctgaaggtaaagtataaactcagggggctcaagattggcaggtacagccttgctaatgccttcaataatgcttacgtaccttgtctacatgggttataattttccacatcctcttcagatacaatctgagaaactgtgtgacttaccttggttacatttgcaaacaatttcctatttcaatatggcatcatatcaagggttccatagttacattccagttcttaactctgaattccaagcgtatggcttaaatttccagttcctgggaacccagaacaataaaattcccttaagacatcgtgtcctaatagtgggtcatctacctattcttgggaattacgggaaatggcagtgtacactaattcacagtgagtttacagaccctatacactacacacccaaaggtaccttcagggaaatcggctaacagggcttccccctccctagccctc

SEQ ID NO: 546750 - DNA, 310 bp, Homo sapiens
ctccatgagatttttgttgtcaatctttctggatttcttttctttcttttggtattgagatggagtctcattgtgtctgcccagtgttggatgtgtagttgtgctcaatctcgtgctcattgcaagctctgcctcttgtgtgttcaagccattctcctgcctcagcctcctgagtagccttggctactaatttttgtttttttagtagagacggggtactgcttgtgtaagccatggattggtctcgatctcctgacctcatgatcctgccacctcgacctccctatgtgcttggagttacgggcatgag

SEQ ID NO: 546751 - DNA, 247 bp, Homo sapiens
aagctccccggggacaaaaacagggggcagcagggggacgttttttcttggtccgtgagggatgggggtttggccaaccccttcacgcaaaaaagccttttcctgttcccgggttaattagttggacggccggcaagccccccctccccggggtttttgggttggccgaggatggttgggccggtccccgttttaattctttcccgggcccccgcatgggaattaagcccccccccctgccctggga

SEQ ID NO: 546752 - DNA, 597 bp, Homo sapiens
catgaactgtgtcaattagggaggtatttggctctgagaaatagaaaaaaataacaaacagtggctgaaataattaatgagtatatttatattttacatgaaaagatgtctgttgagaagcctttaatatccagtatatgagcatttttcatcttcctctaccaccaacctttgagctttaaactgaactttggggctacaatatcactgttacaccatttgatattgaaatagtgagagaaaaatagcaacaacaagaagttcctctccaggttctttttttttcttctattttctctggtctctcctctcctttcctctttccttccctttccctcccttccggtcctctttccttcctctcttgttcctttcttcctccctccctcacttccttccttccttccttcctcactcccttcctccttctgtctctccctccttttccttttcctcccttcccttcctttcctttcctccctcttcctccctccctccctttctttcctttttccctttccccttttccttttctttccttccttcttccttccttcctcactcccttccttctttccttttccctcccctttcttt

SEQ ID NO: 546753 - DNA, 606 bp, Homo sapiens
  misc_feature (17)..(17): n is a, c, g, or t
gtaccggttcgcatgtncccaaactgctggattacagtgcatgacacatgcctggttttgtttgttgctagagacagggtctcactctactcacccagtgctggagtgccatgacgctgatcttggctcactgcagccccgacctcccaggttcaagcgattctcctgcctcagcctcctgaggggctgggattgcaggtgtgcgccaccacgcgcgactgatttttgtatttttagtagagatggagttttgccatgttggccaggctggtctcgaattcctgacctcaggtgatctgcctgcctctgcctcccaaagtgctgaggattacaggcaaaagccaccatggccagcccacataaagaaacttctaatcaacaattactgtacaactcatgggaaaatgtgcaagagtcatgaacaaggaattttgcagaaaaaacatatatgggcagtcatcagataaaaaaaaaggtcaacatcagtgttcattagagaaatgcaaatcaaaagcacaatgagataccaatctcatgccagtcagaatggcacttttaacccgtcagaaacacagatgtagggaaacatgggaaccggggatcctc

SEQ ID NO: 546754 - DNA, 488 bp, Homo sapiens
actgtcttacaaggcttcaagctttgctgggctatgtagggcatgttaacaggattcaaaccaggagctgtacagtcttacactgaatgaacgtttacagtataacatgtgtggtaatctgggtattctagaatggacttctgggacacggacaacggatgcccatgtggggattaaggggtttcctgtcgacttaagcaacactaggtctctagcgcacaacattcagccacaagaggttttcatggcacagcagagccgcagagcacattataatttggcacccaaatgaccgaaagcattcttgtgggcccccatgtccctaacatttttaataccttggggcacggcacaaacccaagctctgggcacgacacgggattggtggttgactaacacacgtacggacaagaacaacgggacattcatgtggactggtaatacttgacacctccgattggctaacggccagcgcatagaagtgggta

SEQ ID NO: 546755 - DNA, 459 bp, Homo sapiens
  misc_feature (123)..(123): n is a, c, g, or t
  misc_feature (133)..(134): n is a, c, g, or t
cggacagcttttccccttggcgccttttgcggggcctataacaacagttttttcaacaaaccgggggggccgcggccgggatttcccgggatttttttccccccggggccccccccggggccnaaaaaaaaanntttttttttttgggggggaaaaaaaaaaaagaaaacccccggggggggggtttttttccccccccccgtttcttgggaaggttccccccccccccttttgggggggggggggggttttcccccccccccttttccccccaaacggttttttggggttttttttttttttttaagggggggttccccgaattttattttttttttttttttttttcccccccggggttttttccccgggggggggggtttttgaaaaaaaattttgccccggtttggttttttttcccccccccttcccctaaaagcccttttgggggggggggga

SEQ ID NO: 546756 - DNA, 807 bp, Homo sapiens
ggagaactagtctctgcccaccctgtctgactcggatcccgtgctcctggcccccggtgcggcggactcagacgaagagacagaggtgctttggagtccctcggccacgacccgtttggcctgagcctctgcaaggtcgcccctgcagtggctgatgcagccagcgtctggagtggatggagccgctcggagcatgcgtggcgccgcacaaaagaagcacgcagcgggtgcagagcgcgtatcatatcggtcgaccgacgcgacagcaccaagcagagcactcgtggggccagtcgcaacgaaatcacgaaggctcgttcggccaccacaatggcaaggtcgaggtggcctgggtgcccaaagacccaaggggcgtatgctggcctggggagttgctggactgctgatcatgtcagtgcccggatgtgggcctcagttgcgagagggagtgacgggtcaaacccctgtccatgatgggtcgctcatttccccagtgcgtgtccgacttcggaggtcccggtcgcggggtcagtactccgccgagaccagtgcgccggggatgtccagctggccacagcctcagggatacgcccgtggtgctagctggtatcctgggccatacctgacaccaggcggtgagcaggagcccggctgtgtggggtgacgtgagttcattcgcagactggcgtgcagcgcgcgtctgcatactgtcagtcagtggccaggaccagcgccaaggaggaaaggcatgctggggccgtccgtggatcgcgcgttacttggtccagcaaggcaaggattggggac

SEQ ID NO: 546757 - DNA, 379 bp, Homo sapiens
  misc_feature (79)..(79): n is a, c, g, or t
  misc_feature (368)..(368): n is a, c, g, or t
  misc_feature (372)..(372): n is a, c, g, or t
taatatctccattatgggttttgggttttccatttcccgtaaatggaataaatgggtgatgagccatccttttccctgngcttccttaaacattgtatattttatttggtaaaatgttaattcaaacccattgcccatataaaaattgtgcatatttgtctttttattgttgagttgtaaaagttctttttacatagtagatacaagtctcattctttggcttgtcattttacttagttggtggtattctttgaggtacatagttttgacatttttaatgaagtctaatttatctttttttattttgtcactctgaaaccattttctttttctttttcttttttttcttttaaatgggcgacagaccngagntccgtct

SEQ ID NO: 546758 - DNA, 108 bp, Homo sapiens
gttgcccccccccccgcggtcccccccccccccgggggggggggggggggggggccttccccccgggggttttccccttttaaaaaattaaaatttttttttttggga

SEQ ID NO: 546759 - DNA, 1566 bp, Homo sapiens
cagcgcgggcgttgtcagcgcacgccgcgcgagcgcgcgcggcgcacgcttagccagctggccggacgcgcaccccggcagcgccggctgcgcgcgcgctgccgcgcctgacgcccactggccccgcgctggccgccgcgccctgcacgccccccgtcctaccctggcttgcatactccactgcacacggaccccggccggcgggaactcccaacggcacccaggccagactcactgcgctgggccgcgttccgggcttcccgggcccccaactccacgcccgctgcgccacgacgcctggcaccgggaccgcgcaccccttagcccccgttcgagtccgtgcccccatttacacacgctgcgcactgcaagcccacggcgcctatgcccccacgtgggccctccgtggcctcacggcccagggcaggcccttgggcgagcggggccgagcgacgcgctccttgtcctcctcgcacttgcgccctcgaagcccatccaacccgtgggctgcaacgtgcgccgccggcacacacgggggccccacctgcttgggcccgtctgcccacgccccaccccccctcccgtttccgcgttccgttaccatccgagccgttgtcacaccctccctctgccgccctggctgccctgcctccgcaactgcaacccacttcgaccccacacgcgccacaggcccctgcgggcgggccgtccctctccgtgttcccaggtgcacaagccccgctctccccttaggcacctctgcacttcccaacacgggcaaccaacccttgcgggcacggcgttgtcccccctttagggccccttgtgcgcttgggtgccccccgttgcaccttcccgttttgtagccccgttttccaccgaactcggcgttcccacttcttgggcctgttgcaaccctttctgtccccccccaagcaccccgttaaacgttaacttcgcccgctttggccgttggccccgaaagccgaaggggaaggccgacccaggtttagcttattaacttacgttgggggctcctggaagcggaaggccgttacacaagggccttccgcccccttcctttaggaggcgcgttggctttaacccggattggcttgggggccacaacaaaacttcccctttccggcctttccttccttggcattctcgtggccaaaagttccctttgggggtctcccccttcccagagttagtttcgaacccccaagaggcaacttggcaaggaggaaaaaggggccaaaggggggccaacccaaccggaaaagcgggcccacacctttaaacaggcttagcgtttggctacatatccaagagggatataccccgaagcccccaaaggccaaatatcgcccctttggaggggggttaacaccttagtgttcttccacgttaaagggaagaagaccccgttggggggggggaaaaaaaaccgctttggggttgggggttcggggaaaacacccctaggcgaaatactaatctaggggggggcgcccccctttggtgtatccccgcgtatccgttcccattcccccgagatttcta

SEQ ID NO: 546760 - DNA, 215 bp, Homo sapiens
ctacactccgtgacagctgtcggttgccagtgtccaccttctcacgatacgtggttgccgtaggatggagtgtggaagatttgttatatcctggaaaaagactgatcaagttccagaaataaatgactggaccactgtgtagaaacaagtcaaagccaaagtcatacacgtggctatcacggaaaattattgcttgggaggttgctagggcgggg

SEQ ID NO: 546761 - DNA, 109 bp, Homo sapiens
ccctttaagttcaatagcatcatccaagaaaccccaggcacgcaatctcagctgccccagcagagaactctctcaggattaccatgacccaggagcgccacgaaccgga

SEQ ID NO: 546762 - DNA, 717 bp, Homo sapiens
  misc_feature (359)..(359): n is a, c, g, or t
  misc_feature (435)..(435): n is a, c, g, or t
cgaggacaaccgtgtactattagccatggtcaaacccatcgtgtacttcgagatagccgtcgacaggcgagcccttggggcggtctcctttgagctgtttgcagacaaggtcccaatagatcggcagacaattttcgtgctctgagcactggagagaaaggatctaggttataagggttccatgcgttgctacaggaattaattgccagaggtttcatgtgtcgagggtgcgtgactctcagccactgccatagatggccactggctggcaacggtccatctcatgcgggaggaaatcttcgcatagattgagaatcttcatccctagaagcgataccgagggtccatggacatctctntgatccactggacaagactgcatgagaacccataaacaatcaaaatggattccctatgcttgtggtcaatcttgcnacgtgctcaaggtacgtgatgtgcgtgtaggaagtggccaatgcattgatggttggtttgggactaaaggatggacataggaaagcgctcattgaaactaattctggtgcgaggagacccagtggtaggccgtcgtcctcgggtgttcgcaaggtaaactggggccatggggaactcgattggcaaaggaaaagcatttcaatccgagttctggcgttggaaccatgggttggggaacctaaaggcttgcgggcaaccattataggcttgtctgggaaccct

SEQ ID NO: 546763 - DNA, 183 bp, Homo sapiens
cagtgcaatggatcaaagcaagcagaggaacatggaagggctagactggctaagtcttctggcctccatctttctccattactggatgctacctgccctcgaacatcagactccaagtcttcagcttttggactcttggacctacaccaggtgctctcagaccttcagccacagactaaaggc

SEQ ID NO: 546764 - DNA, 511 bp, Homo sapiens
  misc_feature (511)..(511): n is a, c, g, or t
taccctgggcagaaaaatctaaagggggctctccaaatttgagggggaaggttatacctcccgcagggaagagctgggggtttttaaaccacgcgcacactttttggggtgaatccggccccaagcgcaactggtaaagacttgctaaaagagagattttgtgtgacggctttgtgtcgcacgcttcacgagagtttgacaggtttcgcgggaaaccctgccgcctataggagaggggattcccagacccgggtgttgtttctcccggagggttccctggtgagtggggcatataaaccggcggtggatagtgggggagatggtgggtgcccttacgcgttgcgggtgagggccttttgggaaacaaagcgggaatagccgcgggtgtcgcctgggtcgggggaaattggggcgtggagtggtccgatgcctagtggccagggttggtgcgagggaggggttagagggggagcggggcgatgggaggtagagggtggtcgagggtgatgtn

SEQ ID NO: 546765 - DNA, 426 bp, Homo sapiens
gtaggcagagacatgaacagacacttctcaaaagaagacatacatgcagccagcaaacatgaaaaaaagctcaacatcattgatcattagagaaatgcagccataaaaaggaacaagattatgtccttgcagggatgtggatggagctggaagccgttatccttagcaaactaatgcaggaaaagaaaaccaaacactgcatgctgtcatttataagtggagctgaatgatgagaacacatggccacttcgtggggaacaacacactctggggcctgtcgggggtgtgggggtagagagagtatcaggtgatccgccggctttgacctcccaaagtgctgggattataggcgtgagccactgtgcctggcaaggatcctgactttcaaatgatggccaccatgcattcgagtgtgattctggccgg

SEQ ID NO: 546766 - DNA, 389 bp, Homo sapiens
ccccgactagcccgaaaggaaacagtcacatcctgggcgtggagattcggtgtagtgcattcacgtggcatgtcacgggcttgcctggtactggagacactgtgtgggcggcagggtcagttggctgctcgtggtgtacaggtccccggaggcgtcctggacaggtgagaagttactggcggtcactttctgtccgattgcgctccaggtcacagtgaggtggctcctgggggaaaaagccctggagcatgcatgcgacgaccacgttcccatcttggagggtgctgtcgggctagtcggggatgctgaagagacggtgaccactgtcccttggccccagacatcaaaagcatcaggggtccagccactactatacccggtggtcctcg

SEQ ID NO: 546767 - DNA, 284 bp, Homo sapiens
taaaggtggactccttacttttatatttcaagatttctatttgtatcaatatatgctgcattttctgattgaaattgctgttctgtctaatgaaacttgtgattttctgtagttgctttttacatttgaaagcaaactttcatactgtgtgtgcttaactgtaccccttctgttagggatttgattaaaatactctaaccgtttcattaattcctttttatgtgcttaatgtatgtgacatttatggctttgtcatctcaaaagctatctgtggacaaaatcca

SEQ ID NO: 546768 - DNA, 361 bp, Homo sapiens
  misc_feature (55)..(55): n is a, c, g, or t
aacatgtggtacccacgtttgtgtgggaggactttgtcaactattatgtggcggnccctgtcccgcttaaagacttctagacaatttatggagctaataaatttacaatagatcttcttgttactcaaagctatgcttaggagtggtctctggtcgggagctgagtagagtcagggacaacaagacccttgggcggggggcgtgaacgcttcactgcacggtgccacatggttgtttgctaccaacgaccggcccgcttaggaggctacggtgaagtcaaaaccctctcgtcggctactttctctttggctttgttttacctctttgggaccccctcccccctgccctcccaccacaaacg

SEQ ID NO: 546769 - DNA, 252 bp, Homo sapiens
gtcagcccccggagtagccgggaccacggacacgcaccgccacgacgtcagccccccgagtagccgggaccacggacacgcaccgccacgacgtcagccccccgagtagccgggaccacggacacgcaccgccacgacgtcagccccccgagtagccgggaccacggacacgcaccgccacgacgtcagccccccgagtagccgggaccacggacacgcaccgccacgacgtcagccccccgagtagccggg

SEQ ID NO: 546770 - DNA, 241 bp, Homo sapiens
tggcccaggtgagataggccgcaagaagctcctggctgtcaggctgaggcccgcatgtctaaggccaatgaagcacgcatgcgccgtgaagagcgcctcaggtcgaagaaggaggagatcatcaacgtactttatctaaggagtgaagagaacaagaaataaaacctcccactttgtctgtacatactggcctctgtgattacatagatcagccattaaaataaaacaagccttatctgcg

SEQ ID NO: 546771 - DNA, 173 bp, Homo sapiens
  misc_feature (28)..(28): n is a, c, g, or t
  misc_feature (97)..(97): n is a, c, g, or t
gcgagcactctctggcctatccggatgngctggggtctgccagggtgcgaaactggaatctatgctgaaacactaagtgccaggaggtgccccatgnccaggagtgacacggtcccccagcagcagagcccattctgagccagacaggtcacggttgacccaggaagagccat

SEQ ID NO: 546772 - DNA, 133 bp, Homo sapiens
atgtcgttcctcctcctgtctcttctccctcctcccctctccctcctcctctccttctccctcttctctcctccctgtctccttcctcctcctgtatcttctccctccttccatttccctcctctggccggtg

SEQ ID NO: 546773 - DNA, 738 bp, Homo sapiens
tcaccaggccttccagcgcctgtgttgccatctggtaaaatctgagctgtgccccatgagccttaccacttcctccagtctcctctgtgctgtggctgtgtggagactgacgcctacataaggagccaacgagcaatgatgggtcacgaccagtggaccacggactacagacagtcactgactagacccattgtatcgagacctcctgatgcctcagacctgtgggctttcgtccgcacatggcatacacacgagagggggttaggagataggaggtcatgggggcccgtggcagcgttactcagggttgggagggactctaggctctggtgcctgtccttgaggaccttagcaaatcttgtccccccagatcgcaggcaagggaatggattgcgaaagagagtgctcttctcgacctaacactggagggcacagagcagtggctttgtacggccaggaagtattctcagatacagcgtctacaggatagtgcaagaattccagatacgaatgtgggaattactcaggaggcagacagaagtatctttattatgatcacgagtgctggttccagcaacagatcagaaatgctttaagttcactcgtggggaaagctggactctgaaatcttcaatgcagaatagggatgcagccatggcaagaccttacacggttagaagagaccatcagataataattctgtgagtactccacttccgtctcttcagcagagaacag

SEQ ID NO: 546774 - DNA, 188 bp, Homo sapiens
agtagcggggaccgcaaacgtcaacaccacacccagctaattttttgtatttttagtagagatggggtttcgccagtagtggccaggctgagtcttgcaattcccgacctcagtgtgatcccgcccggcctcgtgcctccacaaaggtgctggagcttacagcacatgcatccacacacacccgagcc

SEQ ID NO: 546775 - DNA, 526 bp, Homo sapiens
agcattttcattggcttagttattgttaatagtgaaagaaaacactttgtgctgcacatactgtatgactgtgactatagaagactgccatcataaagtcctcaaaaactcttaagatgtaatttacaaagataataataacacagaattatttcacttctctgaatgctacacatttgcataccaggactgtgtacaatatactcataatgcacattcataataacaaggacttcttaactctataactacagcataagatctgtgcagtagacaattcatcttaccaagttttacttattggtgtgaaagtgttagtctcagtaagccaggtgttagctgtctacgaagttgaagatcacattaactactacatcaccattgtgagaaaatataatgataaaactgaaaatcgtgtgactttaccagacaataacactactagctagctaagattatatctaagataatgtcaaatgaatatttcaagagttggatgtgataatcatgagcccgtattaccaaa

SEQ ID NO: 546776 - DNA, 202 bp, Homo sapiens
cggtatgtataagcttgattaagcttcatagtacccccccccgtaaaatgtcttaatgctgtactaccattattttaccaactgtgaaagctggctttaattttgaggaggaaaagaaaagcctgcatgtgttctttattaggtatcatttaaaatatacttttttttattttggggaaagggtaggggtataaaaaaatat

SEQ ID NO: 546777 - DNA, 159 bp, Homo sapiens
ctcggctctaccttgtctctcggctctacctgtctctcggctctaccttgtctctcggctctacctgtctcctctatataaatgcgtaggggttttagttaaatgtcctttgaagtatacttgaggagacaaggtagagccgaggggtacggagctcga

SEQ ID NO: 546778 - DNA, 604 bp, Homo sapiens
tttttaatgaaaaaggcagaattaaatgaaattgcaggaagggatggaactcacttagagccattatctatatagtttgccagttgaaataactataaagatgggccattttgtggttggtataagcaacattttggcggtagtcagatattaagcttatgttccccagagagaattcctctgtatttcaatagcccttggtagctattttcattactgacaacattagttatattgcagtgcactttttaggtccatttccacaaattgaacacagggacagcctatttcattcccatattcacagatgggaacaggccaaaatattttattagagttattagggggaaaaaatcccattaagagcacatatgctgctttcataagggtttagatgcaccccagaccaaatgagttataccaattatttccttttcaaaaaccaattagaaccgggttattaaaaccattcccctttattttgtgaaagttagggaaatagattctcctcagttctgaaccattgaccattccaatattgatgtagaaagcatagacctttatttcatttgatagtaaagaataaaccaagctattttgcccc

SEQ ID NO: 546779 - DNA, 173 bp, Homo sapiens
aaccgcagagtagtttttttctctttgaaagatagagattaattacaactacttaaaaatattgttcataggttactcaagatattgcttagcgttcacgttttacacgttatttttaatatgcttaatgattttacagagataaatatagaagacttagaaagagtagcatg

SEQ ID NO: 546780 - DNA, 648 bp, Homo sapiens
  misc_feature (301)..(301): n is a, c, g, or t
cctcggaggcgttcactgcttccagatgaagctggacatctcctcccagcccctggctgccagaaactccttgaagtggacgatggacgcccagcttcgtactttctatgagaagcgtatggccaccacgaagttgctgctgacgctctgggtgaagaatggaagggttatgtggtccgaatcacgtggtgggggacgaccaaacaggtttccccctgaagcaacgggtgtcttgaacccctggccgtgtccgccctgctactgagtaaggggcattcctgttacacgaacccaggagaanctggagaaagaaagagaaaatccgttcggtggttgcacttgtggatgccaatctgagcgttctcccaacttggttattgtaaaaaaaggagagaaggatattcctggactgagctgatactacacgtgcctcgccgccctgggcccccaaagagctagcacgaatccgcccaacttttccatctcttctaaagaagatgatgtccccccgtatgttgtaaggaagcccttataataaagaaggtaagaaacctaggacccaagcaccccagattcagcgtcttgttactccacgtgtcctgcagcaccaacggcggcgtattgcttctgaagaagccgcgtacccca

SEQ ID NO: 546781 - DNA, 590 bp, Homo sapiens
aagatggaggatcggaggggacattttcagatttacaaacctgacaaaatatatctgtaatgtgcctggatcaaagtacctttcttgaataggtagactgcaaggacccatatgtacctggtcacaggtcatcaaaccaacctttcttgtgaaatcatgagcgagatgaagtagagctgggcgtgagttcggagcacctgtcataacaagacactgaggcctaaggttttgcacgtggactttcactccagaaagacgaattgaatgctgcagagcattcaggtaagacagggctcgtgtagaggatccccaattcacatctggttttatgtaggtaacatacctatacagtccaaggactatcacatgagcgatcaatgcagcccaccaaccaatgacgaacatttctatgcaacaaataattgctcccacaagtgatatccacatgttgtagtatttgaatgcaggacgccatcctggagattttgcaagtgatgcatggaatactgaaaaattgatcaatgcatatgatgcaaggaagaagtttgagataatcggtgcaataacattcagttcagcaattaagatga

SEQ ID NO: 546782 - DNA, 155 bp, Homo sapiens
  misc_feature (77)..(78): n is a, c, g, or t
gcagcgcggagcccggctcggccacaccgatcggccgccgccatgggctcctcgcaaagcgtcgagatcccacgacnnggcaccaaggggctaccacggtcctgccgggtacaaggaaattccccagggacacagagcttggtttggagtccttc

SEQ ID NO: 546783 - DNA, 164 bp, Homo sapiens
gatgctttccgattagccgacagctgagttgcggtactcctcgaggccttaatgcaccccagaggtccatctgaagctggagtaccctggggtcagcagcaagagaaagaagaggagatattctgtttgtttttcccctacagccctgtcgggctagtacagga

SEQ ID NO: 546784 - DNA, 1344 bp, Homo sapiens
gtggtcagtattcagctgtttttaagaaggaatagcaagtttaattatatacaaggagacagggcatttcacacacgggggtgacagaatacaaccaggtcagccatcatcacattgggcaaaacaattcgagtgtccatccatgccgaagcagcaaaactccatcagtcacatcacaagtattttcacacaaatcgtctaatcattttatcaaaatctaaataacatagctcaggcacactatgtaaagggcaacagtactcatttagtcatcccaaagcactcgtatcatgtcgaatagtcatggaaaaagagcatgcattattccacacaaaatcaaatccatcaggcaggcacaccagcacacattcggctatactccaagatagcggcaaggcacataccaagcctaggtcaaaggaacacgccaactatataatacttggcacaacattactaacatgagacgttatctaagacggcagacttacaacacactttctagctacccctatgctcacattagcacagatcattggagtagagacttacttcaagataaccgcgtaaaacaattaaaacctacagacaccgtcgatccgggcccctaacatataacaaaaacgaacacattatacaccgtccataaatacacagacaacagtaaccgccagccaagtaaacaagttatctataacttccccagggcataaatacactaggaaaaaagtgtttttaaccaagtgaataatccttgagaggatgtaacgcccgaaaaaaagatgtcccacctattcgtggcgagtaaggcacaataggtacacctctttggcacgcaccagtacccaatacatcccacaacggcacaataaataacaccgaggacaccaggaacgggaccgaaacacctccacacccaacgaagaaaaacagaacgaagacaacagacacacgcaaagcaacaacacgacaaacaacgagaccaatacagaggcgcagaacaagacacgataggacaggaaacaggaaaagccccatgccaaaaacgccacctaaccaacgaaagaaacacacaagaagagtagacacaaccaggcccacacacaagcagaacaaggagcgaaccacccaaagcaaacacacgaaccgcaacacaaacgaaaaacgaaaaagtaacaagatagagcacacacaagacatgaccaacacagcaaagcacgagaaacagaccaccgcccacaacgaaaaacacacaacccaaacaggacagccaacgaccaaaacgacaacacataagaacccacaggacacagccacgagaaagccaaaaacaaccacacgcac

SEQ ID NO: 546785 - DNA, 107 bp, Homo sapiens
atattttaccattttattgtgtgtatatatagaaggccatataggaaattgatatttgtaatagtggatttgttaataatactgtttacataacatgactgtgtaaa

SEQ ID NO: 546786 - DNA, 163 bp, Homo sapiens
aggctgggccggcgtccccgcaagacgggcagcccccgcagagagcgctacttccctagtcatagtaagagcgttatcacctgttcatgagtcacgcgcctcataatctatttgtccttactctgcttcctaggtcctcgtatgcgccttttccgtaacactc

SEQ ID NO: 546787 - DNA, 587 bp, Homo sapiens
aaaacttttttgccgttaacttttccctgttcaactttagatttaaactgaagaatatcatcctcgaaagttgcagttttaagatctttacggtcagctaaataattattgctgacacgccaagggccatgcttaccttgttttggcatgacgtttgcggcacgggcaatataacctgaggtcagactgcccatcaccgtatcttcgagtaactctgcagcattaccttctggtaatacctcatcaaaaccgctcatatccatatagttcagcagacggcagatatattcggctgcgatgtctactttcagtgtccaagatgcattgatatagccaataatcagcggcatattcggaatatcactcaccatcacgcggcgatacagcatatgtttggaggtatcatgggcttgcatcgatagaagctgcatccacccaaaatctgaatattaatccggtgctgatcggtatatggcatcagaggttaccgatttagcgaatacggtttcgtaatccccgcgaaggcaatttaccgagacgccttcaggtattttaataatccacgggacaaccaaagcgtcccaggt

SEQ ID NO: 546788 - DNA, 847 bp, Homo sapiens
attccagtaaagtttatttttttcaatctacagatataagaaggctttcccatgaaaaacactctatttatgtcccactattaattatctaatgtcctataaatagtcacatacagaagtgaaaaatcagagccaggcactatttatcaacaaaagaaatctggtgaacgtctcctaaatcttgcccatgagtagccaagttcattctaacacgagttccaatccatggaaattatttctaaattggctctgtttaaccaatattgaagcactttatccaatccaacatcattgtcacactattcgctgcaacatgacacgaaattattctccagttataaatatggcgcacttgacacgtgattaaactcaagtgctttcctccttcttcagaatttccaggattttaacacactgagtgggtgtggtttatctcacgaagctctcatttacacaagaaacacctcgtgctaaaacctaaacagtgcgggtttttcacaaagccatttaggggtgcactgggaaaattgccatctcccaaaaagtttcttctcccagcttcgaattaaggggggcatttcccctcttgggagtgccaccgtgggacccaccataataaacggggcatacctaaataatccctttccccatgtggtcgtggcaaacattaaaacgtccccaatcttgggccccatccgtggtaattatgcgctgagctttcaaccgacacctatttgggaaacaacccttctcctctataaaactttgtctcccatatcccctttgtggccacaatttccttcccccgggaggaaacccctcaccccattttaatttcaagccaccc

SEQ ID NO: 546789 - DNA, 109 bp, Homo sapiens
ttcccaatgctacctgactcctgtggaagacccgggccggtgcgcgggggcgctagctggctcacaccgtccacgggctgggcctcgatcagaaggacttgggcccccc

SEQ ID NO: 546790 - DNA, 201 bp, Homo sapiens
ctatgttgacgaccacataggacagcaggaaagatgccttgctatgttggttcctgggattttaccttcataccagttatgatcaactctttataagaagaataactgctatctccctttctcagtgacagctccacatttgtgtctgcgttgaactttgtatttggactatagtcttctcctgatttctccggtgctgtc

SEQ ID NO: 546791 - DNA, 250 bp, Homo sapiens
ctaggagatgatgacagcagcagacatggaagagaaacctttgaaaatactgctgagaatatattatatttcataactgctcatgtttcttgtgctcgagagtagctgttcacttcgtttagagagaaatttgtttaaggggagtatttttggttgactttattcaatctttcattcttatctaagttttttcttaagatgctttgaacttcttttgtgttttctcaattaccgtgttgctttgacgcgt

SEQ ID NO: 546792 - DNA, 278 bp, Homo sapiens
tttttgtttttttggggctctaaagggggtaaagggggtgctatagggtaaatcggggccctatttcaaagattttaagggggactaaattctaggaggaggggcatgaaccgggtggttggctccacagatttcagagcatggaccgtagtataccccgcggtcgtgtagcggtgaaaggggttgggttaaaacgtcggggaaatgcattgtgttttaaagccttaagggggggcacagctcagtcagttgccaacacgttctggtgacgtgtaatt

SEQ ID NO: 546793 - DNA, 203 bp, Homo sapiens
ggatgtcatgagatcctggcttctccccatgttgttcccggacaagggcagaagggaggcatgcaagggactctgctgtcttactaacagtggtctcatcctcccacctccactgcttctgcaaggcaccagttgtatgagaaagttggcctttggacttaggatttcttattgtagctaagagccatctgaagcagcaggtt

SEQ ID NO: 546794 - DNA, 172 bp, Homo sapiens
  misc_feature (30)..(31): n is a, c, g, or t
tacgtactactaaattcgcggcagcgttgnnacccattagctgtaccatactcaggcacacaaaaatactgatagcagtcggcgtgtgaatcattagccttgcgaccctcggcagcaagaaccatacgaccaatatcacgaaaatagtcacgcaaagcattgggattatcat

SEQ ID NO: 546795 - DNA, 341 bp, Homo sapiens
cgtcgacttatcctgcagtctttatcatgctgtctcgattggcccaggttgagttggcttgtgtgatcctataggctttgttttccttattatctcaaattagctcagcatacagccatctgtcatatcagcactactgtcatattttcttcatcctaccacctgaagtctagcccccaggtgtttgctctttctctctctctactcctgttccttctcctccccatctcttcttctctttctctccctttgtctcttttcctcactggtttcagcttcgctcattctctttctccaattttacccttttctccctcccctgcttcttgggtcgtcgacgc

SEQ ID NO: 546796 - DNA, 967 bp, Homo sapiens
gggtgcaccaatgggtggaacaatccctggctgcggcacaggtaagatggcgcaggttgtaagctgggtcagcacttccgtggctgaccacgggggacctgagtgagggccagtggtggttttctgtcgtctcctctgtcagggccgactgggtttgagggtggtctggctcctgactcccatccacccccttctcttcccgggcttgctgtttcccagcagccggaagaagccccacagacagcttgagaccccctccttctgctgcctggccaagtcccacccttcctttctttcctctgaaacaggaccctaccccccgcccccccatgtctgccagaagttctccctctcctgtcctggtagacctgtctcctcttgtaggacaggctgaaagaacccggtccctcattctgaaactggggccaaagctgtggctgctggaaccccagggtggaagcaaactgggcagattggctggctaccagatccagctctgagatgggtgtgagtgggcgtgtccctagggtaggcagttattgggggggggggggtccccctttttcccttgaaaactttcacgtaaaagggacttccccagcctggttgggttttggaccctggcctttcgcttctttttaaaccttctccggttaattactgtggggacgtaaagggtttctgggtgagggttgggtcctctgcccaggttgcttgtgatccgtgagctgtagagtttcttttaaagttgcttctcagattggtgttagacagattgggccatggccgccggattgaacttaaattgtatataggctggatatatttttcctgggcaacagacgtgcatctaaaaaaggggggcatattatggggcaatctaccccttaaggccataggaaaaaggcgggacatgaaaaggatagccggatgcagcagaatttgttcggggtcgtgcgagagaata

SEQ ID NO: 546797 - DNA, 585 bp, Homo sapiens
  misc_feature (509)..(509): n is a, c, g, or t
attcttcttatattttcctcttcccctttcttcctaactctttcctccttctctccaacccctttttattatccaccggccgaccgcttctaaacaaatcttatttccccagctcaacattttaatacaatcggtaaaaacaaaaaccctttcttaaaacgtcataaagacaccacttcccggacccaaaaaaaacccgctctttcctaccccattcccttggaggctcacacccaaggcgcccaaaaaatggcccaacaacaaacggaatggcggcaaaattttctccccaaatatttgagatcaaactaaatcgcgttctccatttaaaaaccaacaccaacacgggttagaatcttattcccgcacaatatggctaaaatttcggtcacacaaaaaaatgggctttctccaaaaaaaaaaaagaaaccggcacaaatatccttccggccccaacacaacaatataatctctccttggtaaaaattcgcccacttcacacataccanggcgatcattctcctttgcccctcctctgctcccaaaacaccacaataatttttacagtaacactcgcgattcccg

SEQ ID NO: 546798 - DNA, 186 bp, Homo sapiens
tcgtcggatagcccatgtagatctcgggaagggcagtgatcgaagcgaaccactccgagccccaatggaactccagatccgattcgacctcggcggttttcgcaaccggctcttcgctcgaacctgacagcggcgagtccggcacttcgatgtcatcgtcaacggccacgaccactccttcgaact

SEQ ID NO: 546799 - DNA, 84 bp, Homo sapiens
agcttctacatctgcagtgccaatgatgacaggccgggtggtcacgagcagtacttcgggccgggcaccaggctcacggtcaca

SEQ ID NO: 546800 - DNA, 1858 bp, Homo sapiens
  misc_feature (946)..(946): n is a, c, g, or t
ctggatgtcttgccttttatgtggacaccaatatagcagctctctttagagggattcccatttctgcatatgccttgagccaaactggctgctctttagcacaccaaaaaccataagtatggtttatactcgcaacttctctttgtttcttatatgagcagacaatattgcctatcttttttggtactcccagctgctcaaagcagtgctgaggatcatgtttcaaattcattcttcttcaccacagcaacaatcctcccaaatcactttattttcaactttgttctctcttcagactttccatgtttagcgttcattcattatccaaacctccatctggccaaccaaggttcttccttctcatcacagggcacattgccttggccccattcattcaagaagaacacaggccttgaaacagcaggacaacaccaattggggagccacgccaaaagtggccttatcgagtacatcggtcattctcatttacaccaacatatgtggaaccacttttcaacattcctcgggtcacaacggaggagcattacagcgtctcaccctatacagtcctcggggcacacgtccaacacacaggggccgcgggacaaatgttcactacgaccaggcccacccacatcataagttccagcgcaattggcccgtaggatttccatccacactttgcgagccgattttggctctgtagacgcacagcgattataacaagttcttaatgaattcccaagtgtccacaacggacagtctaagaccgttacacaacgccagttcattcggcgtgagagccataccgttagcagaatcgcgatacacacaacgcaggcactactattccacttagtatacgccatctgtggaacccgtatgtgatctcacagtgtgggaccgccattcagattacccttgtcacgcacacacacaacttcanaacgacgtatacaccgataaccgtataatgttcgccgtggatacactttacagcattctgtgcgcccagacgccacaattgttgacacgattcatatgctactactacacatcatcatacgctacaagacaacgccatcaatcaattcaagtcacaagctgatggacacacacacgtacatacgcgcagaccaacatcgtgtctcaccaaaccctgtacaccctaagcacacaacctgtgcgagccaaccgcaacacaaacatctacacacacaccaacccggcgcgcggcacacacacaggcgcagaccacactgcaggcaccagcgcaaacgactaccaacaaaccaccgccaccgcacgctataacttacacacacgactcaacacaacgcaattgacactgacgccacaggccaccaccacacacacaccctacagagacgacatcgacatacacagactcacaccaacacaccaaggccacatcagagccacactcacacacgcacacagcgacctccctcagatcaacgcagcacacccatcgatcactcacggcgcaaatgcagcgtaaggagtactccgagcagactgaaatggaagcacagcactacaacgacgaacatagcgacaatccacccctctctattcaggagagcagaatcagatacagaaaccaggccagcgaccgagcggatgagcaaggacaagcgcacagacggagcacgagatcgcaacgacagaagagaaggacacaaccaggaaacggcgaaacagaagacaaaacgcagaaggagcagtgacgacgagcaagacgcagccaatagcacgcccagaagctcgctacactcaagcagtagcgccagaagcgtacagcacgtgccactgcacgaagcaagcgcgtgcagag

SEQ ID NO: 546801 - DNA, 236 bp, Homo sapiens
  misc_feature (95)..(95): n is a, c, g, or t
  misc_feature (127)..(127): n is a, c, g, or t
ttgcggggcgtgatccactctgaccagttgacggtgcggcccaggtggtagatgtcgtcttcgaggcggtagacgcgtgaggcaacgcgccagancacgcgctgcgcgaggcggctctccaggttgnggcgcatggcgaagtcgaccagggcagcgagacgctcttgcggcgtgcgcagttggggtgacggcggcacttcgatgccaccgcgcgattcgttgaccacggcgcggtt

SEQ ID NO: 546802 - DNA, 212 bp, Homo sapiens
gatggataatagatcagaaaacaaaaatcatcctggaaagaccactccatgactagatggcttctctagcaagtgcatccaccattcaaccagccacttctgtcacactgaaaaggacgccgtaagtcaatcttacaaatccagtgtaaccatcgtataccaaatgtgcatcgccttccaatccaataatcattttttcacacagcgcatca

SEQ ID NO: 546803 - DNA, 314 bp, Homo sapiens
  misc_feature (6)..(6): n is a, c, g, or t
gggctncagacaactgatccacacgggaatcagcattattgtcagtatggctgccggattcactgactttgcggctggtaaagtaatcgctggcttctttaaagtcttgtgtagctctggcatcgatatcatgacgagcatcatggctggcccgtgaaccactactggcttcatgtgagtcaagatcactgccatcaatgcttgccttagctccggcctggagaccaacccctccaccgttacccaatacacttatgcctaaatgccctttagcataagcatcaccgtaaaggccaagcgacgcatttgtactt

SEQ ID NO: 546804 - DNA, 784 bp, Homo sapiens
ggccatgacgcagccggagagagcttcacgcacaccatctcttcgttcttcctgaactctgtcacggagggggcctttgtttatttatttttgggaaactctgcttcgccactgaaggtactctgcaccccagaaggaatacgacttcagtgtttcatgaagtattttacagacgaaatgaaagtgaactggtgtcacaaagatgctaagatctcatccagtgagcatatgagaatcggggggagtgaagagatggcttggttgcagatatgtgagccgactgagaaggataacggaaaatacacttttgagattttcgatggcaaagacaaccatcaacgctcccttgacctgtccggacaacgctttcgatgaacgcatttgcagaattccagcaattcaaagctgctgcttttgcagacgaagcaatcgtggcacggttgatcggcggcttgcctgacgtggtgaccatcatggaacgggaagaccttgaatctgacctgcacggtgttggaaacctgaccccgaagtgataggttcaagaaccgaccacggacatccagctcagcgagcacttctcggtgaaggtggaacaggccaagtacgtcagcatgaacatcaaaggcgtgactccgaggactcgggcaaagctacagcattcagcatcaaggcactaagtattggggggacaaagatcgaccgggaccgtgcaccgtgttccaacacgcgggagacagatcccggacaatggccccggcccacgaagcaagcccaggcaatcccc

SEQ ID NO: 546805 - DNA, 205 bp, Homo sapiens
  misc_feature (70)..(70): n is a, c, g, or t
cacgagcgccagtaccccctgtaatttagccagctgaaagtactccggagagaagcggagttcacaacancatcattatgcgaggtacagccctttaccacagcgcctagtggtgctcggcggcgcaaggtgctcggcggcgcaagcttgcggccgcgaacacaacttacggtggacccggtcacattcaacgctcctaagtcca

SEQ ID NO: 546806 - DNA, 505 bp, Homo sapiens
cgattttcctgcctcagcctcccgagtggctgggattacaggcatgcaccaacacgcccagctgatttttgtgtttttggtggggacggggtttcactatgtggtcaggctgatctcaaactcctgacctcaggtgatccgcctgcctcggcctcccaaagtgctgggattacagggattacaggcatgagccaccatacccagcccaatgtttttaagtttttaaagttatttctcctgggagtcatggctcacacctgtaatcctagcactttggaaggccgaggcgggcggatcacgagattgagaccatcctggccaacatggtgaagccccgtctcaactaaaaatgcaagaattggttgggcgtggtggcgcatgcctgtggtcccagctactcgggaggctgaggcaggagaatctcttgagccaggaggtggaggttgcagtgagccaagattgcgccactgcacgccagtctggcgacggagcaagactccatctc

SEQ ID NO: 546807 - DNA, 174 bp, Homo sapiens
tgtgtgtatttgaatgtgatttctatgtatatgtgtgtagtagtttgggtgttatttggaggtatgtgttattttggtgtatatttgtgtgtttggagctgtgtgtgtgtgtgtgtgtgtgtgtatatatagatgggtatttgtgtatttgtgtgtgggggatggagcacccat

SEQ ID NO: 546808 - DNA, 674 bp, Homo sapiens
  misc_feature (657)..(657): n is a, c, g, or t
cggatcacaagttcaggagatcgagaccaccaccctggccaacatggtgaaatcccgtctctactaaaaatacaggaattagctgggcatgatggtgcgcacctgtggtcccagctgctcaggaggctgatgcgggagaatcgcttgaactcgggaggcggaggttgcagtgagccaagatcgcaccactgcgccactgcactccaccctgatgacagagcaagactgtgtctcaaaaaaaaaccctaaatgcataaggactaagacagatagaaacaaagaaatataggaatcatagatttttaccttattttaccttatgacactgttgaccaacagccaaagtcagaatcaattatgtaactctcagagcctagaacaaaatgaaaatatgggttcccttgttcaagaatgactaataattttaagaccggggacaggcaaacattgagtgtggggcccttgtgcacaccggccctctaccactgggcaagccacacagccacgtcagccctggacaagttattgatagtgtatgatagaactaaggtgacggttccctttgggacacactctgatcaccagtgaccaccagtcagcagatgggctcaagccgcatgaagatgagccgttcccagaggcattttccaatccaanaagacacgccgctttct

SEQ ID NO: 546809 - DNA, 413 bp, Homo sapiens
aggatcacttgaacatatccaaccaatatggatacaaattctgtactaatatggaaacaaagtttagaaagagatatctcaaaacatcatgttgttaatagcagttatctctgagttgttgatcatgggtatttttgtttgtttgttttcttctctataattgtgcgtgttgtttttgtttttgtttttgtttttgagacgaagttttgcccttgttgcccaggctggagtgcaatggcacaatctcggctctccgcaaccttcgcctcctaggttcaagcgattctcctgcctcagcctcctgagtagctgggattacaggcatgcgccaccacacctggctaattttgtatttttagtagagacggggtttctccatgttggtcaggctggtctggaactcccgacctcag

SEQ ID NO: 546810 - DNA, 327 bp, Homo sapiens
aagacggcgagtataccggactccagttataactgtactatgatttaatggatgcctattgtaactgactcatgtccatatagctgagttctggtgtaaccgactctggtgtctcccatccctgtaatatataacgctgtgtgacttcaacggagtcctcagcctctctgggcttcagtgcccttatctagtaaagtaggggataaaacaggcacttacttcactgcagtgtagtgaagatgaaacagcatatgcctgcgaacatgatgaacacagtgcttagcacagaaggagtgcttgtgaatgctaacatcactgttgctatta

SEQ ID NO: 546811 - DNA, 187 bp, Homo sapiens
ttctctctctccaaaaaatagcatcccccgctctgccctgtgcacattcggccccggactcggcagagggcgtggagaggagtgtccggcagagggcaacgcccgctgttcggtttgcgacacgcagcggggaggtgggcggcagcgtcgcggggttccagaaaccaatggaaatcccaatggggaa

SEQ ID NO: 546812 - DNA, 113 bp, Homo sapiens
aaggcaggtgagtggtaggaagttttctaggaggtgtatgagggggaaatggtggggtcgtctgggccatagaggacattcaggatgactgggtcgctgtggtcaacacttaa

SEQ ID NO: 546813 - DNA, 1003 bp, Homo sapiens
gactcgcgcccttgccggtgcaccgaaccccgccatggagcggcgtcgctgcgcgcctgtcttcggcgccgtgggctggtgctcctgtcctgcccctctcctcttcctcctcttcggacacctgcggccccgcgaagccggctcctgcccgccctgcccccgttgggctgcctgctgggacgagaccccgcaacgcgtgcggttgttgccctaatgttgcgcccgcggagagggcgaagccggtgcgtgggattgggcggacgccggcaggggggtacttggcgccgggcattggaagtggttgaagagcccgcaaaaaggcggcaaggggtaaaaagccgggggcagacaagccggcgggcacgggggatgtaagcagggcgtgtaccagttgttgcaaaaagaaggccggtaaccccaggtgttggcgacaggacgagggtgacccaaccttaaccccagaaggtggtttgcacaagttgtggcgcagaccgacaagaaccaaaaaggggccgaagaagccgcggggaaagaagggccaataaaccacatgtgtccagcaaggggcaacttgcgaagcaagggccttcccaataaggtggacgcccccaaaaggacattcgggaaattggccactggttgcccaggtgtcctagacccgggaggtctcgaaatcccaaacactgtcttcaatcgggaaccaggtcaacaggggccactactgggtccacaggaaggaaaccctgcctgtgaccggacaccctgccagcaaaccgggtggccagaaagtaagcaccggggggcggaacccccaaagaagcaaaccggactgagtgcagcacaaaccagacggcaacgaccgcaaataggcggcccatcaaaccgaacggggggggcacacacaatactcgggagacagcaaacaagcgggacagttcaccaccattcgtgcgacacaacacgcatataagacaataaacacgagcgcggccacaagcgccgc

SEQ ID NO: 546814 - DNA, 351 bp, Homo sapiens
  misc_feature (38)..(38): n is a, c, g, or t
  misc_feature (215)..(215): n is a, c, g, or t
aggtaatttttattccggtcctatgtgattgtatgtantctccaaatcttctacaatagatatataattattttataaaaggaaaaaggatcaggctggtggctcaggactataatcacagcatttggggagaccaaggtgataggaatgcttgaggccaggagttccaggcctgcctggataacatagtcagaccatgtctctacaaaaaaatnaaaataattagctgggtatggtggtgaatgcttatagtccaagctacttgggaggctgaggcaggaagattgcttgaacctgagaatttgagcaagaccctgcctcaaaaacaaaacaaaacagaaacaaaaattc

SEQ ID NO: 546815 - DNA, 736 bp, Homo sapiens
ggcgatcagatcgatctaagcatggcgactgtcgaaccggaaaccacccctactcctaatcccccgactacagaagaggagaaaacggaatctaatcaggaggttgctaacccagaacactatattaaacatcccctacagaacagatgggcactctggttttttaaaaatgataaaagcaaaacttggcaagcaaacctgcggttgatctccaagtttgatactgttgaagacttttgggctctgtacaaccatatccagtgtgtctagtaatttaatgcctggctgtgactactcactttttaaggatggtatgagcctatgtgggacagatgagaaaaacaaacggggaggacgatggctaattacattgaacaaacagcagagacgaagtgacctcgatcgcttagggtagagacacttctgtgccttatgggagaatcttttgatgactacagtgatgatgtatgtggcgctgtgtaatgtagagctaaaggtgataagatagcaatatggactactgaatgtgaacaccagagacgctgttacacatatagggagggtattccaggaaggttaggacttcctccaagatagggatggtatcagcccagcggcgaacagctactagaagcggtccacccacttaaaatagggttggtgctaagagacaccttctggttctcatagggggctggcgtcagccacgcggattgggggctggaccaagctctta

SEQ ID NO: 546816 - DNA, 454 bp, Homo sapiens
  misc_feature (52)..(52): n is a, c, g, or t
  misc_feature (74)..(74): n is a, c, g, or t
  misc_feature (103)..(103): n is a, c, g, or t
  misc_feature (178)..(178): n is a, c, g, or t
  misc_feature (252)..(252): n is a, c, g, or t
tctccccttccccataaatggatccgtggtcctgtgtgacctgaaaccccanacagaagtgtccatgggtgaanaagtttcctggttgaaagtaagctcccangccctggcttctgtggacagcagattcttttcccttctcacaaggggctcatttaaaatttggaggctgggtgcntggtgcacgcctgcaatcccagcactttgggagactgaggcgggcggatcatgaggtcaggagatcgcgaccancctggctaacagtgaaaccctgtctccactaaaaatacaaaaaattagccgggcgtggtgcgggcgcctgtagtcccagctactctgaagactgaggcaggagaatggcgtgaacccaggaggcggagcttgcagtgagctgagatcacgccactgcactccaccctgggcaacagaagtagactctgtctcaaaaaaaaaa

SEQ ID NO: 546817 - DNA, 240 bp, Homo sapiens
ccaatttagcggggctttaaatcgcttgaacccgggaggagagattgaggtgagcagagatgtcgtcactgtactccagcctggcgacagagcaagtctcttgtctcaaaaacaaaaaaaaaaaaaaaaaaaaaaaaagggattgttttgttcggggttcctgcgttccccataacctgttgggtttggaaattgggggcccctctccgggttacccacaattttggtctgcggattttt

SEQ ID NO: 546818 - DNA, 1209 bp, Homo sapiens
gtttctttcgctatgggtttgccgacagacacacagcgtgtcggtcgaaatacctacccgatatcacacgccgaaaatgggatacggaaaagactcatatcaagcagttgtcgtcgattggacacagtacgattcgcgtgcatgtcctactcgacttacttggcgcatcgtgatcctataaagtgcgggtggcatcgtacagagcagaaccattgtgtacaaaagtattgaacaatagagaggtcatgccatgtagcaattggagtataatggtgcctcccttgcgaccggtcaatgctcgtgtggctcccttttggaataaaaactttgcacaaggactggtatgcgttggtaaaccgcttggttaaatcgagccaatgtggactcactcatcgctatgttgggcacaaatttttagtatggaacccatgtctacaggctggcgtattgttgaaccattactacgaattagaatgggcgctctcaacgtgtaaccatccacgaaagtaccattttaatcggatagacatcgactgggactttaacaggggtgaatccacttcgtgcaagagtctggcatcgtgctgccttggtttccctggacttctgtttttgcctgactggatgcataggatgaagttatatagaaggcttggtcatgcgtcccaatttacactgggggcaggactcctgttagtagtctaatgtctccctatacttgtggcgtttgacttagctacttgggggatgcttgacagacaatatcttaaatgtcgatccgggttgtttataacccatacccattcgggggttctcgaccttgtaaggcgacgcgctttagcagaccgttgtacacggacgcactttagttgaacgcggaaaaagttttgcttccatcggaggacgacggttcaaaggcaacgtgttaaccattgtcccaggaaaccttggtctggcccttacgaaacaccgccctgaaactaacaacgattgatccaactctgtggttggcccaagattgtatcctgtgggcttaagggtacacgtttgtgtgtaccacacgccattgtccgttggcgaagccccaggagcgtttggccttaaacaaattgcgtctttttgagttgcccaaagggcactttggaagaaacttccctaactcgttgaacggtgtcgcgtgaaatttcgccccaagttgggataacccag

SEQ ID NO: 546819 - DNA, 1793 bp, Homo sapiens
  misc_feature (671)..(671): n is a, c, g, or t
tgtctgggtggccgaagtcgtccgatgattcattctgcagacattcaaggctctcgtctatctttttgaatcgcagggtcgagtgagtgcccgtgacatctctgctcttatctaaatgttgccggtgacattgtggccaccaccagacctgagtctgaactccgacaagcgcatcccagggtgcatgtcgaacagaggacttggtgactagggaagagactcgtcctttcatttctatccttccaatacgcccgttggcgtgtagccataaacaacctatagtctgaattcttttttgaacttaagcacggttttacatccttatgctaacagttgataatggtcctcatggtacattcctaacgtagagtttatccaaacgaggatatggtatcacgaacattgatgctagaaccattccatcaaacgttggcggacaagtttcccttcatctgcactgggggccctttgctcccgacgctagggacgcgattgcattttgcacatgcaggcgatttcttgaacgacctctaatgaagaatgctgggcaaaagatgtggaaccataaaatggcaattcgtaatgcctgcctttggtagcccttggcaacaagcctaacacttagttggccatcgattaccgtccgttacgttaagttgcatttcccaaanacgataccaattctccgaggggtaggcgtccctccctgctcctaaattttggaacctagaccgtaagtgccattcaccaacattaaataattgggtattcacaacaaacggtaagcggaaagaaaggacattggaggtttcctccccaaacgtggacgaaggaaggtccgaaggggcaagaaaactttaatcccccctcttaattccaagaagaggcggcggaaaacagttctaaaagccccccttggcataattcacgaggggaagctaccaatattccccctgggggccaccatagaaaagccgccttgtgttctcgggtggctgaattttattcccaccgttttggaacccacatggtcacaaagggccacatagcggcaggattctccacccgggacgacaagggcgcacacctttcacaattgcacaagagctttccccgaggtaatgagggccattccaatgttaaggagtcacaagggctgagggcattacagaggggccccaagcaagtaacacgcttggcttatgccagaaacacaaggaaggggccaagtgtaatttccccaatgcgtggaagcacttttgagcactcttggtggtgttgtctcccctcaaataacacacacccagttcttttgcgcgccctgtaaacgtgtgtctccccacttatcccttcccacaggtgcgcaaggcaatttcgccacggcaattacttatgggcgcttccaacgccatcccaacggtcagagaggcccattcccccgcgcaacagcagagctacgggataagagacaacgtgtaaggatccccagtcgtgtggtccctacctgttgaagagtgtggtcaaacgtacaacctgttttgccgaacgaaaaggggacaaaccccgtgggcagcaatcaacacaacagacactgtgcttgtggaagaacctctcctgtgtccagcgaaattatgcgttggtacctcgttgaggcagaaaatctcccccgtggcactactcacgaatagataccatcgtcggtggtgttcacccgacgaaaattatttggtggggactagacgctctcgatcagggagagcccatctagcgagagactactcaatcaacagaga

SEQ ID NO: 546820 - DNA, 218 bp, Homo sapiens
gataattaaactgacgacgaatgcttagtgcatatattgcagtatcatctgatgctaggcacctacaaagcactactacaagaggttagctgttatatatatttctattagacagccattcttacatgtggtattctgtgtgtgtggaaattgtagtcgattgaacaaggctttcacaaatataaattttacaatgataaaaatcctatttgcatttc

SEQ ID NO: 546821 - DNA, 378 bp, Homo sapiens
  misc_feature (87)..(88): n is a, c, g, or t
  misc_feature (253)..(253): n is a, c, g, or t
  misc_feature (322)..(322): n is a, c, g, or t
  misc_feature (364)..(364): n is a, c, g, or t
  misc_feature (369)..(369): n is a, c, g, or t
tttttttgttaagtcttttacattttaatagtttttgaagacaatctaggttaagcaagagcaaagtgccattgtttgcctttaatnngggggtgggaagggaaagagggtacttgccacatagtttcctttttaactgcactttctttatataatcgtttgcattttgttacagggtgaaacctctgacccctcgcgacaccgtaggacttgacttaaatattcggggtgagtaagtagttgggtataaganctgaacttttcatctgcagaggcaagaaaaatatttgacattgtgacttgactgtgggaagatgatggntggcatgtttctagtttgtatatgtttgccatctttgtgatnaagangatttaatt

SEQ ID NO: 546822 - DNA, 603 bp, Homo sapiens
  misc_feature (23)..(23): n is a, c, g, or t
cgcgggcaggtactttcacaggnggtgggaggaggtattgcgctgggtccactgcttcccagctccacgtgacctttcctctcaaatttcctcttgatttcatctttggcagaactggtacctgcccttcagctccaagaaacaaaagagcaggggggagtcagaaggctttgactacctcacccttaactagagatagaaagtgcttgattaaattctttgtgatacacattgcatttccttccctttccaacttaggttcatataacaatgaaggatcaattaaaatgaactccacctcccttctcccttagggtaaatatagattcccttagggctgagttgggcagggccatctacactaatgaaaagtcttctaggagaggtaatctggcctgttctgggctaggtacagaacaccacatcccatttgccctcattaactcattctttaaactcattcttttcctggcagcctcccttttctttctatccttttctgtataatcccatttagctacccaccataactctactttggatcatggaatctaggataccatcactgacaacgtttgtgtagataactgtctcttatcagta

SEQ ID NO: 546823 - DNA, 299 bp, Homo sapiens
gttatgaggatgagtaactagttcacttgcactgcgttcacatacgtgagacattctcaacttcaagattgtttcagtgcttctctcccccttgatctaaagcaggctgacatgagtttctgtcagctgcgatcaagagtcatgactcttacagtgggtaggattactccctttttttgttgtcattaaggaaaccttttgtcaattttggcttttgttgccatttcttttggtgttttagtcatgaagtctttgcccatgcttatgtcctcaatggtattgcctaggttctcttctag

SEQ ID NO: 546824 - DNA, 786 bp, Homo sapiens
ctgatactcggatctgggagctgaacagacgttgcataagatcaaaagatagaattatcatgtcctgtgtgaactagttggatactagagtaagaacgatcaacatatcccaagacatgatttccgagctaacctaaacgcgttgcaaacaaccgtcatggtagacgagcagatcatggtgtcacaaaactgccttggtactacctatgcatggaaacacactgtgtctcagccccttggatgcgtactttatcttctaccatcagtctcaaagcaaagtagactcagggcagaccctttgtcctggctaaatgatgcgatagcactcgcgcgcacgattattttgtaatatctacccattaaggccatcctgcacttgtgataaacacaacatgagacttattgttccgagtcaaacacgatatgactaaaagacaatacagtagcagcaagtatacttttagtgactacctcttccactcaattcttgtgagtgactagcacgaattgaaccgactgctatgtttgtaccaatacgattatggtggccttcaattgggactaccaaccatgcatcgattcgactccccataatctattatttcctcaaatcaaaaatctcaagatgatcctaaccccgactgagtagatctattggggaagccgcgtaggaactttagatttctaacctgttcggaccattcctggggtgaacgcacaatgaagtccctggcaactctttagtctttaacataacgtgccaccaatctagcacagccgggcaat

SEQ ID NO: 546825 - DNA, 246 bp, Homo sapiens
gggtcagttagtcttgccgagtactcggagagactagggtggaatgtagggatgctagactcttgcgtcaaacccctgactaatagacacagtgccatacccgttccttgtagtatcccgatgaggcagtaatttttacatgctccatctggctactacaaacagacctggaatcgctcattgtatagtcttcaatcagccacatggccctcgtagtatcagccattctcatccaaatcccctgaa

SEQ ID NO: 546826 - DNA, 272 bp, Homo sapiens
gcctggccaacatcgtgaaccttgtctctactaaaatagaaaatcactcagacaaggtggtgcacacctgtaatccagctaatcgtcttgtctcggcctcctgaatagctgggactacaggtgcccaccaccacacctggctaatttttgtatttttttgtagaatggatttcaccatgttgcccaggctgttcttgacatcctgagctcaagcatctgcccaccttagcctccaaagtgctgggattacaggcgtcgacccatgccgagcc

SEQ ID NO: 546827 - DNA, 208 bp, Homo sapiens
ctgtaacatgtatatactgagtaagtacactagtacgttgtcgtatgcaatattggttgacatgtgcagtggcttgagcccgtgtgaccgcagctctcaatactgagggaaaggagcactaagcagcatacctctgtggaaacaccgtgtggttcgtggctttagggattgaaatagcttcaataaaattctgcctttgtgaaagaca

SEQ ID NO: 546828 - DNA, 359 bp, Homo sapiens
  misc_feature (43)..(43): n is a, c, g, or t
tcaagaccagcctggccaacatggtgaaacccttctctactanaatacacaaattagctaggcattgtggggggtgcctgtaatcccagctactcaggaggctgaggcaggaaaattgcatcgaacctaagtggcagaggttgcagtgagctgagatcgcaccactgcactctagcttgggcaacagagcaagactctgtctcttaaataaataaataaatagattaccacgaaaaatgaaaacgaaaaaaacagacatacaaaataaaagccccagttttttattatcggtatttaactgagttaactctgtcagatttgctgcaaacatttctaaatacttgctcttggtatctata

SEQ ID NO: 546829 - DNA, 104 bp, Homo sapiens
tgttgggataacatggctgtgagccattgcgcccagcctcagttcctctctttaaggtctcctttccagagagggataggacctcaaattgcagggaggggaat

SEQ ID NO: 546830 - DNA, 1030 bp, Homo sapiens
  misc_feature (341)..(341): n is a, c, g, or t
  misc_feature (347)..(347): n is a, c, g, or t
  misc_feature (404)..(404): n is a, c, g, or t
  misc_feature (438)..(438): n is a, c, g, or t
  misc_feature (440)..(440): n is a, c, g, or t
  misc_feature (448)..(448): n is a, c, g, or t
  misc_feature (450)..(450): n is a, c, g, or t
  misc_feature (461)..(461): n is a, c, g, or t
  misc_feature (465)..(465): n is a, c, g, or t
  misc_feature (520)..(520): n is a, c, g, or t
  misc_feature (915)..(915): n is a, c, g, or t
  misc_feature (979)..(979): n is a, c, g, or t
  misc_feature (1005)..(1005): n is a, c, g, or t
tgctgggtgttaatcggccgagggggaaggcatgatggctggcgcccatggaggtggccgtgtgtacggactcggcggccccgatgtggagctgcatcgtgtgggaacttcactcgggcgccaacctgctcacctaccgcggcggccaggcgggaccccgcggcctggcgctgctcaatggcgagtatctgctggcggcgcagctgggcaagaactacatcagcgcctgggagctgcagcggaaggaccagctccagcagaagatcatgtgccccgggcctgtcacctgtctgactgcatcacccaatggtctctacgtcctggcaggagttgcagaaagnatccanctgtgggaggtctccaccgggaaccttctggtcatcatgagtcgaaaataccaggangtctcctgccttcagttcacaggggaaagcagcnanttcatctnanggggcaaggantgcntggtgctggtttggagcctctgcagcgtgctgcaggccgacccctccaggattcnggcgcccaggcacgtctggtctcaccacacgctccccatcacggacctgcactgcggctttgggggccccctggcccgggtggccacctcctcactggaccagacggtgaagctatgggaggtctcctcgggggagctgctgctctccgtcctctttgacgtgtccatcatggcagtgaccatggacctggctgagcaccatatgttctgcgggggcagtgagggctccatcttccaggtcgacctcttcacctggcccggacagagggagaggagcttccacccagagcaggacgccgggaaggtcttcaaagggcacaggaaccaggtgacttgcctgtcagtgtccactgacggcagcgtgctgctctcaggctcccacgacgagaccgtgngcctctgggacgtgcagagcaagcagtgcatccggacggtggccctcaaaggccagtcaccaangccgccatcctgctggcgcccgtcancatgctgagctcagacttcagccca

SEQ ID NO: 546831 - DNA, 890 bp, Homo sapiens
gtgttctacatgtgcgttatcagtatgtgcttagctgtaagtgacaagtatttttgaacagaacgtttacttagaaataccatgcactggtgctaccacgttaaccggctgacatttagcatattgatagttctagagagaacagatataatctaagaattcctatgacaagattgtatcattagagccagaaatactttgcatattaatatataatacagattaacattatatataatatgtacctgtgtcacttctgacatgagcctgtaaacatatattcatatatgtacctgcacatgtacccacctgatgtaggtctatccctttagtatggacttaaaagtacttattcatataccttgtaactaaaaattagaacagtccctagaattatgaacttttaagaggtctgactagaaattttgcacttatcaaaaacgttacttttaaacatataagttagggctaggcacagtggctcatgcctataatctcaggcaattttggacggcccagacaggaggatcacttcaggccaggagttcaagatcaacaaacctgtttaacatgggcagaccccatctctattatatatatatatataaacctagagttgatatcttcccctaacgaggcggtgatcttcggcgacgcctcaaaatgcctaagcggttaggtgtccgaagcttcttcctaacagtaccaggtaatactacggtaactggcctaggatgagctgtcccgcccagtgaaaagcaagaacaggacttattcatagcatcggacgatcatcaaaaattgaattacaccgaccggttgagatgtacaacaagaacggaagctagacgactccgttcccgaacaagggcaactatcgacagcaaaaa

SEQ ID NO: 546832 - DNA, 319 bp, Homo sapiens
  misc_feature (71)..(71): n is a, c, g, or t
  misc_feature (100)..(100): n is a, c, g, or t
  misc_feature (182)..(182): n is a, c, g, or t
  misc_feature (197)..(197): n is a, c, g, or t
ttaactgtgttccatggcaaactgccttcctgtaaacgttaagaaaaaaaagcctaggacccaggcacggntgtctcgccctgtaactcccagcactttnaaaaggcccgaggtgggtcagattcacttgaggtcagttctttcaaagtgcttggattacaggcgtgagccaccaattgccncctaaggccagtgantcttttgtcttttttttttttttgaggcagagctttactctgtcacccaggttggagtgcagtggtgtaatctcggctcactgcactccagcctaggagacagagtgacagttagtctacca

SEQ ID NO: 546833 - DNA, 760 bp, Homo sapiens
  misc_feature (439)..(439): n is a, c, g, or t
  misc_feature (760)..(760): n is a, c, g, or t
tgagacaggagttacagtccctttggccctcacatccaataaagagactgataccactggaagaaaacaaaaaaaaaaaaaaaaaaaaaaaaaaaaacttgtgcttcggcgccgcgcctcgggcccccggaaaaggcttcttcaacacccactctcgcgtttgggccgcgcgcgggccccaggcgggacagcggagacccctggcgccacacagcgggtcaccagaggagaacatccgcggggtcacaatgacttagaggcgctcgtggtgatttctctcacccacatataaaaacaaacacgcccgcggcgggaaaaacacggaagactgtctcttcgtgaaaacaaaataccacgaatagtggcgatctctcggagagaagtcaccaactaacagcggggactctcctacttaaacaacgagagagatcgttcccanagagagagaggagaacctctccaagaaatcttctaacaaaaatattatagcagcgcccacgcgtcgcctgtggtgagggcaaacaaaaaaaaacgaagaaagaacgaaaaaagacaagaaaacaaaaaagaaaagcacaaaaaacaaaacaaaagaaagaagaaaaaacgaaaagaccaagcaaaaaacagcaacagcaaaacaaaaaaaaacaaacatggcacagcaacaaaaatgaagcacagacataaacaacaaggaacacagacagaccaacatagcagaagaaacagataaacaagaagaacaaaaagcacacan

SEQ ID NO: 546834 - DNA, 442 bp, Homo sapiens
atcatccggctcagtctcactgtaggagaggatgcgtcatgacattaccttaccagccacaggcatgcaactaaatgtgcatggatctggtgcaacgtccgtgctggagaaacaaagataaatcttgattagctgtgcaataaagccagcagtggacgtcaccatttcaacgttactaggcgagagggcgactccagtgcctgccgtctttttgcctcgatgacattcagtgagggtcctccacatttaacaaaagtagtcctcatagttctaaaagtggttctcactgtcctgttattcttcagcttcttccgatcctgcttcggattcaggaggggaataaaactgaccatcagaaagaccaccaggtataagtgctgccctctctgcagcatcctgagctatcaggagtcggttcacttctactgctgggtaccgagct

SEQ ID NO: 546835 - DNA, 316 bp, Homo sapiens
  misc_feature (47)..(47): n is a, c, g, or t
  misc_feature (69)..(69): n is a, c, g, or t
  misc_feature (71)..(71): n is a, c, g, or t
  misc_feature (77)..(77): n is a, c, g, or t
  misc_feature (83)..(83): n is a, c, g, or t
  misc_feature (86)..(86): n is a, c, g, or t
  misc_feature (102)..(102): n is a, c, g, or t
  misc_feature (105)..(106): n is a, c, g, or t
  misc_feature (112)..(112): n is a, c, g, or t
  misc_feature (120)..(120): n is a, c, g, or t
  misc_feature (131)..(131): n is a, c, g, or t
  misc_feature (139)..(140): n is a, c, g, or t
  misc_feature (143)..(143): n is a, c, g, or t
  misc_feature (151)..(151): n is a, c, g, or t
  misc_feature (201)..(201): n is a, c, g, or t
  misc_feature (230)..(230): n is a, c, g, or t
  misc_feature (252)..(252): n is a, c, g, or t
  misc_feature (267)..(267): n is a, c, g, or t
  misc_feature (275)..(275): n is a, c, g, or t
  misc_feature (279)..(279): n is a, c, g, or t
  misc_feature (285)..(285): n is a, c, g, or t
  misc_feature (297)..(297): n is a, c, g, or t
tgaatgaaatgtggaaaaaaagtttggtgttgaattaatgtgaaaanaaagttttgagcaatgtatgantngtaagntatggnganggtttttaatttgggnttnntttttnttgttggntggtggttgtnttgtaggnnttnggccaggnagcgaaggtaaagggaaccagataggggctatcttgtggggtacggtggncagctggagcttctgggggtctgtggtgntgagggggttgttttgcctggnacccaggcatccttntcctctcntggnaaggtnttactgaagggntaggacagggctggtgtct

SEQ ID NO: 546836 - DNA, 713 bp, Homo sapiens
attctagagcccgagtcggcgagatgttattgtgggttctgtcctaggtgcttgagatggagtatggctctggtcgcccagattgaagtgcaaggggacacgatctcggttcagcgaaagcgtctgtgcctcacgtgggttcaagcgattctccatgccgtcagcatctcgagtagcttgggatcactgggcatgcacacaaggtaggcccagcataatgttgtatttgaagcagagacgggggtggctgcaggtagggcaaggctgtcctctaaaattttccacagatccgtcagggtggattccagggcgggtcctgaagccttcccccaaagagtcgctggggaattgacaaggggtgttgaggccatggtagccacttgaaggctggaagaattcgggataggagtgagggggaaaggcgcaacattgtaccccccccatagtggctggggaaccccttgtctcactctgattgcccattttggaccacatcggggctggtggtcgggttaccccctattcgaacatggactgggcaaaggttctgggggagggccatccgccagtgctggtggtgactggcgagctcatgcaaacggtgttgactcttacttcaaattgcctagtcgtcagtgcaagttcctaatagcgtgtgtgggaaacgactaactatcgatacgcaatatgaaacattgttgtgttggcataaa

SEQ ID NO: 546837 - DNA, 486 bp, Homo sapiens
  misc_feature (106)..(107): n is a, c, g, or t
  misc_feature (114)..(115): n is a, c, g, or t
  misc_feature (117)..(118): n is a, c, g, or t
  misc_feature (125)..(128): n is a, c, g, or t
  misc_feature (130)..(130): n is a, c, g, or t
  misc_feature (141)..(141): n is a, c, g, or t
  misc_feature (147)..(147): n is a, c, g, or t
  misc_feature (167)..(167): n is a, c, g, or t
  misc_feature (177)..(177): n is a, c, g, or t
  misc_feature (179)..(179): n is a, c, g, or t
  misc_feature (182)..(182): n is a, c, g, or t
  misc_feature (185)..(185): n is a, c, g, or t
  misc_feature (199)..(199): n is a, c, g, or t
  misc_feature (204)..(204): n is a, c, g, or t
  misc_feature (214)..(214): n is a, c, g, or t
  misc_feature (225)..(225): n is a, c, g, or t
  misc_feature (229)..(229): n is a, c, g, or t
  misc_feature (233)..(233): n is a, c, g, or t
  misc_feature (236)..(236): n is a, c, g, or t
  misc_feature (245)..(245): n is a, c, g, or t
  misc_feature (247)..(247): n is a, c, g, or t
  misc_feature (250)..(250): n is a, c, g, or t
  misc_feature (253)..(253): n is a, c, g, or t
  misc_feature (266)..(266): n is a, c, g, or t
  misc_feature (274)..(274): n is a, c, g, or t
  misc_feature (276)..(276): n is a, c, g, or t
  misc_feature (280)..(280): n is a, c, g, or t
  misc_feature (283)..(283): n is a, c, g, or t
  misc_feature (288)..(288): n is a, c, g, or t
  misc_feature (291)..(291): n is a, c, g, or t
  misc_feature (314)..(314): n is a, c, g, or t
  misc_feature (329)..(329): n is a, c, g, or t
acctcagcctcccaaagtgctgggttacagtatgagccaccatgcccagcaactcaatgttaattttaaaaactttttttttttggaagaatgaaaaaaatgaaannggaaaanntnngaaaaannnncntatacacaaanacactntctttttaaaggttaaaaangtgccttgtncntcntcntaagaaaaaaaaanggtgnctatttctgntggaaaggggnttcntacnagnaagggtccntnagnacnttaggaggtaatngaaatgcncnatantcngatcngcntaatgatgacactgatttttacntatgttatatgtacnaaatatattcattaagttattcatgtaagggcattttaactccatttaaattttacctcagaaaagcacttttactaggcaaaaaacctagtgaacattgaagcctagtaaaaattattttaaatttaagaaaacacatttttaaagcaaaaaaaaa

SEQ ID NO: 546838 - DNA, 150 bp, Homo sapiens
gaaagctagatcttgctgatgacgcaaatctcctctgttgcctccggcagcccaggtcgttgaacgatgccagctgcgatgagcttcgctcaccagtattcttggcttcctcctcctgtagaaacagaagcggcggcaataatgtccccg

SEQ ID NO: 546839 - DNA, 770 bp, Homo sapiens
gttgtcgctattgtgcttcatccgttcagctgaacaggaggatggatacagccgcgaggctaaaaaaacggagtttcctcttcctatgcttaaaagtctgatttacagctgttatgttgtttgtaaggaaacaaaagtgcatagtttagattttttcttggtggaatatgttggtgctgggactttatgagatagtcttataagaatcacgattttctacagcctgtcattgagccaagaaagtccagtttatgacacgtatgtactagtgaacaccgtcctcgatctgtacgaaatgtgacatgtttagggacatctccatgctgtcactctgtgatttgccctcttatgtttcttgggtcatagtggccaacgggaaagtcaaaattttctaagcaactttaagtaagttcttggaagacttagtgctgttttaaagtccagtttagaaagtaacttaattttaataccggtactaaaaattcgaaaatttcttctttaatcagattgcaatatggttaaaagagcaagactatttggacattgcgtgggcttatatctcccttggtttaacaaggtcattggtagagcaagagtggtatagtatcatctactctacttgaggctgtaaattttcattacagggttttgtaaatgtatccacgagaccatgatgcatagtaatggtgctcaatagatgtaagcatttaaaggcatttcgaatgaccgtgtattaataacggctttaaagattaatgctctttagaatg

SEQ ID NO: 546840 - DNA, 151 bp, Homo sapiens
ggttgagtcttctttcttatacataggtactatgtagaacagactcaatacgattgattgagtctgagtatagcagatattattggtactcccttaattcccgtgttccctggaaactttatagtaatactgattgtgaaacgtgactatg

SEQ ID NO: 546841 - DNA, 162 bp, Homo sapiens
caggaagaggaaggaaagagcaatcagatactcagtaaggtggctgggtgcggtctctcacacctgtaatcccagcactttgggagactgaggtgggtagatcacaaggtcaggagttcaagaccagcctggccaaggtggcgaaaccccgtctgtactaaa

SEQ ID NO: 546842 - DNA, 194 bp, Homo sapiens
tccccacactcccaggcctccagggtccgggccactcgtttccagcagcacacacccgtcctctttagctttcagcccctccggaagaagcctcgaatgggcttttgaggacacaaggtggggtgccctcaagccccaaagagcccctcatccttcctttgggaccaaatgtgccttccccagttgaaacttga

SEQ ID NO: 546843 - DNA, 1099 bp, Homo sapiens
ctctggagctcggaggttgacttcccgtcttgtgagctcttcccttttacatatagataagtgaaaagcaaaaggcattgttccttttttatgttttgtatcacgatctcctcatcctttgcatgtcgtccgtttggcatccctgttatgttaggcctctgctggatccagaccctcacgagaggctccccgcccacaggtgctcacattctggctcgggggacgaggttgggcttcgaggtggtgtgcttcagcctctggctgcagccccttctcacctatagtgaggccgggaagatgaccgggagtgccaggctcatgcatcctctgctgcagggaggagatctggaggtggggactgaacagcctccccactggctaagagaaacacgtgcagagaagcgctttgctggagggcaggcacctgtgggtgcccagacaggggagagagggatttggacctaaggcccagtgagccctgacatagcacgtggattctgcaggaaggtcacagacctgccttgtttgcctctggttctgagtacctctcctccttactgcaatgtcccctgaaggtacactctggctgcttcccacacactggtgcagaagcagaggccatgctcctggatgcctgcttgcctgatgctagttcttctctgtcccctgtgccctgtccatctgtctcctcccacaggtggggggcgggcgggggcatcctccacatccctccacatgttcctttaccttccttatctgtcctggctgcgtccctcgggttgagccgtttcacgctttcattgtgcgtccatcccgagggaaactgtagacagtgtgaagccacttctagtgtacaggggtcaaccagtgttttctgtaaagggctagatatttaggccttgtgggctgcaggctgtgtcacagccactaagctctgctgttgtattgtaaaaccagccatagtcaatacacaacgagtggtcagggctgtgtgccagtaaaactttatttataaaaatgcacggtgggccagatttgccccaaaggccccagtttcccaacctgtggtatataggattgcttctcccgtaaaaaaaaa

SEQ ID NO: 546844 - DNA, 297 bp, Homo sapiens
gcaatggtttcacgaccacatatcaccttaaacatgaaggacatgctgttcactggtacgtcgtggtcaaacatgcgcgtgtttgacgaccacgtagcagccactaaaagattatttaattccagattggaaatgacattttagtttatcagattggtaacttatcgcctgttgtccagattggcacgaaccttttcttccacttaattatttttttaggattttgctttgattgtgtttatgtggtggtcaaacatgcgcgtgtttgacgacgacgtacgtggtggtgaaacatgc

SEQ ID NO: 546845 - DNA, 271 bp, Homo sapiens
tgcacgagctggaggaagagacagaagaggcctcgccagcaattgtactcggcaccacctcctctgtgctgtccacctcctctgtgctgtccatgctgtccacctcctctgtgctgtccacctcctctgtgctgtccagctgtccacctcctctgtgctgtccacctcctctgtgctgtccacctcctctgtgctgtccatgtgctgtccacctcctctgtgctgtccagccccctgtgctgtccacctcctctgtgccctcctctgtgct

SEQ ID NO: 546846 - DNA, 3278 bp, Homo sapiens
ctctggagctcggaggttgacttcccgtcttgtgagctcttcccttttacatatagataagtgaaaagcaaaaggcattgttccttttttatgttttgtatcacgatctcctcatcctttgcatgtcgtccgtttggcatccctgttatgttaggcctctgctggatccagaccctcacgagaggctccccgcccacaggtgctcacattctggctcgggggacgaggttgggcttcgaggtggtgtgcttcagcctctggctgcagccccttctcacctatagtgaggccgggaagatgaccgggagtgccaggctcatgcatcctctgctgcagggaggagatctggaggtggggactgaacagcctccccactggctaagagaaacacgtgcagagaagcgctttgctggagggcaggcacctgtgggtgcccagacaggggagagagggatttggacctaaggcccagtgagccctgacatagcacgtggattctgcaggaaggtcacagacctgccttgtttgcctctggttctgagtacctctcctccttactgcaatgtcccctgaaggtacactctggctgcttcccacacactggtgcagaagcagaggccatgctcctggatgcctgcttgcctgatgctagttcttctctgtcagggcaacaggtttgtctatgctggctctaactcgggcgtggtccaggccccgctggccttctgtgggaagcacggcacctgcgaggactgtgtgctggcgcgggacccctactgcgcctggagcccgcccacagcgacctgcgtggctctgcaccagaccgagagccccagcaggggtttgattcaggagatgagcggcgatgcttctgtgtgcccggataaaagtaaaggaagttaccggcagcattttttcaagcacggtggcacagcggaactgaaatgctcccaaaaatccaacctggcccgggtcttttggaagttccagaatggcgtgttgaaggccgagagccccaagtacggtcttatgggcagaaaaaacttgctcatcttcaacttgtcagaaggagacagtggggtgtaccagtgcctgtcagaggagagggttaagaacaaaacggtcttccaagtggtcgccaagcacgtcctggaagtgaaggtggttccaaagcccgtagtggcccccaccttgtcagttgttcagacagaaggtagtaggattgccaccaaagtgttggtggcatccacccaagggtcttctcccccaaccccagccgtgcaggccacctcctccggggccatcacccttcctcccaagcctgcgcccaccggcacatcctgcgaaccaaagatcgtcatcaacacggtcccccagctccactcggagaaaaccatgtatcttaagtccagcgacaaccgcctcctcatgtccctcttcctcttcttctttgttctcttcctctgcctctttttctacaactgctataagggatacctgcccagacagtgcttgaaattccgctcggccctactaattgggaagaagaagcccaagtcagatttctgtgaccgtgagcagagcctgaaggagacgttagtagagccagggagcttctcccagcagaatggggagcaccccaagccagccctggacaccggctatgagaccgagcaagacaccatcaccagcaaagtccccacggatagggaggactcacagaggatcgacgacctttctgccagggacaagccctttgacgtcaagtgtgagctgaagttcgctgactcagacgcagatggagactgaggccggctgtgcatccccgctggtgcctcggctgcgacgtgtccaggcgtggagagttttgtgtttctcctgttcagtatccgagtctcgtgcagtgctgcgtaggttagcccgcatcgtgcagacaacctcagtcctcttgtctattttctcttgggttgagcctgtgacttggtttctctttgtccttttggaaaaatgacaagcattgcatcccagtcttgtgttccgaagtcagtcggagtacttgaagaaggcccacgggcggcacggagttcctgagccctttctgtagtgggggaaaggtggctggacctctgttggctgagaagagcatcccttcagcttcccctccccgtagcagccactaaaagattatttaattccagattggaaatgacattttagtttatcagattggtaacttatcgcctgttgtccagattggcacgaaccttttcttccacttaattatttttttaggattttgctttgattgtgtttatgtcatgggtcatttttttttagttacagaagcagttgtgttaatatttagaagaagatgtatatcttccagattttgttatatatttggcataaaatacggcttacgttgcttaagattctcagggataaacttccttttgctaaatgcattctttctgcttttagaaatgtagacataaacactccccggagcccactcaccttttttctttttctttttttttttttaactttattccttgagggaagcattgtttttggagagattttctttctgtacttcgttttacttttctttttttttaacttttactctctcgaagaagaggaccttcccacatccacgaggtgggttttgagcaagggaaggtagcctggatgagctgagtggagccaggctggcccagagctgagatgggagtgcggtacaatctggagcccacagctgtcggtcagaacctcctgtgagacagatggaaccttcacaagggcgcctttggttctctgaacatctcctttctcttcttgcttcaattgcttacccactgcctgcccagactttctatccagcctcactgagctgcccactactggaagggaactgggcctcggtggccggggccgcgagctgtgaccacagcaccctcaagcatacggcgctgttcctgccactgtcctgaagatgtgaatgggtggtacgatttcaacactggttaatttcacactccatctccccgctttgtaaatacccatcgggaagagactttttttccatggtgaagagcaataaactctggatgtttgtgcgcgtgtgtggacagtcttatcttccagcatgataggatttgaccattttggtgtaaacatttgtgttttataagatttaccttgtttttatttttctactttgaattgtatacatttggaaagtacccaaataaatgagaagcttctatccttga

SEQ ID NO: 546847 - DNA, 990 bp, Homo sapiens
gtcttgatctcctgaccttgtgatccacccacctcagcctcccaaagtgctgggattacaggcatgaatgaccgcgcccagccgcaggcgcaacttttttgagttttcctggccaggcgcagtggctcaagcctgtaatcccagcatttgggaggccgaggtgggcggatcacttgaggtcaggagttagaaaccagcctggccaacgtggtgaaaccccgtctccagtaaacatacaaagccattacagggcatggtggggcacgcctgtattcccagctacttgggaggctgaggcaggagaactgcttgatccggggaggtggaagttgcagtgggccaagatcatgccactgcaccccagcctgggcaacagagcaagactccgtaccaaaaaaaaaaaaaaaaaaaaaaaacaggtctatattattccagtttcctaattatcaattttaaacacaagaaaatttggggccgggcaaagaggctcacacgtgtaattcccagcattttgggagacgccagggggggagcattcacgaggtcgggagatgggcagaccattccggggctaacagggttgagaccccggtctttacttaaaatctcccaaatttcgccggcatgggggggttgtgccgctggaagtcccaagtacctcagggaggcaagcgcaaagaatggcttgaaccccaggagggggcggatgtgttggtgtagcccaaggatcacaccagtggatctccacctggcgtgacaagcgcgagactgctccaacacaaaaacaacaacaggggggggcggcaaaatttcaccggggggccagagttacgctaccaggtttgtgcacgggcccatgcgggcggataacgaagaccgggcggttaaaacgtcgactgcacacacctgaagtggaagcactcttcgggtgacatggacacaccagagtagcaggaacaataggatgtaaccgcttcggaagcggtttaa

SEQ ID NO: 546848 - DNA, 2868 bp, Homo sapiens
cacgaggatggatgactcggtaaccccaatagacaacaggcccaggttaatcaagaaagatgtgaactacacccagatcgtggtggaccggacccaggccctggatgggactgtctatgatgtcatgtttgtcagcacagaccggggagctctgcacaaagccatcagcctcgagcacgctgttcacatcatcgaggagacccagctcttccaggactttgagccagtccagaccctgctgctgtcttcaaagaagggcaacaggtttgtctatgctggctctaactcgggcgtggtccaggccccgctggccttctgtgggaagcacggcacctgcgaggactgtgtgctggcgcgggacccctactgcgcctggagcccgcccacagcgacctgcgtggctctgcaccagaccgagagccccagcaggggtttgattcaggagatgagcggcgatgcttctgtgtgcccggataaaagtaaaggaagttaccggcagcattttttcaagcacggtggcacagcggaactgaaatgctcccaaaaatccaacctggcccgggtcttttggaagttccagaatggcgtgttgaaggccgagagccccaagtacggtcttatgggcagaaaaaacttgctcatcttcaacttgtcagaaggagacagtggggtgtaccagtgcctgtcagaggagagggttaagaacaaaacggtcttccaagtggtcgccaagcacgtcctggaagtgaaggtggttccaaagcccgtagtggcccccaccttgtcagttgttcagacagaaggtagtaggattgccaccaaagtgttggtggcatccacccaagggtcttctcccccaaccccagccgtgcaggccacctcctccggggccatcacccttcctcccaagcctgcgcccaccggcacatcctgcgaaccaaagatcgtcatcaacacggtcccccagctccactcggagaaaaccatgtatcttaagtccagcgacaaccgcctcctcatgtccctcttcctcttcttctttgttctcttcctctgcctctttttctacaactgctataagggatacctgcccagacagtgcttgaaattccgctcggccctactaattgggaagaagaagcccaagtcagatttctgtgaccgtgagcagagcctgaaggagacgttagtagagccagggagcttctcccagcagaatggggagcaccccaagccagccctggacaccggctatgagaccgagcaagacaccatcaccagcaaagtccccacggatagggaggactcacagaggatcgacgacctttctgccagggacaagccctttgacgtcaagtgtgagctgaagttcgctgactcagacgcagatggagactgaggccggctgtgcatccccgctggtgcctcggctgcgacgtgtccaggcgtggagagttttgtgtttctcctgttcagtatccgagtctcgtgcagtgctgcgtaggttagcccgcatcgtgcagacaacctcagtcctcttgtctattttctcttgggttgagcctgtgacttggtttctctttgtccttttggaaaaatgacaagcattgcatcccagtcttgtgttccgaagtcagtcggagtacttgaagaaggcccacgggcggcacggagttcctgagccctttctgtagtgggggaaaggtggctggacctctgttggctgagaagagcatcccttcagcttcccctccccgtagcagccactaaaagattatttaattccagattggaaatgacattttagtttatcagattggtaacttatcgcctgttgtccagattggcacgaaccttttcttccacttaattatttttttaggattttgctttgattgtgtttatgtcatgggtcatttttttttagttacagaagcagttgtgttaatatttagaagaagatgtatatcttccagattttgttatatatttggcataaaatacggcttacgttgcttaagattctcagggataaacttccttttgctaaatgcattctttctgcttttagaaatgtagacataaacactccccggagcccactcaccttttttctttttctttttttttttttaactttattccttgagggaagcattgtttttggagagattttctttctgtacttcgttttacttttctttttttttaacttttactctctcgaagaagaggaccttcccacatccacgaggtgggttttgagcaagggaaggtagcctggatgagctgagtggagccaggctggcccagagctgagatgggagtgcggtacaatctggagcccacagctgtcggtcagaacctcctgtgagacagatggaaccttcacaagggcgcctttggttctctgaacatctcctttctcttcttgcttcaattgcttacccactgcctgcccagactttctatccagcctcactgagctgcccactactggaagggaactgggcctcggtggccggggccgcgagctgtgaccacagcaccctcaagcatacggcgctgttcctgccactgtcctgaagatgtgaatgggtggtacgatttcaacactggttaatttcacactccatctccccgctttgtaaatacccatcgggaagagactttttttccatggtgaagagcaataaactctggatgtttgtgcgcgtgtgtggacagtcttatcttccagcatgataggatttgaccattttggtgtaaacatttgtgttttataagatttaccttgtttttatttttctactttgaattgtatacatttggaaagtacccaaataaatgagaagcttctatccttga

SEQ ID NO: 546849 - DNA, 2528 bp, Homo sapiens
gagagccccagcaggtatggggcgggatgcgctgcctggggatgtcccccatgtgtgtgggtgaataacacgtgccggttgttttgcaggggtttgattcaggagatgagcggcgatgcttctgtgtgcccggataaaagtaaaggaagttaccggcagcattttttcaagcacggtggcacagcggaactgaaatgctcccaaaaatccaacctggcccgggtcttttggaagttccagaatggcgtgttgaaggccgagagccccaagtacggtcttatgggcagaaaaaacttgctcatcttcaacttgtcagaaggagacagtggggtgtaccagtgcctgtcagaggagagggttaagaacaaaacggtcttccaagtggtcgccaagcacgtcctggaagtgaaggtggttccaaagcccgtagtggcccccaccttgtcagttgttcagacagaaggtagtaggattgccaccaaagtgttggtggcatccacccaagggtcttctcccccaaccccagccgtgcaggccacctcctccggggccatcacccttcctcccaagcctgcgcccaccggcacatcctgcgaaccaaagatcgtcatcaacacggtcccccagctccactcggagaaaaccatgtatcttaagtccagcgacaaccgcctcctcatgtccctcttcctcttcttctttgttctcttcctctgcctctttttctacaactgctataagggatacctgcccagacagtgcttgaaattccgctcggccctactaattgggaagaagaagcccaagtcagatttctgtgaccgtgagcagagcctgaaggagacgttagtagagccagggagcttctcccagcagaatggggagcaccccaagccagccctggacaccggctatgagaccgagcaagacaccatcaccagcaaagtccccacggatagggaggactcacagaggatcgacgacctttctgccagggacaagccctttgacgtcaagtgtgagctgaagttcgctgactcagacgcagatggagactgaggccggctgtgcatccccgctggtgcctcggctgcgacgtgtccaggcgtggagagttttgtgtttctcctgttcagtatccgagtctcgtgcagtgctgcgtaggttagcccgcatcgtgcagacaacctcagtcctcttgtctattttctcttgggttgagcctgtgacttggtttctctttgtccttttggaaaaatgacaagcattgcatcccagtcttgtgttccgaagtcagtcggagtacttgaagaaggcccacgggcggcacggagttcctgagccctttctgtagtgggggaaaggtggctggacctctgttggctgagaagagcatcccttcagcttcccctccccgtagcagccactaaaagattatttaattccagattggaaatgacattttagtttatcagattggtaacttatcgcctgttgtccagattggcacgaaccttttcttccacttaattatttttttaggattttgctttgattgtgtttatgtcatgggtcatttttttttagttacagaagcagttgtgttaatatttagaagaagatgtatatcttccagattttgttatatatttggcataaaatacggcttacgttgcttaagattctcagggataaacttccttttgctaaatgcattctttctgcttttagaaatgtagacataaacactccccggagcccactcaccttttttctttttctttttttttttttaactttattccttgagggaagcattgtttttggagagattttctttctgtacttcgttttacttttctttttttttaacttttactctctcgaagaagaggaccttcccacatccacgaggtgggttttgagcaagggaaggtagcctggatgagctgagtggagccaggctggcccagagctgagatgggagtgcggtacaatctggagcccacagctgtcggtcagaacctcctgtgagacagatggaaccttcacaagggcgcctttggttctctgaacatctcctttctcttcttgcttcaattgcttacccactgcctgcccagactttctatccagcctcactgagctgcccactactggaagggaactgggcctcggtggccggggccgcgagctgtgaccacagcaccctcaagcatacggcgctgttcctgccactgtcctgaagatgtgaatgggtggtacgatttcaacactggttaatttcacactccatctccccgctttgtaaatacccatcgggaagagactttttttccatggtgaagagcaataaactctggatgtttgtgcgcgtgtgtggacagtcttatcttccagcatgataggatttgaccattttggtgtaaacatttgtgttttataagatttaccttgtttttatttttctactttgaattgtatacatttggaaagtacccaaataaatgagaagcttctatccttga

SEQ ID NO: 546850 - DNA, 232 bp, Homo sapiens
aataactagcctataccatgctctgccagactcactccagaacacacaggcattcttactagccatcgaacatgccatccaacctatcatattctacccataccctctatctggaggcctacatagcacattaagtattacccataaggtctctgattaaaaatcaactctgcaagcatggggagcagtggcatcatgccatataatcccaagaacatttgggaggctagag

SEQ ID NO: 546851 - DNA, 459 bp, Homo sapiens
aaacctggggacccgtttatagcaccgatggtatgtggaccctggcagagtcagcaaggtggtattcaaatgaatgaagtatgaaaaacacctcaggctgtgcgtggtggcttacacctgtaatccttgcactttgggaggccgaggtgggcggatcacgaggtcaggaattcgagatcagcctggcgaacatggtgaaaccccgtctctgctcaagataccaaaaaaaaaaattagctgggtgtggtggcatgcacctgtaatcccagctactcaggaagctgaggcgggtggatcacgaggtcaggagtttgagaccagcctggccaacacggtgaaaccccatctctattgaaaatgcaaaaaaattaaagattagctgggcgtggttgcacatgcctatagtcccagctgctggggaggctaaagcaggaggatggctttagcccaggagtttga

SEQ ID NO: 546852 - DNA, 3773 bp, Homo sapiens
  misc_feature (3763)..(3763): n is a, c, g, or t
ctctggagctcggaggttgacttcccgtcttgtgagctcttcccttttacatatagataagtgaaaagcaaaaggcattgttccttttttatgttttgtatcacgatctcctcatcctttgcatgtcgtccgtttggcatccctgttatgttaggcctctgctggatccagaccctcacgagaggctccccgcccacaggtgctcacattctggctcgggggacgaggttgggcttcgaggtggtgtgcttcagcctctggctgcagccccttctcacctatagtgaggccgggaagatgaccgggagtgccaggctcatgcatcctctgctgcagggaggagatctggaggtggggactgaacagcctccccactggctaagagaaacacgtgcagagaagcgctttgctggagggcaggcacctgtgggtgcccagacaggggagagagggatttggacctaaggcccagtgagccctgacatagcacgtggattctgcaggaaggtcacagacctgccttgtttgcctctggttctgagtacctctcctccttactgcaatgtcccctgaaggtacactctggctgcttcccacacactggtgcagaagcagaggccatgctcctggatgcctgcttgcctgatgctagttcttctctgtcagggcaacaggtttgtctatgctggctctaactcgggcgtggtccaggccccgctggccttctgtgggaagcacggcacctgcgaggactgtgtgctggcgcgggacccctactgcgcctggagcccgcccacagcgacctgcgtggctctgcaccagaccgagagccccagcaggggtttgattcaggagatgagcggcgatgcttctgtgtgcccggataaaagtaaaggaagttaccggcagcattttttcaagcacggtggcacagcggaactgaaatgctcccaaaaatccaacctggcccgggtcttttggaagttccagaatggcgtgttgaaggccgagagccccaagtacggtcttatgggcagaaaaaacttgctcatcttcaacttgtcagaaggagacagtggggtgtaccagtgcctgtcagaggagagggttaagaacaaaacggtcttccaagtggtcgccaagcacgtcctggaagtgaaggtggttccaaagcccgtagtggcccccaccttgtcagttgttcagacagaaggtagtaggattgccaccaaagtgttggtggcatccacccaagggtcttctcccccaaccccagccgtgcaggccacctcctccggggccatcacccttcctcccaagcctgcgcccaccggcacatcctgcgaaccaaagatcgtcatcaacacggtcccccagctccactcggagaaaaccatgtatcttaagtccagcgacaaccgcctcctcatgtccctcttcctcttcttctttgttctcttcctctgcctctttttctacaactgctataagggatacctgcccagacagtgcttgaaattccgctcggccctactaattgggaagaagaagcccaagtcagatttctgtgaccgtgagcagagcctgaaggagacgttagtagagccagggagcttctcccagcagaatggggagcaccccaagccagccctggacaccggctatgagaccgagcaagacaccatcaccagcaaagtccccacggatagggaggactcacagaggatcgacgacctttctgccagggacaagccctttgacgtcaagtgtgagctgaagttcgctgactcagacgcagatggagactgaggccggctgtgcatccccgctggtgcctcggctgcgacgtgtccaggcgtggagagttttgtgtttctcctgttcagtatccgagtctcgtgcagtgctgcgtaggttagcccgcatcgtgcagacaacctcagtcctcttgtctattttctcttgggttgagcctgtgacttggtttctctttgtccttttggaaaaatgacaagcattgcatcccagtcttgtgttccgaagtcagtcggagtacttgaagaaggcccacgggcggcacggagttcctgagccctttctgtagtgggggaaaggtggctggacctctgttggctgagaagagcatcccttcagcttcccctccccgtagcagccactaaaagattatttaattccagattggaaatgacattttagtttatcagattggtaacttatcgcctgttgtccagattggcacgaaccttttcttccacttaattatttttttaggattttgctttgattgtgtttatgtcatgggtcatttttttttagttacagaagcagttgtgttaatatttagaagaagatgtatatcttccagattttgttatatatttggcataaaatacggcttacgttgcttaagattctcagggataaacttccttttgctaaatgcattctttctgcttttagaaatgtagacataaacactccccggagcccactcaccttttttctttttctttttttttttttaactttattccttgagggaagcattgtttttggagagattttctttctgtacttcgttttacttttctttttttttaacttttactctctcgaagaagaggaccttcccacatccacgaggtgggttttgagcaagggaaggtagcctggatgagctgagtggagccaggctggcccagagctgagatgggagtgcggtacaatctggagcccacagctgtcggtcagaacctcctgtgagacagatggaaccttcacaagggcgcctttggttctctgaacatctcctttctcttcttgcttcaattgcttacccactgcctgcccagactttctatccagcctcactgagctgcccactactggaagggaactgggcctcggtggccggggccgcgagctgtgaccacagcaccctcaagcatacggcgctgttcctgccactgtcctgaagatgtgaatgggtggtacgatttcaacactggttaatttcacactccatctccccgctttgtaaatacccatcgggaagagactttttttccatggtgaagagcaataaactctggatgtttgtgcgcgtgtgtggacagtcttatcttccagcatgataggatttgaccattttggtgtaaacatttgtgttttataagatttaccttgtttttatttttctactttgaattgtatacatttggaaagtacccaaataaatgagaagcttctatccttgatttggggaagacattccttagcggaggctgtgcagcctcccgcccctgcatggcccaggcgggacagctgggctcgctcttttctgtccgtttcctgctgtgttttgccctctctggcctgtgacgtgctcctggcgacttcttcctcgtgccctctcttttctgtcctctctgtctcacagcctcgtctcctaagccctccgtcctcatggctctcttccctgtctgtctggccatgtggggacagaagcttctctcctggaccctggcagctcggtcggggccacagcagtgatgctcatgtgcgcctctgatgacagaagagtgagctgggacttactttcagcaagtagtgctccgcagtctgcactgctcaagtggggggggggaattgacgcagatttattggcgggggcttttttcgaagatacctttggcagtaagaatagtggcaaatttaataaggggatatgcactgcttaagntgtccatccg

SEQ ID NO: 546853 - DNA, 3122 bp, Homo sapiens
ctctggagctcggaggttgacttcccgtcttgtgagctcttcccttttacatatagataagtgaaaagcaaaaggcattgttccttttttatgttttgtatcacgatctcctcatcctttgcatgtcgtccgtttggcatccctgttatgttaggcctctgctggatccagaccctcacgagaggctccccgcccacaggtgctcacattctggctcgggggacgaggttgggcttcgaggtggtgtgcttcagcctctggctgcagccccttctcacctatagtgaggccgggaagatgaccgggagtgccaggctcatgcatcctctgctgcagggaggagatctggaggtggggactgaacagcctccccactggctaagagaaacacgtgcagagaagcgctttgctggagggcaggcacctgtgggtgcccagacaggggagagagggatttggacctaaggcccagtgagccctgacatagcacgtggattctgcaggaaggtcacagacctgccttgtttgcctctggttctgagtacctctcctccttactgcaatgtcccctgaaggtacactctggctgcttcccacacactggtgcagaagcagaggccatgctcctggatgcctgcttgcctgatgctagttcttctctgtcagggcaacaggtttgtctatgctggctctaactcgggcgtggtccaggccccgctggccttctgtgggaagcacggcacctgcgaggactgtgtgctggcgcgggacccctactgcgcctggagcccgcccacagcgacctgcgtggctctgcaccagaccgagagccccagcaggggtttgattcaggagatgagcggcgatgcttctgtgtgcccggataaaagtaaaggaagttaccggcagcattttttcaagcacggtggcacagcggaactgaaatgctcccaaaaatccaacctggcccgggtcttttggaagttccagaatggcgtgttgaaggccgagagccccaagtacggtcttatgggcagaaaaaacttgctcatcttcaacttgtcagaaggagacagtggggtgtaccagtgcctgtcagaggagagggttaagaacaaaacggtcttccaagtggtcgccaagcacgtcctggaagtgaaggtggttccaaagcccgtagtggcccccaccttgtcagttgttcagacagaaggtagtaggattgccaccaaagtgttggtggcatccacccaagggtcttctcccccaaccccagccgtgcaggccacctcctccggggccatcacccttcctcccaagcctgcgcccaccggcacatcctgcgaaccaaagatcgtcatcaacacggtcccccagctccactcggagaaaaccatgtatcttaagtccagcgacaaccgcctcctcatgtccctcttcctcttcttctttgttctcttcctctgcctctttttctacaactgctataagggatacctgcccagacagtgcttgaaattccgctcggccctactaattgggaagaagaagcccaagtcagatttctgtgaccgtgagcagagcctgaaggagacgttagtagagccagggagcttctcccagcagaatggggagcaccccaagccagccctggacaccggctatgagaccgagcaagacaccatcaccagcaaagtccccacggatagggaggactcacagaggatcgacgacctttctgccagggacaagccctttgacgtcaagtgtgagctgaagttcgctgactcagacgcagatggagactgaggccggctgtgcatccccgctggtgcctcggctgcgacgtgtccaggcgtggagagttttgtgtttctcctgttcagtatccgagtctcgtgcagtgctgcgtaggttagcccgcatcgtgcagacaacctcagtcctcttgtctattttctcttgggttgagcctgtgacttggtttctctttgtccttttggaaaaatgacaagcattgcatcccagtcttgtgttccgaagtcagtcggagtacttgaagaaggcccacgggcggcacggagttcctgagccctttctgtagtgggggaaaggtggctggacctctgttggctgagaagagcatcccttcagcttcccctccccgtagcagccactaaaagattatttaattccagattggaaatgacattttagtttatcagattggtaacttatcgcctgttgtccagattggcacgaaccttttcttccacttaattatttttttaggattttgctttgattgtgtttatgtcatgggtcatttttttttagttacagaagcagttgtgttaatatttagaagaagatgtatatcttccagattttgttatatatttggcataaaatacggcttacgttgcttaagattctcagggataaacttccttttgctaaatgcattctttctgcttttagaaatgtagacataaacactccccggagcccactcaccttttttctttttctttttttttttttaactttattccttgagggaagcattgtttttggagagattttctttctgtacttcgttttacttttctttttttttaacttttactctctcgaagaagaggaccttcccacatccacgaggtgggttttgagcaagggaaggtagcctggatgagctgagtggagccaggctggcccagagctgagatgggagtgcggtacaatctggagcccacagctgtcggtcagaacctcctgtgagacagatggaaccttcacaagggcgcctttggttctctgaacatctcctttctcttcttgcttcaattgcttacccactgcctgcccagactttctatccagcctcactgagctgcccactactggaagggaactgggcctcggtggccggggccgcgagctgtgaccacagcaccctcaagcatacggcgctgttcctgccactgtcctgaagatgtgaatgggtggtacgatttcaacactggttaatttcacactccatctccccgctttgtaaatacccatcgggaagagactttttttccatggtgaagagcaataaactctggatgtttgtg

SEQ ID NO: 546854 - DNA, 784 bp, Homo sapiens
taccacaggcacacggggaatgatgatttcattgtagccctcacaagtccttagcatgttgaggtacatgaccatttttctttgttcgtatagcttctgtacttcgttttacttttctttttttttaacttttactctctcgaagaagaggaccttcccacatccacgaggtgggttttgagcaagggaaggtagcctggatgagctgagtggagccaggctggcccagagctgagatgggagtgcggtacaatctggagcccacagctgtcggtcagaacctcctgtgagacagatggaaccttcacaagggcgcctttggttctctgaacatctcctttctcttcttgcttcaattgcttacccactgcctgcccagactttctatccagcctcactgagctgcccactactggaagggaactgggcctcggtggccggggccgcgagctgtgaccacagcaccctcaagcatacggcgctgttcctgccactgtcctgaagatgtgaatgggtggtacgatttcaacactggttaatttcacactccatctccccgctttgtaaatacccatcgggaagagactttttttccatggtgaagagcaataaactctggatgtttgtgcgcgtgtgtggacagtcttatcttccagcatgataggatttgaccattttggtgtaaacatttgtgttttataagatttaccttgtttttatttttctactttgaattgtatacatttggaaagtacccaaataaatgagaagcttctatccttga

SEQ ID NO: 546855 - DNA, 380 bp, Homo sapiens
  misc_feature (380)..(380): n is a, c, g, or t
aagcggctggtacggcgatttgatgcgaacgcgtcgacctcggaaagtgatgctaaagaaaccggattgccatttatgaactcctttttaagggagggaggtcatgtgtggccaaaagaaggatgtcacatgcctaagcaccctgggagcttggcagacaagaatgtgcccaaccttcatgtcatgaaggccatgcagtctctcaatgtccctgagggctttaccgtttgaaaaaggggaaaccaagggtatctttgccccatgggggaaggaaccaatttttccttaaccttggtggtatacccctttaacccgaaatttggacagggggtttaattcccaatgtaattctcccccgtgatttaaccctttccattccn

SEQ ID NO: 546856 - DNA, 118 bp, Homo sapiens
tgggggttacccctgggggggattttttttttgtttcaggggggtttggggggaaaaattttttaaaagggaattttaaaaagccccccccccccaaaaaaccttttatgtttttttt

SEQ ID NO: 546857 - DNA, 306 bp, Homo sapiens
tttctctctgaccttttgcctgttcctttttctccccaaggcaggaatcttctcccacctttcttgctgggagctggccataaagaaattctctggcctgctttatctgacttagttgataggccgttcattcattccagggagaatcctgccctccatcatggaggaagaaaagactgcatagagaccaagatgactctggacaggccatgataggtttccctatcaagtttatagacttccaccaacccttttcatccagcatagggcaacaagagatagactccatcccaaacaaaacaaaac

SEQ ID NO: 546858 - DNA, 2370 bp, Homo sapiens
ctctggagctcggaggttgacttcccgtcttgtgagctcttcccttttacatatagataagtgaaaagcaaaaggcattgttccttttttatgttttgtatcacgatctcctcatcctttgcatgtcgtccgtttggcatccctgttatgttaggcctctgctggatccagaccctcacgagaggctccccgcccacaggtgctcacattctggctcgggggacgaggttgggcttcgaggtggtgtgcttcagcctctggctgcagccccttctcacctatagtgaggccgggaagatgaccgggagtgccaggctcatgcatcctctgctgcagggaggagatctggaggtggggactgaacagcctccccactggctaagagaaacacgtgcagagaagcgctttgctggagggcaggcacctgtgggtgcccagacaggggagagagggatttggacctaaggcccagtgagccctgacatagcacgtggattctgcaggaaggtcacagacctgccttgtttgcctctggttctgagtacctctcctccttactgcaatgtcccctgaaggtacactctggctgcttcccacacactggtgcagaagcagaggccatgctcctggatgcctgcttgcctgatgctagttcttctctgtcagggcaacaggtttgtctatgctggctctaactcgggcgtggtccaggccccgctggccttctgtgggaagcacggcacctgcgaggactgtgtgctggcgcgggacccctactgcgcctggagcccgcccacagcgacctgcgtggctctgcaccagaccgagagccccagcaggggtttgattcaggagatgagcggcgatgcttctgtgtgcccggataaaagtaaaggaagttaccggcagcattttttcaagcacggtggcacagcggaactgaaatgctcccaaaaatccaacctggcccgggtcttttggaagttccagaatggcgtgttgaaggccgagagccccaagtacggtcttatgggcagaaaaaacttgctcatcttcaacttgtcagaaggagacagtggggtgtaccagtgcctgtcagaggagagggttaagaacaaaacggtcttccaagtggtcgccaagcacgtcctggaagtgaaggtggttccaaagcccgtagtggcccccaccttgtcagttgttcagacagaaggtagtaggattgccaccaaagtgttggtggcatccacccaagggtcttctcccccaaccccagccgtgcaggccacctcctccggggccatcacccttcctcccaagcctgcgcccaccggcacatcctgcgaaccaaagatcgtcatcaacacggtcccccagctccactcggagaaaaccatgtatcttaagtccagcgacaaccgcctcctcatgtccctcttcctcttcttctttgttctcttcctctgcctctttttctacaactgctataagggatacctgcccagacagtgcttgaaattccgctcggccctactaattgggaagaagaagcccaagtcagatttctgtgaccgtgagcagagcctgaaggagacgttagtagagccagggagcttctcccagcagaatggggagcaccccaagccagccctggacaccggctatgagaccgagcaagacaccatcaccagcaaagtccccacggatagggaggactcacagaggatcgacgacctttctgccagggacaagccctttgacgtcaagtgtgagctgaagttcgctgactcagacgcagatggagactgaggccggctgtgcatccccgctggtgcctcggctgcgacgtgtccaggcgtggagagttttgtgtttctcctgttcagtatccgagtctcgtgcagtgctgcgtaggttagcccgcatcgtgcagacaacctcagtcctcttgtctattttctcttgggttgagcctgtgacttggtttctctttgtccttttggaaaaatgacaagcattgcatcccagtcttgtgttccgaagtcagtcggagtacttgaagaaggcccacgggcggcacggagttcctgagccctttctgtagtgggggaaaggtggctggacctctgttggctgagaagagcatcccttcagcttcccctccccgtagcagccactaaaagattatttaattccagattggaaatgacattttagtttatcagattggtaacttatcgcctgttgtccagattggcacgaaccttttcttccacttaattatttttttaggattttgctttgattgtgtttatgtggtggtcaaacatgcgcgtgtttgacgacgacgtacgtggtggtgaaacatgc

SEQ ID NO: 546859 - DNA, 184 bp, Homo sapiens
ctgctccccatctttctatctatctggctggcacggaaggacagaacttgcatgttggtgaaggaagacagtggggtggaagaagtggggtgggacgacagtcaactctagagtaaaaccaagctggcccaaggtgtcctgcaggctagtaatgcacgtttaatcagcagtgccattatttttt

SEQ ID NO: 546860 - DNA, 229 bp, Homo sapiens
tagtccacggttggctggcgcagtggaagcccaggtccagttcaaacttgtatgggtgggtgatggtggtactgggaaaaacgaccttcgtgaaacgtcattggactggtgaattaggagaagaagtatgtagccacctgtgggtgttgaggttcatccccgtagtgttccacaccaacaggaggacctattaagttcaaggtatgggactagccaagcgtggactagg

SEQ ID NO: 546861 - DNA, 2321 bp, Homo sapiens
ctctggagctcggaggttgacttcccgtcttgtgagctcttcccttttacatatagataagtgaaaagcaaaaggcattgttccttttttatgttttgtatcacgatctcctcatcctttgcatgtcgtccgtttggcatccctgttatgttaggcctctgctggatccagaccctcacgagaggctccccgcccacaggtgctcacattctggctcgggggacgaggttgggcttcgaggtggtgtgcttcagcctctggctgcagccccttctcacctatagtgaggccgggaagatgaccgggagtgccaggctcatgcatcctctgctgcagggaggagatctggaggtggggactgaacagcctccccactggctaagagaaacacgtgcagagaagcgctttgctggagggcaggcacctgtgggtgcccagacaggggagagagggatttggacctaaggcccagtgagccctgacatagcacgtggattctgcaggaaggtcacagacctgccttgtttgcctctggttctgagtacctctcctccttactgcaatgtcccctgaaggtacactctggctgcttcccacacactggtgcagaagcagaggccatgctcctggatgcctgcttgcctgatgctagttcttctctgtcagggcaacaggtttgtctatgctggctctaactcgggcgtggtccaggccccgctggccttctgtgggaagcacggcacctgcgaggactgtgtgctggcgcgggacccctactgcgcctggagcccgcccacagcgacctgcgtggctctgcaccagaccgagagccccagcaggggtttgattcaggagatgagcggcgatgcttctgtgtgcccggataaaagtaaaggaagttaccggcagcattttttcaagcacggtggcacagcggaactgaaatgctcccaaaaatccaacctggcccgggtcttttggaagttccagaatggcgtgttgaaggccgagagccccaagtacggtcttatgggcagaaaaaacttgctcatcttcaacttgtcagaaggagacagtggggtgtaccagtgcctgtcagaggagagggttaagaacaaaacggtcttccaagtggtcgccaagcacgtcctggaagtgaaggtggttccaaagcccgtagtggcccccaccttgtcagttgttcagacagaaggtagtaggattgccaccaaagtgttggtggcatccacccaagggtcttctcccccaaccccagccgtgcaggccacctcctccggggccatcacccttcctcccaagcctgcgcccaccggcacatcctgcgaaccaaagatcgtcatcaacacggtcccccagctccactcggagaaaaccatgtatcttaagtccagcgacaaccgcctcctcatgtccctcttcctcttcttctttgttctcttcctctgcctctttttctacaactgctataagggatacctgcccagacagtgcttgaaattccgctcggccctactaattgggaagaagaagcccaagtcagatttctgtgaccgtgagcagagcctgaaggagacgttagtagagccagggagcttctcccagcagaatggggagcaccccaagccagccctggacaccggctatgagaccgagcaagacaccatcaccagcaaagtccccacggatagggaggactcacagaggatcgacgacctttctgccagggacaagccctttgacgtcaagtgtgagctgaagttcgctgactcagacgcagatggagactgaggccggctgtgcatccccgctggtgcctcggctgcgacgtgtccaggcgtggagagttttgtgtttctcctgttcagtatccgagtctcgtgcagtgctgcgtaggttagcccgcatcgtgcagacaacctcagtcctcttgtctattttctcttgggttgagcctgtgacttggtttctctttgtccttttggaaaaatgacaagcattgcatcccagtcttgtgttccgaagtcagtcggagtacttgaagaaggcccacgggcggcacggagttcctgagcccaccggcacatcctgcgaaccaaagatcgtcatcaacacggtcccccagctccactcggagaaaaccatgtatcttaagtccagcgacaaccgcctcctcatgtccctcttcctcttcttctttgttctcttcctctgcctctttttctacaactgctataagggatacctgcccagacagtgcttgaaattccgctcggccctactaattgggaagaagaagccca

SEQ ID NO: 546862 - DNA, 1429 bp, Homo sapiens
  misc_feature (117)..(117): n is a, c, g, or t
ggagacttggagtatggacttttgagttaatgctgaaatgagttaagactttgggggactgttgggaaggcatgattgatttttaaatgagaggacatgagatttgggaggggccanggagagaatgatatggtttggctgtgtccccatccaaatatcaccttaaattgtagctcccataattgtgggagggacctggtgggagataattgaatcataggggcagtttctcccatactgttctggtggtagtgaataagtctcacgagatctgatggtttaataaggggtttccccttttgcttggctctcattctctcttgtctgctgccatgtaagatgtgccttttgccttccaccatgattgtgaggcctcccagccacatggaactgtgagttcattaaacctctttttcttcataaattacccagtctcgggtatgtctttatcagcagtgtgaaaacagactaatacaccactcctctaccttctttattttctcagtgtggaaaatgcctgatgaaagctttggggccctcacagatgcacaactcaagtgctgattctatcacttatctaccagctctgtgaccttgaacaagccgcttaaccttgctaagcctctgttttctcatatgtcaaatggtgataataatgcctacctcccgaggttgttgtaagaattataagcacaaatgtatgtaaagtgcctggcacaaagtaggtgctcaataaatggtagctattataatactaaaaaaaaacaaaaaaaaaaaaaaaaaaaaaaaaaaaaaaaaaaaaaacaaaaccaaacaacaccgaggggagcggggcgcgcccccaaaaaaaataaactccccaccgaggagggggcccacaaataataagcactagaacaacccagtaccgttttttctagctaacaaaagcagggcgcgcccacaaatagtagggagggagccgcaatataataatatataacagaaaacgacagatagcgagacacggagggcttataacaacaaacgcacccttcagtgacagagcgagaaaacacgtaagtcctaacatgatgaggaaaaacactattttgagggaaaaaacagcagcagaccccaaaacatacaagggagaggagggaggggagccacccaccaactactgggggcgaacaacagacaaacccacccccagacaggaacgaagtatatctataacaccgcccacacagaagaggcaactaataaaacataacaacctcagacacaggcgctattacaacggcatcgtgaagacacaacaccccaaacgcacactaaaacaagatcgttacgtcggcgcaacagtgatcaaaagaacagttggtcgacctaacgcaaggaactaacatttaattttccataaaacaaaaaaaatttgatcaccacc

SEQ ID NO: 546863 - DNA, 236 bp, Homo sapiens
acacgaggtgtaatagtccccgagagagaacggaatcaggcgaatgagaacacgagtgtgtgtggagagagagaacggaatcaagcgaatgagagcgtgagtgtgtgtggagagaacggaatcaagcgaatgagagcgcgtgagtgtgtgtggagagagaacggaatcacatgaatgagaacgtgagtgtgtgtggagggagagaacggaatcaagcgaatgagagcgtgagtcca

SEQ ID NO: 546864 - DNA, 382 bp, Homo sapiens
tggggggggacttgggttttcagttcataaaaaaggttttcccttttgaccctcccaattttgttccccccgggggcctggaactttaactccctccctgaggggggggaattaaaacttttaacccggaaggagagatcccccctcccaagtttgggggtaccaaactggagccccggggggatggaaacttttttatggcttttggcagggacaaacttggacccaaaaccgatccataaaaggggttccccaccctttttttgcaacatccccaattttttcccgtttaaggagggcctttttcaaatttataaatgggctttctttgtaaaaataaatgttttttgcccccctttttgatggggggggaaggggtcca

SEQ ID NO: 546865 - DNA, 1145 bp, Homo sapiens
gcttagttgccattgtccgagacccagcggctctggctcgctctgccttctcctactataaatccaccgtcatcagccttccgcaagtcaccagtctttggctgccttcctggccaatcctacgaggcgttctacaggcctggggcccgtggggagcagtacgacgtcggcaacttactatggtttgactttggcctggcctttcccccagagaagagggccaagagagggaatattcagtccccgcgcagagacgcgccaaggccccgcacagctgcaggtcttgccttctggtgctggccctcgagcccaacacctcaatcccaatgcccgtcagtccatcctgtttccactgttactgatcatcgcaggccagatatcaagcgcctgcctcgttgcgattaggggtcttcatccttcatccagtggggtctgggctggctggactctgtctttgacctggtcatggctggctgagtacttcgatgacgtcattggttctgctggcagatgacctgtgctggggatctagatgacgtggtgggcttcatgcacaatgcacaggctggacatcacaggcagggcctacagcacttgtcagcaacagtggactgactgcgggaggacggcagccgactgcacggggcccgagcctggaacaactgggaacctggggcacactatagtgcacgtcaaccgagactctgggaccgggatagacgaatacggccagggccggctgcaaacagctgtggccgaagctccgggactcgaccgagacgccctagcgaaacatcgcctggccacggggcgacgggtacggaccccgcaatactccacgaacacgcggaaccagccacgacacgtgggggacacgaacgggagagggacacaactcgcgcacggcattgggcgccccaaagaacgagaggaacggggagggactgattcccctggcgacacaccaggcgcaagtcggaggtaaaggaaaccagaacgggtaaagggcccaaggaaaggcactccccaaagaccctaccgtagtgaggaaaaccatatgcagaccaagatcagcggaaccacaaatgtcgacgagcaccatgcgcagcagctgcacagatccccacccgggccaaatgaacacg

SEQ ID NO: 546866 - DNA, 185 bp, Homo sapiens
cgttacccctagcttctctatcttttagggtatcatctaaaaggctactactgtaacttctgctgtctaactctgggttttcatttaatcttgggactagtctctccttgtcaatagaatagatgacttaactttaggtcagttaatatgtttgcccctgttctactctgtaaactgatatttta

SEQ ID NO: 546867 - DNA, 80 bp, Homo sapiens
gcagggcccgaaagaggagctcaagacacctgaagcaggatataaatagcaggaataaagagctggcctcagaaattaag

SEQ ID NO: 546868 - DNA, 81 bp, Homo sapiens
gacagcagcttctacatctgcagtgctatagttagcggggttgagacccagtacttcgggccaggcacgcggctcctggtg

SEQ ID NO: 546869 - DNA, 191 bp, Homo sapiens
tggcgaatcctcctcctactttctcagatacccgggtaacagtcctcatagtccagatatactgggactcgtgtccaacctctctaaacctgggtctctgtttcatagaatatcaaatatcaggttcaggcccctgtgtgcaccagtatactggggttcattcccctgggtgttcaacatatctggattca

SEQ ID NO: 546870 - DNA, 185 bp, Homo sapiens
cttagactacagctagacagataggtcagagaaaggcaggtatgattagagttctgctttggagagaaggagcacggtgaaaggaggagatggaggaagtcagaaatagattctgttttctgaggcctaaagcaccctaacataacaagactgtaacaaaggctatgggagttatgagccagaaa

SEQ ID NO: 546871 - DNA, 470 bp, Homo sapiens
cgaacgtggagcagaagaagaagcgcaccttccgcaagttcacctaccgtggcgtagacctcgaccaactgctcgacatgtcctatgagcaactgatgcagctgtacagcgcccgccagaggaggcgcctgaaccgtggtcttcggcggaacaacactcactgctcaagcgcttgagaaaggccaaaaaggaggcaccacccatggagaagcctgaggtggtgaagacgcacctgagggacatgatcatcctgccggagatggtgggtagcatggtgggcgtgtacaacggcaagaccttcaaccaggtggagatcaaaccagagatgatcggccactacctgggcgagttctccatcacctacaaacccgtgaagcacggccggcccgggatcggtgccacccactcctcccgattcatccccctcaagtagcgaggccaataaagactggttttggtccctggaaaaa

SEQ ID NO: 546872 - DNA, 1182 bp, Homo sapiens
  misc_feature (900)..(901): n is a, c, g, or t
  misc_feature (905)..(905): n is a, c, g, or t
gctcttttgcctgctgccattccagtaggatgtgacttgcttctcctggccatggttgtgaggcctccccagctatgtggaactatgttgagaaggaacaacatgatctaagtctttagaaaccaagagccacgactagctgaggacacaagaattttcacaaaacaaagtagagtgattccatagatcactattatagctgcattaccagtcctaggacagaatatggatgctgaaaaatgattctttcaaagtgctgagttgttgcctcacgcccagttgtctggcatctcttcactgaaactattacagttagatctcatctctatgggtggaaggttgttgttctcaactcagcaggaaatgtcttatgaagaaaatggcccctgctccttaggtagcaggccataggcaaatactgaccctcttgccttctgaagctaagctccagcttcagtatgcacttgcttacctccttcccctgtccacactgcttttacttgctccctgtctcctgagagcattcattaataaattgcacacatttgaatccctatctcaggtattgctcatagagagtccaacttaagaaaaactgcaatccttatttatattctgtttcattaagagatgtaattgtgaaagaactgaacatataaaaaaatcagctttatcatgttttttatccttgtcacgccatgtcacctgagcaacacagtctgaatactaaattgtgagtgtgagtgcatatatgtgatggtaggtttttgtcctgttttcaatcattcataaaaccaaacatgtgtcccttaattatgctctactacatccacaacttattttattcataaaaatattgtggggtagatattatcactgttttcttgatggggaaatttnntatncacaaagttaaatattccctccaagggcataacatttttaattggtatagtcatgattcaaattatatcttctaactataaggccagtgtgaatggtactccactacagtagactatcccttagttggtttctactttttgccttgttatttccgtccatgcttggttagtacctacttttcttttttcttgaaaaatttcctcctccttctatcttccaaaaattttgttccctatgaaaactggtttttttgcattggtttctccaaattccaag

SEQ ID NO: 546873 - DNA, 213 bp, Homo sapiens
  misc_feature (192)..(193): n is a, c, g, or t
tggcggtgcagagctcttaagttaaataaggtctcattggtcaatttgggttttggtggccgtggcttggggagtcttcatcatgaaatcttggccggggcctatgtcgggaggggtattcccaaggtttgctccaaggggtgaatagttcagggtataacatttaagtcttaaatccatctggagtggatnngggtataatggtgaagggga

SEQ ID NO: 546874 - DNA, 271 bp, Homo sapiens
aggatacacgacacctcctcttactaagaaaatacaacacttatatattttctattatatcctatggtacaacaattacatattgaaatccacatatctaaaatccaaacatacaatctgctatatacaccatcatgtgcagtggcacagccatgggaggtgctataccttaaccaatgttccagctataaaaagcatgaatgaggaaaccttgtgaaagggataacatcttagatatatatcaacacccaaaatgcactgcaggtagcga

SEQ ID NO: 546875 - DNA, 1209 bp, Homo sapiens
  misc_feature (927)..(928): n is a, c, g, or t
  misc_feature (932)..(932): n is a, c, g, or t
gctcttttgcctgctgccattccagtaggatgtgacttgcttctcctggccatggttgtgaggcctccccagctatgtggaactatgttgagaaggaacaacatgatctaagtctttagaaaccaagagccacgactagctgaggacacaagaattttcacaaaacaaagtagagtgattccatagatcactattatagctgcattaccagtcctaggacagaatatggatgctgaaaaatgattctttcaattttttattccttgacatcaagccaaaagtgctgagttgttgcctcacgcccagttgtctggcatctcttcactgaaactattacagttagatctcatctctatgggtggaaggttgttgttctcaactcagcaggaaatgtcttatgaagaaaatggcccctgctccttaggtagcaggccataggcaaatactgaccctcttgccttctgaagctaagctccagcttcagtatgcacttgcttacctccttcccctgtccacactgcttttacttgctccctgtctcctgagagcattcattaataaattgcacacatttgaatccctatctcaggtattgctcatagagagtccaacttaagaaaaactgcaatccttatttatattctgtttcattaagagatgtaattgtgaaagaactgaacatataaaaaaatcagctttatcatgttttttatccttgtcacgccatgtcacctgagcaacacagtctgaatactaaattgtgagtgtgagtgcatatatgtgatggtaggtttttgtcctgttttcaatcattcataaaaccaaacatgtgtcccttaattatgctctactacatccacaacttattttattcataaaaatattgtggggtagatattatcactgttttcttgatggggaaatttnntatncacaaagttaaatattccctccaagggcataacatttttaattggtatagtcatgattcaaattatatcttctaactataaggccagtgtgaatggtactccactacagtagactatcccttagttggtttctactttttgccttgttatttccgtccatgcttggttagtacctacttttcttttttcttgaaaaatttcctcctccttctatcttccaaaaattttgttccctatgaaaactggtttttttgcattggtttctccaaattccaag

SEQ ID NO: 546876 - DNA, 305 bp, Homo sapiens
ccgcggcgtgttcatgcaacatgattgagatagaaggaatgcccataccatgctggaaccagggagaaacacccatgttaagccagggttgtgactttgtcaatgttctggctgatgtttcatgtgatgtaattcaatctaacatgcccattgacatagtgatgaaagataaactttttaaatataaatttaagaactagtaacactttgggaaactttaaagtgtatgcaaagctgtcaaagacaaaaccccatttgatcgacacaatttgtcaaataggtaacagctgcggacccaggggctt

SEQ ID NO: 546877 - DNA, 837 bp, Homo sapiens
  misc_feature (1)..(1): n is a, c, g, or t
nccgtggtaacaaatacggggtgtggtgttttaatacgccgcgaatcgaccctgtgttggtcccccgccggacccattgggtgagatgtgtcgtagccacactttttctcggtcctcgtgggtgtattatccgccggtgtggtagagcccagcgtgatatgttcggtgcgtggtagtgcaccaactcccctggtgttgtggcccctcaccgcaggaggtagtgtacacctgggcgcccgcccgcaccacaccgtgtgttttaatggccccttttttgtgttaaacccgcgcctgttaagtgtgtgtgccgcggacacagcccgccccaaagtttgttgggcggttccccagaggagtattttagtctccgcgtcgtcagcgatccggagattcttttggtataagggttttgcaccaacaggtggtcgaaaaacgcccgttggggtccaccaaatccgtgtccctctccgggagttttctccccccgacgtagatccaagagtaaaaaaatctttggattgcgggagattcagaggctctaggagaagaactctgtgctcctcaaggagagaagggcaatacgcccccctctgtagggaggggcagtatttaaactctatgtatgttagtcctcgacatactgtaccagtcttctgtaataggaaagtcatatagatcattgaatagcgcggctacaattccacctctcgggtccttgccccccaagctattatgcatagctttcttgcgggcagctctcagacatgagaaaggacaggcagcattccctttcgcgcgtgacttattaaagagcttatcctcggcggatcatagaac

SEQ ID NO: 546878 - DNA, 174 bp, Homo sapiens
gtttataaaaaaccctaaaccttcaattccaaagaaccaaaaatccccccttccccccgaacaatattaagggggttgggttttgccccaaaccctttttcttttctttcgggccgggtaaagcttttaaaaacaaatgagttttttaaaaaaaaaaagtttttaaagggggga

SEQ ID NO: 546879 - DNA, 976 bp, Homo sapiens
  misc_feature (694)..(695): n is a, c, g, or t
  misc_feature (699)..(699): n is a, c, g, or t
tacttcagtgagacaagagaggggactatatagaagatatgtttatgtctttggtgttttaccccgatcattttacagaatgtgcacctgtgaatgttggctgctcattgttcatgtttctgctttctgcaggttgttgttctcaactcagcaggaaatgtcttatgaagaaaatggcccctgctccttaggtagcaggccataggcaaatactgaccctcttgccttctgaagctaagctccagcttcagtatgcacttgcttacctccttcccctgtccacactgcttttacttgctccctgtctcctgagagcattcattaataaattgcacacatttgaatccctatctcaggtattgctcatagagagtccaacttaagaaaaactgcaatccttatttatattctgtttcattaagagatgtaattgtgaaagaactgaacatataaaaaaatcagctttatcatgttttttatccttgtcacgccatgtcacctgagcaacacagtctgaatactaaattgtgagtgtgagtgcatatatgtgatggtaggtttttgtcctgttttcaatcattcataaaaccaaacatgtgtcccttaattatgctctactacatccacaacttattttattcataaaaatattgtggggtagatattatcactgttttcttgatggggaaatttnntatncacaaagttaaatattccctccaagggcataacatttttaattggtatagtcatgattcaaattatatcttctaactataaggccagtgtgaatggtactccactacagtagactatcccttagttggtttctactttttgccttgttatttccgtccatgcttggttagtacctacttttcttttttcttgaaaaatttcctcctccttctatcttccaaaaattttgttccctatgaaaactggtttttttgcattggtttctccaaattccaag

SEQ ID NO: 546880 - DNA, 229 bp, Homo sapiens
  misc_feature (9)..(9): n is a, c, g, or t
  misc_feature (62)..(62): n is a, c, g, or t
  misc_feature (67)..(67): n is a, c, g, or t
  misc_feature (69)..(69): n is a, c, g, or t
  misc_feature (96)..(96): n is a, c, g, or t
  misc_feature (167)..(167): n is a, c, g, or t
  misc_feature (177)..(178): n is a, c, g, or t
  misc_feature (206)..(206): n is a, c, g, or t
gtgttagtntttctttaaatatttgttagaattcagctgtgcagcgatcgattcctggctgnctctntnttgggagactttttattattaccttgntcttattacttgttattggtctgttcaagtcttctatttcttcctgactcaatcgtggtaggttgcatgtntccgggaatnnattcatttccccagtctttccagttttntagtggtgtagtcattcataata

SEQ ID NO: 546881 - DNA, 545 bp, Homo sapiens
  misc_feature (145)..(145): n is a, c, g, or t
ctatgatctcgactcgttaggaagggagaatgtggtgaggtgctgtagttatgagatgggattatttttcccgtgaaaaaaatctgctggtatcaactcaatgaaatgtgtaactccaagggtacagacaagcattcactatccngcagggacaagccacttttagagataatagggcaatacagatcttacttaacctctcccacatctaaacactaaaactgctgaagtggcagcaaattaaaaaaaaaaatttactatgctaaactaaatgccaattaagaaagtgaaaaggccgggcacgggggcttacgccggtaatcccagcacttggggaggccgaggcaggcggatcacgaggtcaggagatggagaccatccgggccaaggtggtgaaacccggtgtctactaaaatttcaaaaattagcggggcgtggtggcacatgcctgtagtcccagctcctcaggaggctgaggcagaagaatcccttgaacccaggaggcagaggttgcagtgagccgaagtcgcgccattgcactctag

SEQ ID NO: 546882 - DNA, 771 bp, Homo sapiens
gctcttttgcctgctgccattccagtaggatgtgacttgcttctcctggccatggttgtgaggcctccccagctatgtggaactatgttgagaaggaacaacatgatctaagtctttagaaaccaagagccacgactagctgaggacacaagaattttcacaaaacaaagtagagtgattccatagatcactattatagctgcattaccagtcctaggacagaatatggatgctgaaaaatgattctttcaaagtgctgagttgttgcctcacgcccagttgtctggcatctcttcactgaaactattacagttagatctcatctctatgggtggacaggaaaaaattctgagaatgatatagtcgaagtgataccttgaaggtagaactgtgcactgtggtaataacagaaacagaaagacatttcttctatataaacccaggatgtcgtccagcggcagctcccatcccttctattgactggtttttccaggcttggcaggaagctcatcacttggatttcccgtattttcttgtcatgtatatatccatcccttttcggcacttggcaccctcctctcttctcatttaagggacagatcacactcttcattgacgcccatgtccttctttctggccatgtggttgcaaagactggggtgcctgacacatgcccaggtgtggattcttgcctgctcccggacttggatgcgcttgtccagcactttctcattctttcgccggtcgccctgcctccgtttgcttgcttta

SEQ ID NO: 546883 - DNA, 267 bp, Homo sapiens
  misc_feature (33)..(33): n is a, c, g, or t
  misc_feature (44)..(44): n is a, c, g, or t
  misc_feature (63)..(63): n is a, c, g, or t
  misc_feature (69)..(69): n is a, c, g, or t
  misc_feature (72)..(75): n is a, c, g, or t
  misc_feature (78)..(78): n is a, c, g, or t
  misc_feature (80)..(81): n is a, c, g, or t
  misc_feature (83)..(83): n is a, c, g, or t
  misc_feature (114)..(114): n is a, c, g, or t
  misc_feature (121)..(121): n is a, c, g, or t
  misc_feature (135)..(135): n is a, c, g, or t
  misc_feature (152)..(152): n is a, c, g, or t
  misc_feature (192)..(192): n is a, c, g, or t
  misc_feature (206)..(206): n is a, c, g, or t
ccatctgctctcgtgcttgaggggctctcaggngcaaacctganatgatgaacatcaaataangtcatngcnnnnggntnncnatcaaccgaattaactggggaaaccatgagncaatatngacataaataagcnaattgaactctgattanagttgagatagttgagataactgaaagtttgattttattncaaaagtatctccntactatatacttaacaattacaaagatttcacagtggagaagctggaaggcagcacctgaa

SEQ ID NO: 546884 - DNA, 413 bp, Homo sapiens
  misc_feature (27)..(27): n is a, c, g, or t
  misc_feature (224)..(224): n is a, c, g, or t
gatcaaggttggtttaggttttggtanaggtaaagtggcagcaaagggcccccattgtgccgttccttatgaggtccccccttttaggggcccttagggtgggtttcgcatggaaaaagccctttaggttaggggttcattgtggggaaccttgggcccctgtatgggggccccatggggtccccctggagccccgggggcccctgttccccctgggtcccccnggggggggcaaggggttttttccctctcctgtccctgtgttgagggcgggaaaaaaagggggtcaaacccccttccccccccctttcttacagcggggtggggggggggggggggggggtttttttttttttttcctttttttttcaattttagggtggccaaaaaaaggaaaagccgtttttttccca

SEQ ID NO: 546885 - DNA, 428 bp, Homo sapiens
ttcctttggacagagatgattttatggcgctgattttgctatgtaaatagccttttttttgagacagccccactctgttgccaggctggagtgcaatggtgcgatcttggctcactgcaacttctgcctcctgggttcaagcgattctcctacctcagcctcccacgtagctgagattacaggcgcccgccactgctcccggctaatttttgtattttagtagagacagggtttcaccatgttggtcaggctgttctcgaactcctgacctcaggtgatccgcccacctgagcctcccaaagtgctgggattacaggcgtgagccaccgcgcccggtgtaaataggcttttgcctcttgggataatcctaaattaatttttccacagtgtatttttacctgcagtatgatttgcttttctgttggttc

SEQ ID NO: 546886 - DNA, 527 bp, Homo sapiens
  misc_feature (127)..(127): n is a, c, g, or t
gcactgtagagactgacaacttaaactaatgtgtatctatttagactcctacatcaaaacttcatggaaactgcaaaccaaaaatctacagtagataaacatcatgaggaaaagcattcactatccngcagggacaagccacttttagagataatagggcaatacagatcttacttaacctctcccacatctaaacactaaaactgctgaagtggcagcaaattaaaaaaaaaaatttactatgctaaactaaatgccaattaagaaagtgaaaaggccgggcacgggggcttacgccggtaatcccagcacttggggaggccgaggcaggcggatcacgaggtcaggagatggagaccatccgggccaaggtggtgaaacccggtgtctactaaaatttcaaaaattagcggggcgtggtggcacatgcctgtagtcccagctcctcaggaggctgaggcagaagaatcccttgaacccaggaggcagaggttgcagtgagccgaagtcgcgccattgcactctag

SEQ ID NO: 546887 - DNA, 282 bp, Homo sapiens
agaggcacaaggaggttagagaaagaccatctgtgggggcagggatagtgtgtctgagctcagactccttgggcagggttgctgtggcctctgggcgatgggagtggtggttaacaggccaatggagttacgttctaagggagattatggctgcctctgctgcttcatacacatcaccagggaaataggggaaagccggcagtgacagaccacagccagcaaggccagtctcactcctgcagtgcttccccaacagccaacagaaccaaatttatatccatg

SEQ ID NO: 546888 - DNA, 183 bp, Homo sapiens
tgtctacggtttcttcgcatgtgtggtcaaggtggcagggcctccactctgtcactccgggtttatggcgggttcttctactaattcacgacttttcgcttcgaagcgacggcttctccaatcctgcatcttattcctatttctgctgttcgcgccctgaatgagcctacagataataagcat

SEQ ID NO: 546889 - DNA, 172 bp, Homo sapiens
tgactcagaggatccctgttgctaggctggagtagaaaaggggggcgtctctttgagcattaaattcagctaccaatggcagggcacggtgtctcacctgtaatcccatgcactttgggaggcaaggcaggcaggtcacctgaggtcggaagttcgagactagtctgaacaa

SEQ ID NO: 546890 - DNA, 132 bp, Homo sapiens
ctgccagatatctgataacctcttttctacataataattaatgttctcccttctcaactattatgaatgtactctgctttctttactgatgatcaatctaacgttccatattacattcttgcccatctctta

SEQ ID NO: 546891 - DNA, 768 bp, Homo sapiens
ggagcaagcccaaattgtctgccacggaaagtagagatcacccagtgcgggtagttatcaagcaaaatgacagtgagatcctacagagcacgagtgcccagaatggcagtgactcgtgcagcccagatggagctgctgcaactgcatggcttcagcattgacagcggcaaaaacaaccaaggcacagtagggcgtccatgtcgagcatcacgtacaatatcatcgatctctctctatgcactacggaacaccaaacctggcgaggcttagaatgaaagccaagagatgtgaggacgaaggttgccatggacgtagaatcaaatgaaggctgaaatgggaatactccatgcgtaatccggaaaattcgcacaaaccaatcagaacaggacacgagcacgcacaactactccactggaacagcagaagtgaaacaaaccccaatgacaaagaatcagcatggaaccaaaaaacaacgtggcgatatcaatccagtgatacaatgaaagaactacacagaaccatcttgcattgggagtgaggaatgtgcgaaaacatggcagttgcacaacgtcaaatttgctaacccaaaaagaagtgaaaatagcacgagcaaagaaacaacctggagatcgcccatgagaggatcacagaaacggcaggaacaccgcttgagaacggcgaggcaaatggcacaaggagaaacaaaagggaagccaaagaagatgaagactgggcaccatagggacatacgccagaaacggatgatga

SEQ ID NO: 546892 - DNA, 992 bp, Homo sapiens
ggtcgactcaacgctgtgtgtcgtgaaagttctacctcgtaccagccgatattgtgcatgatgaactgagtcatatcaatctctgacgccaatatggactgcgttgattctggcgactaacgatccagactactgggcatctgatctagacatggcggtggtgtcaactaaagagccatgtgaacacatttagtagcaagcgaggactgtcgagaatgccgaagatggagctccattcatatgtagtggccgtggcgatcgtatgtccactattcacgtgacatttctgtacgacgttgaacacgggggctactcgagccattcgctatctcgcttggtgtgatgattttggagaccttgcgaagtacatatgtgatctatcattgtatgccccggtgacactagcagacttcatctatccaaccatgatcaccacgtggatcatcatcgagagcgtgacttgttgcgtgctcctgaacttgatgtgcctgagtggctgcttgcgatgcaaattgtgcaagcgtggatctcttcgcaaccgtagatggtgcgaggaaccgcagatgttagcaatggcccgttcttgagccattgattaccaacccgtggggtgctggttagaaagagacatatgcgtatgggttttggttcgccatggatggacatctccagagaatgtgcgaggtgtccccatcggtggtatgcctcatgcgcctcttaacacagtccccacgtagacggtacgattggagtgaacgggacatacttcggttttaaggcggcacaagttgcggcgaacacggatattaatccactattaagacgtaaggagaaagtttggcgtgctcaactatattacgcccgaaagaaaagcgctcaaggcgattttttggctaggccaccgaactttttaacgttggtggtatggggcccctttaggcgttggcaatccccacttttcgtcctagggccaagcccaaagattgcattaa

SEQ ID NO: 546893 - DNA, 213 bp, Homo sapiens
ctcagcgtcgccgagtagtgggaactacaggggcccggcctgcgccagctaagtttttggtatttgtagtagagacggggttcaccatgtggccaggctggtctcgaactcctgacctcaagcgatccacccaccttgatctcccaaagtgctaggattactacagacttgagccattgcgcctggcctgaaattatctatttttttttcttg

SEQ ID NO: 546894 - DNA, 151 bp, Homo sapiens
gtcagaccctggtgacacaaatcagtgtggacgaagttgtgcgcaacaacttcgtccactatgatatgaagaagtgtgtggttgcacacgccgaagccccatacatgagctaagtctggatactcggagatccgtgtggacgaagttgttg

SEQ ID NO: 546895 - DNA, 115 bp, Homo sapiens
cctgagtgtaaacgacggcagtatagctgtatctggagtgtcacaggacggcgagtatagctgatcctgattgtaacaggacggcgagtcgtacgctgtttcctgattgtaacag

SEQ ID NO: 546896 - DNA, 283 bp, Homo sapiens
aagtagatgacgccatgaatatatacgtaaatgtattttggcgtacgttgggtctagggtgtagcctgagaatagggtagatcagtaataaagcctcctataatggacactacagctcctattgatagaacatagtagaaagtaagctacaacgtattacgtatcgtgacgtacgatgtctagtgattagtttgctaatacgatgccaattaggcgacctacagtgaaaagaaagatgaatcctagaggctcaagagcactgaagaacatccatttcatattg

SEQ ID NO: 546897 - DNA, 721 bp, Homo sapiens
agcggaactgtagcttatcagagaagctctgtagtcctacactgaagtgtgttcccttggctgtgcatatggggctgggtttggttgaacttccattctgtataaatgctagaacacagttactacagattgattcacaaactgcatgtgctggtgcttgaggcagccaagaatggaatgctcgtggaagagcatatctatatcttaaaaaacactcagacaggagttaacggacagctttaagtaagttccttgtgtctaccacttaatctttatcaactttgattttagttcagggcttagctcatggttggagaaaagtggaacataagcaatgtgcccattccaggtgttgaagaatccaggaagtgttcttaccttctgacttgtatgaacgttatagaacgcttggctttgctctaggttgtcatgttcccgaatgagccatctgtcagtatattcacttaattcttactaatttcagtcttcctgtaaaaggaaacaacttacatattgatgcttcaaatcctagaaagtgtagaagaggtttccttaaactgttaaaactatgagtgtctgtatataaaggatgtaccgttactcagctttctgctccctaaggccaaacagtgtttgtcttcagtgtgaagatttacctgtaaaagactacttgtagatgtcaagcagattatagatcatattatccaataaaatgggacct

SEQ ID NO: 546898 - DNA, 489 bp, Homo sapiens
  misc_feature (277)..(277): n is a, c, g, or t
cttgaaggatctggccgggctcagaattcaccttctacatttgagggaggtgctgggtaaattcactccatcgaatcatcaccaattcggcatgggatggggggcctaagatggatgcggggtatggtcactcggtggaacttcgaaatatgtggggtgaaacatttcataacgcagggcaaggtggtggagcacacccagcaataggaagggcaccgagtcttacatgtaaagaaaacgtacaagtcagcctggaagaaagcctcccccctcatgngcggcgggggagaaggccgagctcccgacagggcaaacagctcactaccggggaaaaatgctcttcccgggtgccgcgggggccacaggcaaaacatgatctaggtaaccagcccttcaggatccttagaaaacaaacgggatacacagacatgcacgggatacgtcacagtccagatgggacgcacgcacaaacagatacacacacaggat

SEQ ID NO: 546899 - DNA, 426 bp, Homo sapiens
  misc_feature (3)..(3): n is a, c, g, or t
  misc_feature (38)..(38): n is a, c, g, or t
  misc_feature (59)..(59): n is a, c, g, or t
  misc_feature (411)..(411): n is a, c, g, or t
  misc_feature (420)..(420): n is a, c, g, or t
canacaaaaacaaaaacaaaacaaaacaaaacaaaacnggtaaggattccccctgtttnccctctctttaattttaaagttatcagttcccgtaaagtcctctgtaacccaaacatactgaagacagcaacagaagtcacgttcagggactggctcacacctgtaatcccagcactttgggagatggaggtaaaaggatctcttgagccccaggagttcaagacccagcttgggcaacatagcaagactccatctcttaaaaaataaaaatagtaacattagccaggtgtagcagcacacatctgcagcagctactcaggaggctgaggtggaaagatcgcttgtgcacagaagttcgaggctgcagtgagctatatgatcatgtcactgcactccagcctgtgtgactgnatacagatncctaac

SEQ ID NO: 546900 - DNA, 108 bp, Homo sapiens
gtttcttctacacacctgtctccctgaagggctgggacagccctggtacgattcaggtgaaattagcaggctggggattcacggtgggacagggtgacggcagacgct

SEQ ID NO: 546901 - DNA, 715 bp, Homo sapiens
cctgtaataccagctactcaggaggctgaggcaggaggaatcgcttgaacctaggaggcgaaggttgcggagagccgagatagtgccattgcactccagcctgggcaacaagggcgaaaacttcgtctcgaaagaaatagaaaacatacactaaaaaaaaactccatagaatctctgcgagactgctggggacgtccgcactgaaagacagagaccatgacccgggaacctgaagggtcaaaccctggggaggtctcagggcctagtttctccactcacgtgaagatatctcagggataaagagtgtgagtgcctcgcccaggttgagggggcctcacgccggttcacgccggtataatcccagcacttggggaggccataaaggggcgggatcacgaggtccgatcaagaaccaatccgggcttaaacggcgggtgaaacccgcgcgtctacttaaaaatccaaaaaattagccggggcgtggtgggcagacgcgccttgtagtcccagctactcagggagggcttgaggcttgaaaatcggtttgaacccggggagggcagaagattggcagtgagccgagatcggcggccattggcactcttggcctggggcaacaaggagcaaaattttggtctcaagaaaaggaaaactggcgttagaaatggcgcttcaacgttaaggtcctggggagctacgctaattcatgggagag

SEQ ID NO: 546902 - DNA, 1047 bp, Homo sapiens
ctttccccgggcagggcagagccggtctcacccccgctctctccccggccccgcgccgctatggcgagagggagccccctcccaacccgggctcgagcggcggcggcctcagccggtcatctggaactatcgtgacgaccaggcgggtgccgtcccgctcgagcgccagcgcctcgcggcactccgggcacacccgatccagttcccctttcctccccatccctcacgttggccggcgtctgtcccgcagacgcaccgactccgaacgcgtaatgcacaatgacggtgagtaacgagggcccccggatgacccctggtacaccacctgtgaggagcctaaacgctcatgccagagggacgcgaggcacgacggatcgcagatggaaacgaggaccgcgtaagggacacgcccaccaacagggactaagccaccgcacagacaccaaaacgcactaaatcaaggagcggattgccacagggaccgaagcgacacagcccaccacagaggcgaccacagcgcgcggatagggcaacgacgcgacaaagccactaggagcaagcaccaggaaggagcacacagcagggcatggaggaagcgataccacgccctaacaccactcatagcgctggtggcgaccaccacaccgagagagcgaagcaatgcaagaaaacgacacacgcaatggcccaaaggctacacgcagccagcggccgaagcactagacgacaggaccaacattagcccgcgggcacaacaaccactgcgggcaaacgcggacaaaagccaagcgggaaggggccaccacacacaccacgaagagacatagagcagagcaaacaccaacaaatggcacaacacggtacccgcaacggaacacagcacccggagaaagactatggcgacaacaccgaaacaaggcagaaccacgcagtgacactctacaaaagatacgaaggatacgtgcgcaactcaatggaaacaggacggacaacacgacacacagagcgaaaccaagagagagacaaacgagcacaccccagcgaaga

SEQ ID NO: 546903 - DNA, 851 bp, Homo sapiens
cgcggtggctcacgcctgtaatcccagctctcagggaggctaagaggcgggaggatagcttgagcccaggagttcgagacctgcctgggcaatatagcgagaccccgttctccatgaaaaagggaaacaaaaaaacacaaaaggacaaaaaaaaaaacaaaaaaaaaaaaaaaaaatttttgtgcgcggcggctcttggcctcccagaaaagtgttttaaaaaccttttgcggtgtgggcggcgcgggggcgcccacaaggaagtggaaaggagcacacgtgtggcgccacagagggtggccccccaaagagagaacaccgtggtggccaaagagaaaaggggcgcgagggggcttctcacacacacaatataaaaaaagcgcggccgcgggggggagaccaacacgagagcgtgggtctttggcaagacaaaatctcccagaaaagggggagagtacagaggaggagggcgcaacaaacaggggggacgcctctaaacaacaacagagggggggctccaaaaagagagaaacggcgcaagattatccacaaaatttaacgccagcgaaacacccacacacgtgtggtgggggtggtgagaagagagagaagaaacagataaaaaaaaaagaacggacgggacacggacaggcggagaaggaagacagagaaacccgcgacacgaacacagaccaccaaacgaacggaaggacggagagagcagagacgacgggagcgacagcgcagagacgacgaaaaccaagcggaagagagacaacggagcgcagcaccccaacgcaacacaaacacccacagagaaagacaaaagaaaaccacaacagaaaaggaac

SEQ ID NO: 546904 - DNA, 1163 bp, Homo sapiens
tttttttttttaaagggggtctcatttatggtcacggttccaaaggtacaaaaaaaattagaaaaatacccccgaactcaaccccacccccgacaacatgttcccccaacgacaaataatttttcccaaaaccacaaacataaacggggtccggggtattaccataaacgaggtgcagcctaagaaacgagttatagaagaaaaattataacagggattcagaattatatcacattcgtggtcctctgcgggcccgtggagagagggtaaataattcccatagtggggtccatagtcctgccccgaaggggttttcccgatctcgtgagtggacaaagctcctttataacaaaggtgggtgttgggcatacggggttaagaagatcctccgtggtgccttcttcttcttctggggttttctcttctggtgaatctacaggggggttgggagctctctcttgggtagactagctaactaaaatcactttaattcagggccaccgttcactattctcttgggacttcagctctctgggtgggccgggagagaagcatagtgggtaggaacaacctcggacttccatatggacgacaggcccatccatgggtctgtggcactccatactgggctatgacgactatcggggatctatggcatgagcttctcgccaagttcctaaatacacctgggctccagagtcctaacaggggaccaacaccaaagggcgcataaaatcaaaacagacaccagtctgcagtgcaatacaccacatagtacaacaaaaatctcggcgaaccaaaaaacatacaaagagacccaacagggcacacctaggaacaggctccacagcacccagagaatcacactcaaaaatggcccccaacagggaacccctggagagacgcccctcacaaagagcatcccaatcgcggaagaacagcctcggagggaaacaaaaactcgcccaaaaccgactcccgacagacaaaaaggaaactcgcccaggagctcccagaaacaacagaagagacagtgacaagcggcgcgggtcaaacacaaaacaggcagtgtccacagacgaagagctggtgaccaaaacgaggatcgagtgacgacaacgcgagcaagcaacgcaaaccaacatcggccgacaaggagcagc

SEQ ID NO: 546905 - DNA, 263 bp, Homo sapiens
tttccttattcaggttgagcactcctgagtagctgggaccccaggcgtgtgccaccatgcccagctgatttttgtatttgtgatggagatggagtttcaccacgttggccaggctgacctcgaactcccgacctcatgtgatccgcccgccttggtctcccaaagtgctgggattacaggcgtgagcaccgtgcctggcatggccaagttttatagttactctagctatggagtagatgttttcagttcagaattagggaatt

SEQ ID NO: 546906 - DNA, 387 bp, Homo sapiens
ttcggcacgagcttgccaatccatttcaggaaatttacaatcatataacaataatggtatatcatttgccatttcgtaaacaggcctttgaggggttttctcaatatcagtcagacgcaagacaatttccggcacttcaagtgattgaccaactaagaaaagaatggccatcatgcaacgaacttggtgccataggaatgctgaaccaatgagatcaaaacaatagaaagtttcagaaaggggaagaatttttgagcttattattgttcgtttaaaattggtaatttgttttgagccatcaagcttacaaaaattcctgaagtctctctctccaacaaaatatgatgcggctttagacattttttcaatattaaggttttttccatt

SEQ ID NO: 546907 - DNA, 113 bp, Homo sapiens
  misc_feature (107)..(107): n is a, c, g, or t
aactcaaataggagctaaaaaaaaaaaaaagaatcaatgaaacaaaaaattaattttttgaaaaactaaaattgatagcactagctagactaaccagcaaaaaaagntagcaa

SEQ ID NO: 546908 - DNA, 523 bp, Homo sapiens
ccacccaaaaaaaataataaaaaataaaaataaaccaagtaggcaaggctatggagttaagggaacgcttaggaacgcttatgcgctgttggtgggaatgtaaacgagttcacccactgtggggcacactttgtagatttctcaaagaactgagaaagcaactagcatttgacccagcaatcccactgctgggtgtatacccaaaggaaaataaatcgttcaacggcactgcgcccgtatgttcattaccgcactatctgcaatagcaaagacacagaatcaacccaagtgctcatcaatggtgacttggataaagaaatgtggtgtatatatactacggaatactacgcagccgtgaaaaggagggaaatcatgtcctttgcagccacatgagtgcagctggaaaccattatcctaagggaactagtgcaaaaacagaaaaccaaataccacatgttctcacttaaaagtgggagctaaacatggggtacacatggtcataaaaatgtgaacaagagacact

SEQ ID NO: 546909 - DNA, 360 bp, Homo sapiens
  misc_feature (29)..(29): n is a, c, g, or t
tctctgataattagaaggctacaggaaantgttttgttttgttttgttttgggtttctttgtgtgtttttagagacaggatcttgttctgttgccccaggctggagtgctatggctcaatcagagctcactgcagcctcgaactcctgggctcaagcaatcctcccacctcagcctcccaagtagctagaactacaggtatgcatcaccacgcctgactaattaaaaaaaaaatttcttttggttgcgtgcggtgtcttggcacccgtaatcccagcactttgggaggtagaggtgggagcatctcttgagcacaggagtgcagggctagcctgggcaacatggcaagaccctgtctcta

SEQ ID NO: 546910 - DNA, 292 bp, Homo sapiens
tttttgggtcatggaacacacacaggcgcacaaaatataggtaccaagtgtgatgaatactctctaatttgctcatctctctcctttcccttgagagcgcacaactcgagaaaattagagaggtgcgatgtctatttccactgcgtgacttggtgacgtctgacctgacgaggcagcttcagacgcacaggcatcagtgcgctgctagctgctctctcgtgtgtacagctacagtactacgtctataacctgagactagctgactctagagtaatatatatataccaaaaaa

SEQ ID NO: 546911 - DNA, 119 bp, Homo sapiens
ccgcggtttatgtttttacgagctaaaggtctaattggagctgtagccaggctaagaggtatcactggagctgtagccaccggcctacaccagcaccacatgcaagtgcgggatccgag

SEQ ID NO: 546912 - DNA, 183 bp, Homo sapiens
agcgctcagtgcccgagctggtcccctgccattccgggaccttttttggagacattttcgagtccaccacccgagtcaccctgcagtggccacacccacaggcccccgtgcctgcagcactactggtgcctgaaacacctggcctgctaggaggctccaataaagctaacccggaccagaaaa

SEQ ID NO: 546913 - DNA, 263 bp, Homo sapiens
ctactactactaaattccggctcctcgaccttccttctaaacctgtgcctagtgctttagagggaggaaaatctggccaggtgcagtggctcatgcgtgtaagcgcagcactttgggaggccaaggcaggtggatcacctgaggtcaggagttcaagaccagcctggccaacatagtgaaaccctgtctctaccaacaaaaggaaagaaacaacaaaagttagccaggcgtggtggcgcgtgcctgtaatcccagctactcag

SEQ ID NO: 546914 - DNA, 789 bp, Homo sapiens
aagtggggattgtttgtatcccaaaaagaacacagttgggggatcaaatgttgatactaacgagagaaagtggcctttattaaaagataagaaaaaagtatggtcgacaaaaataaacgagataaaccattgctcggtatgaaagaatatatattagaattgttggatacattacggacacacgcgtctccatcatcgtagggatgcgcccccccccatgtacggttacacagggcgcgagacaccccccacatcgtgacataattggtgcaagaccgctttacacaggcctatattacaagttacacctcgccgatcttggggtggcccaccacaaaatatgttttatatcaacgcggtacatacacctcgaggtgacaaatatgtatgcgcgagtgatagtggtctcacagacacgtgtcatacacacacgcatataaatgaggagagtggacaaacaattttcatacgccgcccccacattggtcttagaggtgtgaaaacatatacgccgcttggggcacacactttctttttaaggagagaacaaaacaacacattctgggcgtccgtccacaattgcgggggacttcaccaaatgaaaagtcgggggccgcgcaggagagagatgggctgtgagttgaaaagcggcgcgcatgacgtcgcccgcaagagtggctgagcgatgccctcgcgatgttgtctctacgggaacttggtgcagcaccagagaggggaaaaaggagtgagagacaagcagaacgagaaggccgcggcccacattagcaa

SEQ ID NO: 546915 - DNA, 266 bp, Homo sapiens
aacataccttaccaggagaagaaaagaaggagaagaggaaaaggaagcaggcgaccagacaaggcgaaggcagaggcagaagaaggagaaagaaggcagaagaagaagaactaagaagaactaagaagaaggagacaggagaaggagagacgaaagaagacaaggagaagggagcagaagaactaagaagaaggaggaagaaagaaggagaaggaagaagaaacatggagacggcagaagggtaggtatgatgaagaaggaagaag

SEQ ID NO: 546916 - DNA, 1034 bp, Homo sapiens
tattacagctctcagggacttataatatttccagtctgtacacaaataaccagggaatgttggaattgggtgggtggaaagctgggatgcaagtcatctctgcctattacgacaaaagcctatcgaccccagcagccagcacaggcaggtcctgcatgctgaagcaagcaatagccgggagaataacccacaattatgaaaagctaaggtgctattttcttaccgattcccacccagcagcagtgctattattcccatctccccctcccagtctttcctccggcccaatacattagaggcaccaagggtgaaagaaccgcgggggacggagggtgtaatgcaggttcttataagatacggcacacagatgaacgcagtctcctgtgacgcttaggggtagacagaaatcgacgcgggcaaaagtatcaaccctcggagatgcgagacggagatcgtggcgggcagcacgcccctgtgcgtcctgtcgcgcgtatgggatcaccattcctcgggctatcccgtatgttctttccgcccacgtctggccccggagataaactatcttgtgggggctcgttaatgtcacactgtatgggcgctcactggcgacgtgttagcgcacattatcgcgaacttcgcgagtatcgatacgagtacacaaacatggcttgtcctttgacccccaactgtcattgttttccccgctgtgtgggcctaggcagctccttgcgggaacaggccacaactgtcccatacacaataaccacgtgtttgcacaatgcgctcgtgaaaacgatagcgccgtcaagaaggtaggtgcccacactgaacaggagcaggtcggtagagaccctgtgaatcaagggagaacgataaaagagccagaacagccccaattgagtggtaccaaacaacagaccggtggagcaccgacagcacaatcgtccacgagagactaggcgacgaacagagaccaccagtaaagagcgggtctgaattgacaggaagcacgggctgcagtgaacaaatgtgtc

SEQ ID NO: 546917 - DNA, 452 bp, Homo sapiens
  misc_feature (3)..(3): n is a, c, g, or t
  misc_feature (75)..(75): n is a, c, g, or t
  misc_feature (99)..(99): n is a, c, g, or t
  misc_feature (105)..(105): n is a, c, g, or t
  misc_feature (108)..(108): n is a, c, g, or t
  misc_feature (123)..(124): n is a, c, g, or t
  misc_feature (132)..(132): n is a, c, g, or t
  misc_feature (150)..(150): n is a, c, g, or t
  misc_feature (156)..(156): n is a, c, g, or t
  misc_feature (159)..(159): n is a, c, g, or t
  misc_feature (174)..(174): n is a, c, g, or t
  misc_feature (194)..(194): n is a, c, g, or t
  misc_feature (199)..(199): n is a, c, g, or t
  misc_feature (204)..(204): n is a, c, g, or t
  misc_feature (212)..(212): n is a, c, g, or t
  misc_feature (249)..(249): n is a, c, g, or t
  misc_feature (264)..(264): n is a, c, g, or t
  misc_feature (267)..(267): n is a, c, g, or t
  misc_feature (269)..(270): n is a, c, g, or t
  misc_feature (277)..(277): n is a, c, g, or t
  misc_feature (279)..(279): n is a, c, g, or t
  misc_feature (291)..(291): n is a, c, g, or t
  misc_feature (300)..(300): n is a, c, g, or t
  misc_feature (302)..(302): n is a, c, g, or t
  misc_feature (321)..(321): n is a, c, g, or t
  misc_feature (369)..(369): n is a, c, g, or t
  misc_feature (386)..(386): n is a, c, g, or t
  misc_feature (433)..(433): n is a, c, g, or t
tgntttgagcccagcagggccttgagcatggcatcggccgatatgcgcaccctccgcagtgggggccgcttgaanttgccccgcagatcaaatagcttntggttnatnttctccagctccttnntggttttntgcaccctcacctccatnttgtanttntcctcttcagccgcntcgattttggcgtgcagctntttgnagatntcctgcanttcagaaatggagcccgggatatgcagcggcgggcanttctccgccaggtanttntnnttttttncntcatggcggctnttctccttntncagctccgtggccgctatntgcagcatcacgctcttcaggtgctgcctgcgggccgtgatggccctnttccgcttctcctcatntcccatcctgaggtcctgagcttggagcctccttcaaggacaatgtnttggaattccccagggtga

SEQ ID NO: 546918 - DNA, 214 bp, Homo sapiens
tatttttctgtgaccatcaattaatgatagcatatgctttaactctggtagcacaaaccctcattaattgatggttgtgctaccagagttaaagcatatgctatcatgtatctttaagaaccttattttgataaaatgtaaattgtgaaccctgcacatttagtatccccaggccccaaatcctgttccaatgaaaaaattaaaacctgatacg

SEQ ID NO: 546919 - DNA, 365 bp, Homo sapiens
accactctgggaggccccgacggggctgatcactggaggccaggagtctgaggacagcatgctaacatggtgaaaccccatctctagcaaaaatacaaaatatcagctgggaatggtggtgcacacctgtaaaatcagctactataagaggctgaggcatgagaatcgcatgaacccaggaggcagactgcagtgagccaggatcgtaccacagcataaccagccagggcaacagagagaggctagtactcaaaaaattaaaaaaaagaaaataaacaaatgtaacatttgtctagcatgcttcaaaaatgttaagtcatgggccagagggagtggctcatgccagtaatctcagcactttggga

SEQ ID NO: 546920 - DNA, 382 bp, Homo sapiens
ggtataatatgatgtcatgcagccaatccaaacgggagatactactggggtgggccggtcaacttggacattgcaaaacatgggacaaatgattgggtagtattggatgaatgggaggggtcatggtactcaatggagaaaatgaattttaaaaataaggccctttttccacacaaattgtccccaataccgtaaattttggttttttgtgttggaacaacattttggaccatatatgtatatggaaattttctttaatcacattatattcctataaaactctcaaccacacgagatgtgacattttgtgagtgtaggatatattacactttagcacatgattctctttggttctctacatttctctcgctcaccaagagtc

SEQ ID NO: 546921 - DNA, 339 bp, Homo sapiens
tagccctcatctcgtccatgtcctccacattgccagttacatcctttgctacatgcccctcgttattttactgttcggattagtgcatgatacccactcagcgcatacatgaggtttaactaccttgcgaccgcaatctggacagatttgctccgttgatggaataataccgttcacacaaccgtatccgcacatagtgcttcgatctagttctatcaatatagcccttaccagcattaatcagagcgaactcacctgattttggtatatagtcgtggatttgtttctgcaatgcaaaatccttggatggtgtgagattattctacaagtctgggtcag

SEQ ID NO: 546922 - DNA, 375 bp, Homo sapiens
atcctaactggctatataaatagacagctgattccaacattctaccataaaaatccaaagaatgttgaagagccaaacagctttgataaaagtgagacaaaagttaaaggatacacattatctgattccaaggcttcttataaagctacacgtcattgattctgtatggtactggcaaaaggagagacacattctatgtatctatctgtctatatatctatatggaatataataaagagttcagaaatagatccacaaataagatcaattgaattttggcaacgatgaaaaaataattcaatggagccaggacagaattttcaataaatgatgctgaaacaattagacatccatatgcaggaaaaaaatgtttga

SEQ ID NO: 546923 - DNA, 246 bp, Homo sapiens
cacgaggtccatctacgagaccacgcgcctgggcatgttgaaagtcacaccggctgcgatcctgctggtagcgcaggcggtcactggcttcctggtggaccccgttccgaaccagcgcctgtatgtccacgaggacgtgtatgcggctgtgacgagccccgagcttcacaaacagatgttgtctgccgaaaatgccgtcatcggctatatagacccctactccgccagcatcatctccctcttcca

SEQ ID NO: 546924 - DNA, 379 bp, Homo sapiens
ggcatttcctttcccttcctgttttcctctcccttttcctttggtgcagcatgatttttttaattttcagaccctccctattttcatgaacagttaccctctgtccccccaaccaaaaacaactcatggcctcctttggcccctgtgtaacctttccaacctgtggctttgccaaatggaccccggtcccaaagggatttttttttttttaacaatgatatccccgtttgggtccctttttaagcttgtaacccccccccccgacttataatttttaatgtattttcctttgtttaaactgctgcttcctctgtttccttggattgtgcccgttatcagtggcttttgggttcaaagtaataaaaaattcccaaactta

SEQ ID NO: 546925 - DNA, 134 bp, Homo sapiens
agagggtcagtagaagatagagaccagtgctgataggacagaacaggcagtgtctgaaaactagtccgataccatcatggtctttgagggaaaatctgattccactggggttatcatgtccactagtggactca

SEQ ID NO: 546926 - DNA, 289 bp, Homo sapiens
tttttttttttgagatggaatctctctgtcgcccaggatggagtacaattggaaaaacactgctcaatgcaacctctgcctcccgggttcaagcaattctcccgaattagacttccgggtatctgggactataggggcccgcgaacaagaccgggttattttttggatatctaagtgtacagatgggcgtctcaacactgttgaacagtctggtctcgaatctgacctcgtgatatgcgcgcgtctggctctcaaagtgctgtgatctcacaagatactctgtctagac

SEQ ID NO: 546927 - DNA, 205 bp, Homo sapiens
cccaggaggcggaggtagggtgagctgagatcatgccatagcactacagcctgggtgacagagtgagattccatctcaaaaaaaaacagacttccagggaagggaccagggcaccattcgtaaggtgtacacttcgtggtatttcaaagcatctagtggccctcacaggatagtaactggctcagctaaatcactggtaggaaat

SEQ ID NO: 546928 - DNA, 356 bp, Homo sapiens
agatggagtctcactctgcaggcaccctggagtgcagtggcgcgatcttggctcactgcaacctccgcctcccgggttcaagtgagtctcctgattctcctgccacagcctcctgagtagctgggactacaggggtgcgccatcacttctggccaattttttgtattttcagtagagatggggcctcaccgtgttagccaggatggtctcgatctcctgaccttgtgatccacccacctcagcctcccgaagcgctgggattacaggtgtgagccaccgcgcccggccgcaacctcatcttaactaagtccatatgccgacgaccgtagtcacaatagggccacattctggtcgac

SEQ ID NO: 546929 - DNA, 107 bp, Homo sapiens
  misc_feature (14)..(14): n is a, c, g, or t
ttgggggggggggncccccccccccccccccccccagaaagggggatgttggggggttggaagcccttgaacttttttttttattaaaaccttgttttaagccgcca

SEQ ID NO: 546930 - DNA, 1553 bp, Homo sapiens
  misc_feature (425)..(425): n is a, c, g, or t
  misc_feature (998)..(998): n is a, c, g, or t
  misc_feature (1011)..(1011): n is a, c, g, or t
tggacaacaattaatttatttattggaggggtgaggcaggcaagcggggagggaggtgtaggggtgacctcttcttccctcacaggcaccaggccttggtttctcctcccagaataagcataaggctcggcaggggcttgaggggaggtgaggcagggaggagtgcagtggggccgtggtggaaactcagagaaaagcgtggggctcagaggttaggaagctgtgcacgcgtgtgggggggtgtgggggggtgaaagggtggaggcagaggctcaagaggtgtgaactgtggcagcctcggagaggggaggggctccaaatttaacaccgaggaactttgcgaggtgtgttagaaagttaaagagtggggcacctcactagagagggtgtgaacacagaagaacagttgtgggagtctcagaganggggatatctcagaagaatctccaagagaagaaaagtgtgtgggtgtctccagagagtgttagagaagccgtggaggcccacagggtggggggggttaaaggagggtgaggccagaggctcagcgcggggagaaaagtgggcaagcctcagagaggggaggggtctcaaaccattaaacccaggaacactataaaagggctcataagagggttaacaaagggggaactcccagggggggggcagagagggctccaacgcggtgaagccacaaagttccagggggggtgcaagggcaagggtctcgtgccaaaaagctctcaagagggtggccgggttctccagaaagtgtgcaaacaaaggggcggtgaacacgcggggggacctccccttccctggggggaagagtggctccacaggggctggtggaaacaggaaggcccccaagggggggcgtcataaccgagagaactaaccatcttgagggggccctccccacaggggcggcagccccccagggggcgttccggggaagaatactaacaaagttaccgaccccagagaagtgttttaanagagcgggaaagntccccacaagggcggtttcttgtgggctacaggggcgaccacggggggcgggaaagatatcaccgcttgggtgggggaacaacgcgggggccgcattaggtggtctcaccaagactgggcggggggccccaaagcgggggagcacccacaaggggtcaaaaaaagcctccgaagggaaccatcataaagttccagggggggcgggcacacacagacgcggttatatgaaaacatgtgggcccagtgggtgctccacaggtggtgttccggtacaccgcagagttttcttgtgacacacggtggtgaaatcgcgggggggcccccaaaaaaggagaggcgaacaataatggcaaaacacggtactaagcttgtgcatcatagcatcacctaataatacacacaatacacaacactgatacaacatcaaaacaaaagagaaaaacaaagactaccatagtcactaactcaaacgaccaccaaaacagtcatagataaagtcgaataagacatatgcaccaacttacaacagagcagcaaaccaa

SEQ ID NO: 546931 - DNA, 335 bp, Homo sapiens
agtacgataagcatagatgtcttatttatttgtttctgtcttgtacggtgtcaactcgtatgcttcagtccttctcttattggattaggccaactctaaaccctctagcttatagtatggcattttcctctccaaagaaataagagctcgcccttctcagcctttcttaggcaactgagaattacatgagggtgtctggaagaaacactccctaagatgtgcaacggctctgagtaggatttcccctcagaagaacgtacttagggtgtaatctcagctagcaggtgccaataaggagctgatctcccatgccttgagcccctgacacactgtgc

SEQ ID NO: 546932 - DNA, 1407 bp, Homo sapiens
  misc_feature (621)..(621): n is a, c, g, or t
ggctactctctctaagccatacagtgccatcctcatctctgaagcgagacacgctctcgcacaccgggcaagactgagcaggatacccttcgtggcaccctcaaggtgccacaacggactgaggtaacacacagcatcggtcatactgaccccgtcagttttccctgagaacagtgatcctgctcctgaactcgtcgaatgatataggaccagtcactgctagtgtcgggaacacgtagtaacactaggggatggaagacgcgaaactatcggaatattccacacgtcgtgctctgcgtgggtccaatcccactatgtgtgtcaggtgatagtagagtcttatctgctcgtcgaggagtggccgagatgtgtgcccatactcagagcttcgcatgggactggaacactcatgccgcaactcttggggatctgatacacagggccaactagccacgtaggctgactgccgtgcgaggccaattactcacagggagtgtggctcgcacggtagttgcgccactttcctcccgtctgtacgatacccgaggagcatttgtcatgcgtagcggattctccgaagcattcgacaacgccattactaagggctttattggggaaatnagttcgcctgcggagtgatagttgccgagagataaccacatggtacgccatgggcacttgaaagaacgccaaacggtcgaacgaaggttcgcccgtagtgccgttagtttgttgcccggcattttcatccagctctccgaaacccagcgaggctaaacccgcttgaattctaatcctaggtgcgtcaccgttagattacggcgttagtggcaatagaggcggtagggttcccaaatcgggctaccatatgggcacaacccgtcgggcatcacaagcctttgacctacaaagcggcctgtgacaaggaaccacagaaatcccgaacttagttttggtcggccaaccagcctaggggacctctaatgcatgtaggacaaatcaagcgggcgcttggacgcttgggattctttccgttcacccaacgtattcgggaactccccccatactatgtgggccttgtcactgctggaaccgtgggcaccgcgggcaccacttcggcggccacgttggcccacatctggtttccatcggcggggcaattatcttccaaaacctgcacacagcggcgcaaaaacacatccctttttgaaatcagcagggcttaaaggacatggggtgcggggaaaaccaattccattaccaaactggtcagcctggataggccttcttccaaagcacccctgtaacacacggcgttaagtatgcggctcttaggttgttagccgttgggcctatcgagggggcccaccacagtgcatttccataccggaattcctctgcggacga

SEQ ID NO: 546933 - DNA, 167 bp, Homo sapiens
agagaacgagaagaacgaatcattacaggtcctgcaataaaatacactaggactttctacatggaaggtggagaaacagaagacactctgaagaaattgttacaagaatgacacacccagtgaataggaagttcctggggatcctcatacgcgtcgcacctgcaggc

SEQ ID NO: 546934 - DNA, 103 bp, Homo sapiens
gatagaattcgagtcggtaccttattgtagagggtttaatatccaaacataggtagatacaatcagatcaagtgttagggagggtgaaagcctgtaatacaag

SEQ ID NO: 546935 - DNA, 512 bp, Homo sapiens
tcagaatcgattccgatgtgaatgtcgatactgccagagccacaggccgaatctttctgggatccctggggagagtaacagggccccacatccctcctcctgggagacgctggtgcagggcctcagtggcttgactctcagcctaggcaccaaccagcccgggcctctgcctgaagcggcactccagccacaggagacagaggagaagcgccagcgagagaggcagcaggagagcaaaataatgtttcagaggctgctcaagcagtggttagaggaaaactgagacgtgcacccccatgggatggagacccgaagggactcagacggagccgccgtgttggcagcgcctgggtgtagaggcccatataaaaagaccaaacaacaagctagagatacgagatagagtagccagagaccagagaaccgaaacacggaaggagtaccacccagcatagaagctaagactagacccgaggaaggtcctcatgtttcgtgcctgtcattctcggatg

SEQ ID NO: 546936 - DNA, 380 bp, Homo sapiens
atcgcacggtcggatgtgctgcactctaaagttcgacgttgaactcgcccaaatagcaagacaaacgattgttatggaaaacatgtacttcccagtatgtagaggtttgacacttaggatcaccgtaacatttaaagcatgaggcccctctccctagccccgaaaactggtagggctgaacgtccaaggcaccgtgagtcgtggaacgtttcttggccagcgtatcacgtcgaaggtcgtgacatcaaggcgaaggctcccaaggtcaagatgccagatgtggacatctcagtgccaaaaatagagggtgacctgaaaggccccaaagtgcaggcaaacttgggtgcacctgacatcttaatctggggcccaagcctgct

SEQ ID NO: 546937 - DNA, 1078 bp, Homo sapiens
  misc_feature (50)..(50): n is a, c, g, or t
  misc_feature (65)..(66): n is a, c, g, or t
  misc_feature (115)..(115): n is a, c, g, or t
  misc_feature (120)..(121): n is a, c, g, or t
  misc_feature (148)..(148): n is a, c, g, or t
  misc_feature (162)..(162): n is a, c, g, or t
  misc_feature (170)..(170): n is a, c, g, or t
  misc_feature (176)..(176): n is a, c, g, or t
  misc_feature (203)..(203): n is a, c, g, or t
  misc_feature (210)..(210): n is a, c, g, or t
  misc_feature (235)..(235): n is a, c, g, or t
  misc_feature (237)..(237): n is a, c, g, or t
  misc_feature (316)..(316): n is a, c, g, or t
  misc_feature (329)..(329): n is a, c, g, or t
  misc_feature (341)..(341): n is a, c, g, or t
  misc_feature (344)..(344): n is a, c, g, or t
  misc_feature (349)..(349): n is a, c, g, or t
  misc_feature (368)..(368): n is a, c, g, or t
  misc_feature (492)..(492): n is a, c, g, or t
  misc_feature (523)..(523): n is a, c, g, or t
  misc_feature (525)..(525): n is a, c, g, or t
  misc_feature (530)..(530): n is a, c, g, or t
  misc_feature (553)..(553): n is a, c, g, or t
  misc_feature (555)..(555): n is a, c, g, or t
  misc_feature (559)..(559): n is a, c, g, or t
  misc_feature (564)..(564): n is a, c, g, or t
  misc_feature (575)..(575): n is a, c, g, or t
  misc_feature (580)..(580): n is a, c, g, or t
  misc_feature (630)..(630): n is a, c, g, or t
  misc_feature (638)..(638): n is a, c, g, or t
  misc_feature (646)..(646): n is a, c, g, or t
  misc_feature (770)..(770): n is a, c, g, or t
  misc_feature (793)..(793): n is a, c, g, or t
  misc_feature (860)..(860): n is a, c, g, or t
  misc_feature (1023)..(1023): n is a, c, g, or t
  misc_feature (1057)..(1057): n is a, c, g, or t
ttagtgtttgaacagccactggctcccgttttttgtgccccacaaggggnttactacgcgtgccnnctatgagaacaaagtttgctccctcggcgcccgctgcagcaagatgctnaacannggtggagtgacataccgtgatcagccntggcatcgagaatntctgtctntaccgnatgccagacgccctggcagggcagcanttcaccncccgggatgaagatccctactgtgngnctgttttggagaatctttgcacctaagtgcagcagtgcaagcgccccatcgtaggactcggtggaggcaagttgtgtcntttgaagaccganactggcaccacnacngcttntcctgcgcccgctgctctncatccctggtgggccagggcttcgtaccggatggagaccaagtgctctgccagggtgtagccaggcagggccctaagccagggtcttcctgtgatatcaggctttcccataccacgggcccagnactgtggctccttttctaaaccacctctggnantcagntccccccgccaaaaaaaagggtntncttntgggntccagtttgtntcccnatccagcatccccaaactggtactccctgacccaggcccccaatcctggntctaacanagcctccntgagtcaagccccctccccacacctggactccagaattcaccctctcccctgcagtctgggttcccagattgagtcctctccccaaatcagggctctagacccgagccctccaaacctggactntgggacttaggcccccttaaatntagacttctctttataggtttcaggtctcctatgggtgcctgggaagtccttgaaagtggactgttntcaggcttgacctgccccaccccatccccgcggttgaggctgtgggggcagcagatcaggagcccactgataaggggccctagggtacagggtgctgcccagcaggtcgccaccgagtgtcttctcattttatttcagctccattttgcccataaatgggcanaggggtgagattggctcatcccccttccagattntgcaataaaacggtgtgagga

SEQ ID NO: 546938 - DNA, 1050 bp, Homo sapiens
  misc_feature (50)..(50): n is a, c, g, or t
  misc_feature (65)..(66): n is a, c, g, or t
  misc_feature (115)..(115): n is a, c, g, or t
  misc_feature (120)..(121): n is a, c, g, or t
  misc_feature (148)..(148): n is a, c, g, or t
  misc_feature (162)..(162): n is a, c, g, or t
  misc_feature (170)..(170): n is a, c, g, or t
  misc_feature (176)..(176): n is a, c, g, or t
  misc_feature (203)..(203): n is a, c, g, or t
  misc_feature (210)..(210): n is a, c, g, or t
  misc_feature (235)..(235): n is a, c, g, or t
  misc_feature (237)..(237): n is a, c, g, or t
  misc_feature (316)..(316): n is a, c, g, or t
  misc_feature (329)..(329): n is a, c, g, or t
  misc_feature (341)..(341): n is a, c, g, or t
  misc_feature (344)..(344): n is a, c, g, or t
  misc_feature (349)..(349): n is a, c, g, or t
  misc_feature (368)..(368): n is a, c, g, or t
  misc_feature (464)..(464): n is a, c, g, or t
  misc_feature (495)..(495): n is a, c, g, or t
  misc_feature (497)..(497): n is a, c, g, or t
  misc_feature (502)..(502): n is a, c, g, or t
  misc_feature (525)..(525): n is a, c, g, or t
  misc_feature (527)..(527): n is a, c, g, or t
  misc_feature (531)..(531): n is a, c, g, or t
  misc_feature (536)..(536): n is a, c, g, or t
  misc_feature (547)..(547): n is a, c, g, or t
  misc_feature (552)..(552): n is a, c, g, or t
  misc_feature (602)..(602): n is a, c, g, or t
  misc_feature (610)..(610): n is a, c, g, or t
  misc_feature (618)..(618): n is a, c, g, or t
  misc_feature (742)..(742): n is a, c, g, or t
  misc_feature (765)..(765): n is a, c, g, or t
  misc_feature (832)..(832): n is a, c, g, or t
  misc_feature (995)..(995): n is a, c, g, or t
  misc_feature (1029)..(1029): n is a, c, g, or t
ttagtgtttgaacagccactggctcccgttttttgtgccccacaaggggnttactacgcgtgccnnctatgagaacaaagtttgctccctcggcgcccgctgcagcaagatgctnaacannggtggagtgacataccgtgatcagccntggcatcgagaatntctgtctntaccgnatgccagacgccctggcagggcagcanttcaccncccgggatgaagatccctactgtgngnctgttttggagaatctttgcacctaagtgcagcagtgcaagcgccccatcgtaggactcggtggaggcaagttgtgtcntttgaagaccganactggcaccacnacngcttntcctgcgcccgctgctctncatccctggtgggccagggcttcgtaccggatggagaccaagtgctctgccagggtgtagccaggcagggccctaagccagggccacgggcccagnactgtggctccttttctaaaccacctctggnantcagntccccccgccaaaaaaaagggtntncttntgggntccagtttgtntcccnatccagcatccccaaactggtactccctgacccaggcccccaatcctggntctaacanagcctccntgagtcaagccccctccccacacctggactccagaattcaccctctcccctgcagtctgggttcccagattgagtcctctccccaaatcagggctctagacccgagccctccaaacctggactntgggacttaggcccccttaaatntagacttctctttataggtttcaggtctcctatgggtgcctgggaagtccttgaaagtggactgttntcaggcttgacctgccccaccccatccccgcggttgaggctgtgggggcagcagatcaggagcccactgataaggggccctagggtacagggtgctgcccagcaggtcgccaccgagtgtcttctcattttatttcagctccattttgcccataaatgggcanaggggtgagattggctcatcccccttccagattntgcaataaaacggtgtgagga

SEQ ID NO: 546939 - DNA, 134 bp, Homo sapiens
agaccatccacttgctccgctctgacatggctggagaaggttgaggtggggtgtgcagacttgggcgctggagctcgagtgcgcggaaatggataggcaaaggaggaagaaggcatggatgaaaacggtggatc

SEQ ID NO: 546940 - DNA, 424 bp, Homo sapiens
ggggccgtttttctttttttccccgggtggggtttggtggcccaattacaggtcattgcatcctcaatcaccccggccttagcaatccttccccctttttggtgggggtaccgctccccgcccccctgggttaaaatttttttttttttgggcgggttttttttttttccccgggttgtttccgggtcctggggtcaggttgtcccccttcctttggttcccaaggccccggcccagtttttgcttttttcctttccctctttccccacaagggggttttttccctttaatggattggccttcctaaaatgggttttttggtgggcaaatttttttagctgggaattttaaattccccctggaattttttttcctgccgtttcccttgacttattttcccattaagggttgttttgggtttcca

SEQ ID NO: 546941 - DNA, 700 bp, Homo sapiens
  misc_feature (602)..(602): n is a, c, g, or t
ggaaatctggccactgggccaaggaatgcccgcagcccaggattcctcctaagccgcgtcccatctgtgtgggaacccactgaaaatcggactgttcaactcacctggcagccactcccagaggccctggaactctggcccaaggctctctgactccttcccagatcttctcggcttagtggctgaagactgacactgcccgatcgcctcgtgagccccctagaccatcacggatgccgagcttcgggtaactctcacagtggaagacggcaggaatgtcaggcctctgagcccaagccaagccatcgcatcccctgtgacttgcacgtatatgcccagatggcctgaagtaactgaagaatcacaaaagaagtgaatatgctctgccccaccttaactgatgaccttccaccacaaaagaagtgtcaatggccggtccttgctttaagtgatgacattaccttgtgaaagtccttttcctggctcatcctggctcaaaaatcacccccactgagcaccttgcaaccccactcctgcctgccagagaacaaaccctctttgactgtaattttcctttacctacccaaatcctataaaacggncccacccttatctcccttcgctgactctcttttcggactcagcccgcctgcacccaggtgacataaacagccacgttgctcacaaaaaaaaccaaaag

SEQ ID NO: 546942 - DNA, 119 bp, Homo sapiens
catgctttatagacgcacagtacgaatcagcatatgatgattcataatttcagtttactagatctgaagttttgaagtaaacacttttcagtttccttctacttcaataaatagtatga

SEQ ID NO: 546943 - DNA, 169 bp, Homo sapiens
agagcagggctcccgagtacatgagctcccgggcctccgtgtgcttgctctgggacatgtacctgaagaacagggtccggtacatctggtgcgcctcgtagtagtcgcccttctcgactggcgcgcagcttgccctccacacgctggcacagcacgcggttgcggccgc

SEQ ID NO: 546944 - DNA, 2011 bp, Homo sapiens
  misc_feature (633)..(633): n is a, c, g, or t
  misc_feature (962)..(962): n is a, c, g, or t
cacgacagccaggttatgagcacggtccactgttagtggttcgtatatagttggagactctcgtgtggttcgtgcctccactgtcgtgggtgtctttctgttggtggtcactgcactcacgtctgtctttttggcctgttttttcaccacagatagtgtctctatagttgtggggcggcctcattatgtagtgagggcggtcgtggggggtactctactccatagcgcgtcttggtcgcttctgcgaaggagggcagtcgcgttgttggtagtaatcccaacgagagttgtggggaataacacactaagtctttgttcgctctcaccctcccggggcggatatttttgtggttacaaagttgcttctcttcgggaggaaattatttcttgcgcgatggattgatcgtcgctatcagatcttgttcggtgatgctgagtggtgaggctcctacgttgcttgttagtattggcgcctcggcttgtgccgtcccttttcgtagtgttcactgactttgttgcgtcctctgttgtggggggaagctacgaagtagccgatccccctttttcccgcgcgcttgttttaggtggtcgttccaacaatccttaggtgagaattacaattttctcgggatnggggggtgcctcctccaccaacacgtcgctctgttcgtctccacacagggcgaatggatgtctcctctgggggagagtgggttttatcaacaacggtgactccgcgagactcccacgacgttgtggtcctctaataagacggcgccttcttgctttacaccgagggtgtttctcctcgtaggggccacctcctttcgcgcgggggaccatgtagtatttaccacaggggtccccaccatagccagaacgccagggttgtctgactacgaggaattgactactcccttctcgcgaaatgttttgttagggccgcctctcccttctcaggngcgtcacacaatacccattggttgcttcttgcctcacataagctgtggcttgggcaaagaatgtggcctctttacccgccgccgtctctcaaaagaggggggtttctccctccgcctaagtaggggggcaacatctttctggagttatcccccccccgcagagcggcgcctcacaaactggcgacgccgcccgccccctccttctatgtgggcgatcagtgggtgagcaccccttctcgccgtgtgtcagagatgactcctcccttcgtcaagagggggcgatactctcagagtgttgtatcacgcggcgcgccccatcggggcgcacaccaacaaagtccggagatattctgggggacggcacatcttgcggcgtacccaccccgggaggtgcgacacaatccgcgctttacaccattatttctttctcacaccgcggttgtggcgaataaagctcccaaggcaaaagagggctatattacgacacctcatcttctcggctttacaaaggaatagttggggacggtattggagcccgctcgagaggttcaccacgcagggtagcacaggggtgaacaaagagcatagtgcacaaacaaccacaggggactattacttcctgcagacgcgttatatgcaacaaccacttctgggcggtttcattatctctggtatccatctgtggcgcgtgttctaacaccctctctaggcacacaccacacagaagatgttctcgagacatggcttgagagaacatgccacagtggcgacacaattatatatcgggcagaaagtgggagatgctctcgcctcataagcgaatagaccggctagagacagcgcgagagaagagagaagttgctacacaagaggagctctaggcgccattgtcatcgacgtgaacgcccgtggggtgtcatacgcgcggatctaaggctctcatagttttggcaatatccattaacaagaatttccggattttatccggctccaggctctttctgggttagaagggacgcctctattaaaacacatggattttgccacca

SEQ ID NO: 546945 - DNA, 847 bp, Homo sapiens
gatcatcgacggacctcgagcggctcagatcttcgcaaatactgtggacaatgcccgcatcgttcggcgagcattggacaatgcccgtcttgctgtcttggatgactttagagtctagtatgagacagagtctggccttgcgccagtctgtgtgagaatcgactatccatggtgctccgcaagggtcagttgatgatcagccgaatatcacatcgaactgtcaggctggatgatcagacgattctaggactctcaagggggagctgttctgcattgaatgaggtaacctagcgaagaggaagctaacacacgtgtcctacgggcccagattgccagctcgtggggttgaccgctgcgaggctagatgcccccaaatctcaggacctcgtcctaggattcatggcaaacatccgtggcccaaatatgacgcatggctgtgctcggatatgaaccgagaaggagctggacctagagctactggtctcatgcagagttgaggagacgcaccatcagctggtctgccaccacggtcctgctgagtgttgcgacgctgctgaagacgcattgcctctatccgagcttgagagcgttcagtccagctccttgcgggatcgatcctggactccgatgagaatgatcttgaaggccagccttgggccgacagtgctttgcggaccgtgggagtgcgcgttatcgcctatatgatgggtgcttggcaaccgggtcctgcggagcctgagtcaaaggtgggcagaccccgggaaggtgcaggcgggcccaggttaggccctcaggttgggccagggggggcccccccccccgggggggggggattgagggcggcgcc

SEQ ID NO: 546946 - DNA, 484 bp, Homo sapiens
  misc_feature (13)..(13): n is a, c, g, or t
  misc_feature (74)..(74): n is a, c, g, or t
  misc_feature (180)..(180): n is a, c, g, or t
  misc_feature (197)..(197): n is a, c, g, or t
cagtgattggtangatgtagcgatcctggttgttttcaatgccgtgcagggattccttgatgtccttgatgcantcggtgatcgtctcccgctcacggttgagttgggcgttaaagctggcgatctcgttgatggtgttcacgttcagcagtgctttgaagcgcgcttcgaatcggggcncgtcgtccttctgcaantcgttgagcatccgcgcatactctggcagcgccgccaggtctgcgtccatctccacggtctcagccttgaactgattcttgaagcggtgcatgggcgcctgtaatacggtcatttagttgtcttcaggtgagcgttctccgcatcgatacgtttttgtagccattggcgaacttgctgctcgtggttgtcgcaagattcgaccgatagcacgtgctcccccagcgcttgctggcgccagctagctaatagcgtgatctgcgcttggctcagcggcgcatcatcccaa

SEQ ID NO: 546947 - DNA, 332 bp, Homo sapiens
  misc_feature (210)..(210): n is a, c, g, or t
  misc_feature (230)..(230): n is a, c, g, or t
  misc_feature (254)..(254): n is a, c, g, or t
  misc_feature (258)..(258): n is a, c, g, or t
cggcccgaataaaaaaatgtatagaacaggaaactttccgaggtaactgaaatgttctgcttgattggagtggtgattacatggttacatttatcaaaattcattgaattgacatttaagatctgtgcatttcactgcatgtaaattttatcttaatttttaaagataaaatctgttcaactattttgattgctaaatattttggctaanagaaaacagaaatttgttgnagagtaggagatatgcctgttatnatgntttatctttgatagtgatctctgaatgactctgaactctacatttcagatctgctctgtgtgatggatatattg

SEQ ID NO: 546948 - DNA, 196 bp, Homo sapiens
cgccatcgagaaccatgggccaggggaggtactgcagtaagtcccggttggcctggagtcacgcgaattatcgaagctgggcctggcaagaggccgctggacaccacgctccagtcgtcagcccacttcctagctgaacagcgcgagggggaggcagagagccgtgtccccaccatggccgggaattatcccagta

SEQ ID NO: 546949 - DNA, 202 bp, Homo sapiens
aatgcgagcagtagtctgtttctgtgttgtgtagcagagctgagtggtagactttacctgtattcctatctggggtgatcctaaagatgaaagaaaacaaaaaaaaaaatggagtaaatgtggtacagagatgggactgaggtacagactgatgtatttaagggtcagactagtaatgagtagtaaataagccatggagatc

SEQ ID NO: 546950 - DNA, 109 bp, Homo sapiens
aacgactggtcctcacgctatcgagtggctgagagtatggagaatcacttgcaacctgccgaggtggatgttgcgtatgagcttgggattgtaccgagtatccgagtgc

SEQ ID NO: 546951 - DNA, 739 bp, Homo sapiens
acaggcatgtatccatgaactgcactattataaactattaaaatgatagatgtggagaaagtaattattccaacacccatctgccatgcgatgttaaaaaaaaaaaaaagggacagaaaaatagcacaggtactcctcacggcaaaaagatatccatgcgtaaaaatcaacaactccagtcaggggaccaggaggagctcggggacgcagacagattcctgggatgatgattttttttatgatcgtagtaaaggaataggtaaagtcttggatgtcagtgaagtggcaacatagccaaaaagtggggtacctttaaggaaatgatgtggtaagtctccttaatggtatcctgaggtaagtttacctacgggcagcagatttggtaagaattacttttaacgaatttcattctttaggtatggtcatggagcatccaaccatattataataggaaagtctttggtaaatcggtggtcgtttaaaggtacatatatctggtctataataactggatccaagaatgatgggacaggcaaacaaggttgacaaatcaattctgagactttaacacaagtggacacaggtgggacagattagaaaccagagggggactagctaaaaagcgagcatcactcaagtgaggaggggatccctatgccttaacgatccccgtaaacacatagccaacaagccttagcgaagcataaacacatacacaactggataataaagaacagac

SEQ ID NO: 546952 - DNA, 299 bp, Homo sapiens
  misc_feature (81)..(81): n is a, c, g, or t
  misc_feature (138)..(138): n is a, c, g, or t
ttttttttttttagaatcagccgggtggtttttaaaaatttcccgggaagggtttccattttaaaggcaaaaaccagtggnaaaatcaaaggggtcgagggggttaaaaatgttttggggattccctggttaaaagcnaaaaaacttttttcccattaaaatcccccgtgtcccgcaaaaaaaggttaagctgtattttattgcccgtttttctgaaaaaggttagtttttttcaggatcccccaaaaaattttgtttagcccagggataggaaaaataaaattaattgtataggttta

SEQ ID NO: 546953 - DNA, 325 bp, Homo sapiens
aattttaaaagggtttttttctatccctttaaattttggcccccccccccctaaaaagggtggggttttttcccgggaaaattttttccccaagggggttttttttttggggggggggggggcctttccccccctttttaagatgggggccaattttccccccaaaagggggggccccccgggggtttttttttccctttttttcccaaacccaaaaaaaagagggcccccccctgggggggttttaaccccccccgcttttggggcccggtttttttttttttttttaaacccaccccaaaaaaaaaaaaaagggggggcccga

SEQ ID NO: 546954 - DNA, 397 bp, Homo sapiens
  misc_feature (175)..(175): n is a, c, g, or t
  misc_feature (240)..(240): n is a, c, g, or t
  misc_feature (254)..(254): n is a, c, g, or t
agccccagggcagggggccctccctcctcagttttgtgtttggatacagggagcagccaggagactccctagggccccccccatggggggggtcactcacgcactccccatcccttagggcttcctggcctactgcatccttgtgggagtcagggaggagggcccgttgggtagntggggccaggtttttctcccccccccctgcagattttttgctgcttccactgacacccttttgantggaatgaactggntgggcttgtcagggggccccccaaaaagggggccctgccaggtagctgggggagtggcatggggcaggggcccagttttcagcagcagaccctctggacagttttttcaatccctgtttttgaataaatattttcagcgccca

SEQ ID NO: 546955 - DNA, 881 bp, Homo sapiens
ccgagtgtcagtgcccagccgcagcgcaggagcgagcgcctgggtctcgtaggagcgagacacgaagagaggggctgtctgcggggtgtggtggcgggttcgctatgtggatgacgattcgaggtccagcagcagctcctcctcatcttcgtcttccaaccaggaaaccgagaaagaaacaatacaccccctaagaagaaggtagagtacacgtcagcatgagcgaaaaactccaaagtcctctccatcagcgccaagagaattcagaaggagctggcggacgatcgactttagacccatccacgcgtaattgctagtgctggatcccgaaaggtcgataagcatccgtatgcaatggagatcaagccattctagggcctccaggatcctgtgtatgagggtggtgtatactttctcgatatcacttttacaccagaatatcccttcaagcctccaaaggttacatttcggacaaggaatctatcgattgtaatattgaacatggtcaaggtgttattttgcttggacatcttgagaagcactaattggagtccaacgactaaccatttctaaaggtcctccttatctatctgctcacttcgttacagactgtaagtcctgccagagcccttggctgggcacaggttattgccactcaggtatattgagcaacagaaggcagaacattgacagaatggcccagaccagtgggaccaaggagaatacggctacagtaaatttgggggtatcacaactttctttacaattaattttgtcttgtcacgagaaagagcagctgccttattgatttttgaaggggggtcagggacagggtgggggagatggtaagagaagaagggtaatttctattagcaagatat

SEQ ID NO: 546956 - DNA, 458 bp, Homo sapiens
  misc_feature (57)..(57): n is a, c, g, or t
  misc_feature (60)..(60): n is a, c, g, or t
  misc_feature (108)..(108): n is a, c, g, or t
  misc_feature (229)..(229): n is a, c, g, or t
tggcgctgttttcccatcagcaccatcacgccgggttacctggtcagcgtggaaaanacncactggcggaacagcgcctcgtattcggttttggtataaataaacagnatgcgtgctgtgccgctcataggcgaggtttatcaattcagtggctaatgtcagcgccagtccttcaccgcggacggattcactgatagcaacgcatttaataatatttccggcaattccnaccgcacgcgataagcttttcatcgcgggttacggtaataaatacttcgactgtggtgtcaacgctcaaatcattttcatgcaggaattggcgatttccgccatttttttattttctgaacgttttacgcgggtgaaaatatcattgccgaacataataaatagtatcctgaaggtgcatgttgttatcgatttgcaacgaatgttgttcaatgttgcaaactgataac

SEQ ID NO: 546957 - DNA, 424 bp, Homo sapiens
ttttttttttttgagatggagtctcgctctgtcacccaggctggagtgcagtggcgccatctcggctcactggcagctctgcttccaggttcaagcgattctcctgccttagcctcccgagtagctgggattacaggtgcatgccaccatgcccggttaatttttgtatttttagtagagacgaggtttcaccatgttggccaggctggtctcgaactcctgacctcaggtgatccgcctgcctcggactcccagagtgctgggattacaggcgcgacgaccgcgaccagccagcccttttcttctcaaagcagagtcggggaggggacctaagccaggccccgacccactccatgcttaattggcagctgaatggcacggcccagtgaaagccccccgcatctgccctgcgggagggagactt

SEQ ID NO: 546958 - DNA, 317 bp, Homo sapiens
  misc_feature (26)..(26): n is a, c, g, or t
  misc_feature (87)..(87): n is a, c, g, or t
  misc_feature (280)..(280): n is a, c, g, or t
ctgttgcccaggctagaatgcaatgncgtgatcttggctctcactgcaacctccacctcccaggttcaagtgattctcctgcctcantctccctagtagctgggattacaggtgttcaccaccacgccaggctaatttttgtatttttagtagagaaggggtttcaccatgttggccaacctcgaactcccaacctcaggtgatccacctgcctcagcctcccaaagtgctgggattacaggcatgagccactgtgcctgggccaataaactatattttntcaagccaaagtaggacaagcacagtttttaaaaggg

SEQ ID NO: 546959 - DNA, 903 bp, Homo sapiens
  misc_feature (514)..(514): n is a, c, g, or t
  misc_feature (811)..(811): n is a, c, g, or t
agcggtctttactaaaaatacaaaaattagctgggagtggtggcgtgcgcctgtagtcccaactacttgggaggctgaggcaggagaatcgcttgaacccaggaggcggaggttgcagtgaggcgagatcacgccactacactccagcctggcgacagagcaagactctctcaaaaaaaaaaaaaaaaaattttttttttaaattgggctgggcttgggggcttgtgcctgtagtctcagcaaacttggggaggcttaaagtacgtaggatccgcttgagcctggggaggttcgaggctgcagtgacgctgtgattggtcgccactggtgcttcagcttgagtgacagagtgagacccttccgtgacttcaaaacaaaaaacatgtggttctctccttcttctctccgtggtcttctttactctcttattcccatttgtgagtgttaggtgaacttttataaacgtgctttggataagtttaacttcttaacacacaaagaagacctttgtaanatgagggcacaaccaccttaaaggtggagcatgtgccccaatttaacaacccagtgctacctactagggactaacgaaaattctgacttttctcaacaaacagattactctacattaaaggaattcctttcattattaacacaaggttcttctcgtgtgtagctaccatcttcaaaggcttctaaacttcacctcagtgttttaacctgacaagttcccttgtgagcccccttttaagcgcagggcagcgcaatgtcgtggccatctacgctgtgtggcccagtaacgctgattctncacattgggaatccagttttcccagtccttttaaaataaattctgggccaatagcgaatacaccgatcacgagaacactcaatcgtcaccta

SEQ ID NO: 546960 - DNA, 189 bp, Homo sapiens
ctagaggtatccccaccgctcgaaaaggggccttgtatgcgcatcgcagctggctacctgtcagaccgggccatggcaaaggcggtactgtccatcttcgggaaccctcgccattgcctgttgttgttcatgatggctggcatgacagtggtccatgtaccgcttccgggtaacagtgaccagtgactc

SEQ ID NO: 546961 - DNA, 186 bp, Homo sapiens
cactcatcgagcaagagatggccatgcaaaatatcccgggctatgccatcgcggtcatccgggatggtcgtgtcgtctactcgcgcggctatggctacgccgatctcgccactcgccgacctgtcaatagccggacggtctttggcctcgcctctctcaccaagacatttacagccctcgtactgc

SEQ ID NO: 546962 - DNA, 509 bp, Homo sapiens
cctatatctctacaaaccacaaagacataaggaacactatacctataatatcggcgcatgagctggagtcctaggcacagttctaagcctcctatattcgagccgagctgggccagccaggcaatctatctaggtaacgaccacatactaacaacgtaatacgacacagcccatgcaatatagtaataatctatctatcataagtaatacccatacataatcggaggctataaggaaactagactaagtttccctaaataatacggagcccctcgatataggcgtattactcccgcataacacaacataaagctatctagactactaactctactcctctactacctaactacctagctacgcatactagcaatagtagaaggccggggcaggaacaggtagaacagtctaccctaccctaaagacagggaactaactcccaccctagaagcctccgtagacctaaccatactaataccttaacaactagcaggtagtctcctctatct

SEQ ID NO: 546963 - DNA, 111 bp, Homo sapiens
aaatccaaaccccatggggaaattttttttttggtatgggttttttttttttatgggccccccggggggggttcttgggaaaggcccctttttttttaaaattttttggga

SEQ ID NO: 546964 - DNA, 93 bp, Homo sapiens
ctcagtgactctggcttctatctctgtgcctggagtgtagaccgctataattcacccctccactttgggaatgagaccaggctcactgtgaca

SEQ ID NO: 546965 - DNA, 282 bp, Homo sapiens
tactaaattcgcgaccgcgtcgacctccagcccagaaagcacctgctgtttcaccttgcactgttatgttacagagacggcttctttccataaacctcatgaaccaacctcttctcacttccaacttttattgtgcagcttccttacctctcagctttcatagaatcgaagagagttagggcctggctctggattcaattttggccaaggcaatgttacagctgtttgatcttctatccagaccactaaaactttctccgtcgacgcggccgcgaatttagt

SEQ ID NO: 546966 - DNA, 322 bp, Homo sapiens
  misc_feature (2)..(2): n is a, c, g, or t
  misc_feature (71)..(71): n is a, c, g, or t
  misc_feature (74)..(74): n is a, c, g, or t
  misc_feature (120)..(120): n is a, c, g, or t
  misc_feature (191)..(191): n is a, c, g, or t
  misc_feature (257)..(257): n is a, c, g, or t
  misc_feature (301)..(301): n is a, c, g, or t
anttcggcacagagcgctgaccatgccattagctaaccgcacccggttcagctcgcctttcttggccagangcncggttggactcacgggcggggcatgatggtggtgggtacgggcacntcgctggcgctctcctccctcctgtccctgctgctctttgctgggatgcagatgtacagccgtcagctggncctccaccgagtggcttcaccatccagggcggcctgcttggttcgggtctcttcgtgttctcgctnactgcctttcaataatctggagaatctttgtctttgggcaaagngatttccaagcaaagatcttc

SEQ ID NO: 546967 - DNA, 807 bp, Homo sapiens
  misc_feature (36)..(36): n is a, c, g, or t
  misc_feature (192)..(192): n is a, c, g, or t
  misc_feature (195)..(195): n is a, c, g, or t
  misc_feature (216)..(216): n is a, c, g, or t
  misc_feature (249)..(249): n is a, c, g, or t
  misc_feature (264)..(264): n is a, c, g, or t
  misc_feature (334)..(334): n is a, c, g, or t
  misc_feature (353)..(353): n is a, c, g, or t
  misc_feature (744)..(744): n is a, c, g, or t
  misc_feature (768)..(768): n is a, c, g, or t
  misc_feature (780)..(780): n is a, c, g, or t
  misc_feature (790)..(790): n is a, c, g, or t
acaagtacatgactatttcaggatttcaaattgagnaaaccattgaccgcgagacttctggcaatttagagcaactactccttgctgttgtgaaatctattcgaagtatacctgcctaccttgcagagaccctctattatgctatgaagggggctggaacagatgatcataccctcatcagagtcatggttnccnggagtgagattgatctgtttnacatcaggaaggagtttaggaagaattttgccncctctctttattccntgattaagggagatacatctggggactataagaaagctcttctgctgctctgtggagaagatgactaacngtgtcaccggggaagagcnccctgctgtgtgcctgcaccaccccactgccttccttcagcacctttagctgccatttgtatgccagtgcttaacacattgccttattcatactagcatgctcatgacccacacatacacgtcatagaagaaaatagtggtgcttctttctgatctctagtggagatctctttgactgctgtagtactaaagtgtacttaatgttactaagtttaatgcctggccattttccatttatatatattttttaagaggctagagtgcttttagccttttttaaaaactccatttatattacatttgtaaccatgatactttaatcagaagcttagccttgaaattgtgaactcttggaaatgttattagtgaagttcgcaactaaactaaaccngtaaaattatgatgattgtattcnaaagattaatgnaaaataaacntttctgtccccctgaaa

SEQ ID NO: 546968 - DNA, 682 bp, Homo sapiens
ctggaccgcgggccccggcctgggggcactgctgcaccgcgcgcacctcgtctcctccccgtccatgccagcggaggttccccggttctcgggccgtgtcgcacaaacaccacgcagtacactcagacgcgacaagatactacagtagacagacagatgacacatgaatcacagcatcactagaacaaaacacactaaacttcgaccataggcatatatgccatcaacatcaatcagagactaaagactatcacccatcatgaaaagtagagacaataaacgcgacacgaacacactccgtgtcccacaacccgcacgactgcccagctgcatactctaaacgaccacacaatgtaacgatcaggacacagggtagcacgcacggacaagagaccacaagttctaggcaagtacgatgacattacaaccaaacccatgacgtgcaccagcacactagtcaaccaggaaccacgacaaataccaatataggaaccacaaactacaaaaaacaacgcaagaagtatgaaccacacgtaccatctccaccacaattagcactaataaaagataaacatgaaccaactagagcagagagaaaacacaagaagaacacaacacacatacacaatacaaataagcaagaaccgcaggaacgcagaacagaaaaaaagaaacaacagac

SEQ ID NO: 546969 - DNA, 808 bp, Homo sapiens
  misc_feature (35)..(35): n is a, c, g, or t
  misc_feature (51)..(52): n is a, c, g, or t
  misc_feature (59)..(59): n is a, c, g, or t
  misc_feature (71)..(71): n is a, c, g, or t
  misc_feature (83)..(84): n is a, c, g, or t
  misc_feature (91)..(91): n is a, c, g, or t
  misc_feature (137)..(137): n is a, c, g, or t
  misc_feature (145)..(145): n is a, c, g, or t
  misc_feature (157)..(157): n is a, c, g, or t
  misc_feature (159)..(161): n is a, c, g, or t
  misc_feature (436)..(437): n is a, c, g, or t
  misc_feature (492)..(492): n is a, c, g, or t
  misc_feature (579)..(579): n is a, c, g, or t
  misc_feature (581)..(581): n is a, c, g, or t
  misc_feature (583)..(583): n is a, c, g, or t
  misc_feature (592)..(592): n is a, c, g, or t
  misc_feature (595)..(595): n is a, c, g, or t
  misc_feature (609)..(609): n is a, c, g, or t
  misc_feature (611)..(611): n is a, c, g, or t
  misc_feature (613)..(613): n is a, c, g, or t
  misc_feature (616)..(616): n is a, c, g, or t
  misc_feature (628)..(628): n is a, c, g, or t
  misc_feature (631)..(631): n is a, c, g, or t
  misc_feature (664)..(664): n is a, c, g, or t
  misc_feature (668)..(668): n is a, c, g, or t
  misc_feature (672)..(672): n is a, c, g, or t
  misc_feature (684)..(684): n is a, c, g, or t
  misc_feature (686)..(686): n is a, c, g, or t
  misc_feature (694)..(694): n is a, c, g, or t
  misc_feature (697)..(697): n is a, c, g, or t
  misc_feature (701)..(701): n is a, c, g, or t
  misc_feature (725)..(726): n is a, c, g, or t
  misc_feature (763)..(763): n is a, c, g, or t
gcgatggctgctgtggccgtggctgttcgcgaggnctcgggatccgggatnnaggcggncttccccctggncctggggtattnnggttggnaatgaccaaataagaaaatctgcagcttcggaaggaaaagaaacanctagtaanaagaaacggaangnnnaaaagggggcagataccatgatgactggtctctgctgttatctgcagcccaatgtcaaggcccaaccagagaactgccagaatcgggcattcagttgggcactcctcgggagaaagttccagctggtcggagtaaggccgaacttcgggctgagcgtcgagccaagcagagaggccagagcgggccctgaaacaggcaagaaaaggggaacaaggaggaccacctcctaaggccagccccagcacagctggagaaaccccctcaggagtgaagcnnctccctgagtaccctcaggttgatgacctacttctgagaaggcttgttaaaaaancagagcgtcaacaggttcctacacgaaaggattatggatccaaagtcagtctcttctctcacctaccccagtacagcagacaaaacncncngacccagtntangagcatcccatccncngnganccacccagccanggngcgactcggcctgcagtactcccagggcctggncagnggcnccaatgcccggngnattgcccngcntcgngccttgcagcaggtgattcaggannacacaacaccgcctaatgaagaactctccagggatcnagtgaataaactaaaaccctacatgagcttcctgactcagtgccg

SEQ ID NO: 546970 - DNA, 858 bp, Homo sapiens
  misc_feature (36)..(36): n is a, c, g, or t
  misc_feature (192)..(192): n is a, c, g, or t
  misc_feature (195)..(195): n is a, c, g, or t
  misc_feature (216)..(216): n is a, c, g, or t
  misc_feature (249)..(249): n is a, c, g, or t
  misc_feature (264)..(264): n is a, c, g, or t
  misc_feature (334)..(334): n is a, c, g, or t
  misc_feature (353)..(353): n is a, c, g, or t
  misc_feature (795)..(795): n is a, c, g, or t
  misc_feature (819)..(819): n is a, c, g, or t
  misc_feature (831)..(831): n is a, c, g, or t
  misc_feature (841)..(841): n is a, c, g, or t
acaagtacatgactatttcaggatttcaaattgagnaaaccattgaccgcgagacttctggcaatttagagcaactactccttgctgttgtgaaatctattcgaagtatacctgcctaccttgcagagaccctctattatgctatgaagggggctggaacagatgatcataccctcatcagagtcatggttnccnggagtgagattgatctgtttnacatcaggaaggagtttaggaagaattttgccncctctctttattccntgattaagggagatacatctggggactataagaaagctcttctgctgctctgtggagaagatgactaacngtgtcaccggggaagagcnccctgctgtgtgcctgcaccaccccactgccttccttcagcacctttagctgccatttgtatgccagtgcttaacacattgccttattcatactagcatgctcatgacccacacatacacgtcatagaagaaaatagtggtgcttctttctgatctctagtggagatctctttgactgctgtagtactaaagtgtacttaatgttactaagtttaatgcctggccattttccatttatatatattttttaagaggctagagtgcttttagccttttttaaaaactccatttatattacatttgtaaccatgatactttaatttcaaggctaagcttctgattaaagtatcatggttacaaatgtaatataatcagaagcttagccttgaaattgtgaactcttggaaatgttattagtgaagttcgcaactaaactaaaccngtaaaattatgatgattgtattcnaaagattaatgnaaaataaacntttctgtccccctgaaa

SEQ ID NO: 546971 - DNA, 161 bp, Homo sapiens
gtatgatacacacagtagcttagaatagatgcggtcatattcttcttggcttcggttcttcagccctcatggctggcatcacatatgcctgcatgcattaacaccagctggcctacccctataatgatcctgtgtcctaaattaatatacaccggtggtat

SEQ ID NO: 546972 - DNA, 125 bp, Homo sapiens
ggttagcatcaccactaataagacatactgataccatgttaccttccaattatgatgcacatgagaaggggcacaaattgtcacattcgtgtgagatgttgtctagaaactgtgcaaatctcagt

SEQ ID NO: 546973 - DNA, 351 bp, Homo sapiens
tgatgctgtacgagagatcctgaaatacgatgatgtgacagaaaaggtgaacctccagaacaatccaggtgccatggagcacttccacatgaagcttttccgtgctcagaggaatctctatattgctggcttttccttgctgctgtccttcctgcttagacgcctggtgactctcatctcccagcaggccacactgctggcctccaatgaagcctttaaaaagcaggcagaaagtgccagtgaggcggccaagaaatacatgggaggagaatgatcagctaaagaagggagctgccgaggatggagacaagttggatattgggaatactgaaatgaagtttagaggagaac

SEQ ID NO: 546974 - DNA, 266 bp, Homo sapiens
aattccacaagtggaaacctaaaaaaaacaacggcgtctctactgcagactaataacaataaaggagatgacatcaacacagatcttgctgctaaacggcgccaaagccctacatggtgggggggccgattgccggaaaactgaaaaacttaaaccccatgaggttctgtccaagaggggctacgaaccaccacgagccacctttcaggcctatcaaaccacccaagacccaaacaacaaagcggccaatgaagggaggactatac

SEQ ID NO: 546975 - DNA, 130 bp, Homo sapiens
tggtcgttctagaggatcccaacgtcgggccatcctggacaacagcacttgctgagtgaagtcaagcccatcctagagaagctgacccaggagcaggatgtggacgtcaaatacttaccgcaggaggctc

SEQ ID NO: 546976 - DNA, 416 bp, Homo sapiens
tagaccttaatcaaagcatatacccaggatgaagttaggcgatagaaattgaaatctggcgcaagtatgatatagtaccgcaagggaaagatgaaaaattataaccatagcataatatatgcaatggactaacccctataccttctgcataatgaattaattataaataactttgcaaggagagccaaagctaagacccccgatatccagacgagctaccttagaacagctataagagcacacccgatctatgttgcataatagtgggaagatttataggtagaggcgacgaacctaccgagccttggttcatagctggttcgtctctcgatagattcttagttcaactttaaatttgcccacagaaccctctaaatccccttgtaaatttaactgttagtccaaagaggaacagc

SEQ ID NO: 546977 - DNA, 228 bp, Homo sapiens
gctgactctagatgatcccaagcgttagcgaggcataatgggtgcttctaaagggcttgaaaatcacgaagtacttgggtatttaaacaccccctcctttgtttacactttaatttgtctttgtgtggatgcctttcatcatagatagtacaaaggcagactgagacgcagactgtccgcacacagtcgcacaacctctaaattagtgagcttgggagttccctcgtt

SEQ ID NO: 546978 - DNA, 105 bp, Homo sapiens
ccccgccctgccccgtcccttcggcccccccctaatttatttccgtgggtcctgctgctgtgactgcttttgtacctttacaataaaaaattttttggtttcaga

SEQ ID NO: 546979 - DNA, 154 bp, Homo sapiens
atggaacgcctcttcgaagtccgctcccataccaaccccgccaagaggctcgataagctcttctccgacctctgcaagctaggtctgaggcactgggatcccctcctcagaaaaacaaaaaacccgaaggctcgcgcctccgggtctttcttga

SEQ ID NO: 546980 - DNA, 105 bp, Homo sapiens
ggcagagaggagatacaagaaaccagcatcgaggtccagtttggaattgtaatgattttggtgttgtatcatttgtcctctcattgggtctgtctgtatctctct

SEQ ID NO: 546981 - DNA, 325 bp, Homo sapiens
  misc_feature (2)..(2): n is a, c, g, or t
  misc_feature (32)..(32): n is a, c, g, or t
  misc_feature (46)..(46): n is a, c, g, or t
  misc_feature (67)..(67): n is a, c, g, or t
  misc_feature (159)..(159): n is a, c, g, or t
  misc_feature (224)..(224): n is a, c, g, or t
  misc_feature (230)..(230): n is a, c, g, or t
angaacttgggaaacacttcctacaggaaggnaacaccaaagctgncattttattatttttagggtnttgctttgttgcccagggctgggaatgcagtgggcacaattcaaggttcactgcaggactgggtgcagtgggctcacacctgtaatcccagnctcacgcctgtaaactttgggagggctgaggtgggcaaatcacacctgaggtcagcagtttgagnaccagncctgggccaacatggtgaaatcctgtctctaataaaagtacaaaaattggccaaagtgctgggaatacaggtgtgagccactgtgcccacccata

SEQ ID NO: 546982 - DNA, 133 bp, Homo sapiens
gatggatgtctgtagagtgttctgctatttctttacccctattccatcatttttttctaaagagaagcaatgtctatagataccccacatctctaagtctctcgtcttctggtcctacctttcccaaaataat

SEQ ID NO: 546983 - DNA, 133 bp, Homo sapiens
ggtggtcatcagagacacagattccttgttataaccaacgtgtcctcagcttgtacctgaagttatatcattttttattctaaactgctctgcagcttctattctgaacactattaaaacatataccactgtt

SEQ ID NO: 546984 - DNA, 247 bp, Homo sapiens
tccccttcaaatgggcacagaatattgcagaataggaaattgaggcccagaagttatagtactggctgaaggacagcctcctagaatgtgggagaacagagactccaccctggcacctaggctccagagttctaaagaaattttcaaagagattcaacaccattaaaagcactcctatgatccctcagctcagccaaaccgatgctgtctaagcgcgtcctgtatttctgtgcccatttcaaggtgt

SEQ ID NO: 546985 - DNA, 293 bp, Homo sapiens
tagtgcggctatgtattagcacaggtctgagagaatatactttatatgtacttgttgctgtttattcatttgtacacaggaagtgtatgttaaatttagtttgtataaaattgctttggactgcagatttcctccatcaagatgatcaaacaatgtctaagaaactatgtgatatggtttggctgtgtccctacccaaatctcatcttgaattgtggctcccataattcccgtatgttgtgggagggagccagtgggagataactgaatcatggggatggttccaccctgccg

SEQ ID NO: 546986 - DNA, 927 bp, Homo sapiens
gccaagctccaggagcttccgaagaaacaggaccagagagggaaggtgacctgaaagtcacagacataattcttgtagagctgaacaagaatccaagcctgcaatctgcaggagacgagagatctttctgctgtctatatctcttggaaaggcacatcctaagatctttgtcagattatcctgtggaatggaaaatgcctaaagtcaataagaagtccggaatagctacaccccagagtggctgggacgttgattgagccaacatactggatgaattagactcaaaagatgagagaagctgaatacagaaccgcatgagggaaacgaggaacacgtggaactctctgttggtaccagtctctcaggatgccaaccagccaggaaaacgcggctacagtcttcgacctcttgtacaagcggaaagcacgactcaggcaagatgaactctatgatagtattcgtactctaaaggaacggctactgcatgactaaataaacctgcattagcaggagtgcgtcactacgcaaggatatggagaacttgtgctgcctgcggtgcattcaagactacgggacacctaacttcagaggacagaacctgcaatcgtgcccgtcgttgcccatagaaatgcagagcctgagaagcgtggggccgtaatcactcgagttgcacaactacttgtggctcgtcagtggctgcgttctggctgaaggctcatgggaaggcgacaacccagccacgtgcggaacatccttgggaacatttcgataagggtattccactgcccgtgttcagcagggcaagaaccccattcgctgggagaaaccaaggaaggatgaaagtgtggcaccaaggccccggacagtcgggtaggccacgggaactcctttatggggtgaaataggcttgcggcttgccgtaatcag

SEQ ID NO: 546987 - DNA, 1484 bp, Homo sapiens
  misc_feature (857)..(857): n is a, c, g, or t
ccgtgttggttgtcagacacaccactacttgtgtttcaccctcccgcccgcaccaagcaagtttttgtgttgtttgcgggtgctgttctaatcccccaccaccgtcccctcttccattgcgctggggtgtttttttgttttgtccgccgccgtagttgttttcttcttccggtgcgccgctccctctcttcctgtccttcttttttttgtggtgcggtcttctcactccgccgcccctccgcatacgagttggcgtctgtcttttttttaattatggctgccgccggcggcgactttatttttgtgttatgacgttcattctataatatttttgcgtctctcccggtattaaaaacaaaccaccccccccccccttttttttttttttgtggtacgtacccacaacaataacaacccccgctactaacacaacttttttctgctgcaccaccacgcgaagtgaaccatccaccactacagcagtgatgtatgtaagatgaatttttttcgcccaacaacacgggccgctgttattaataaatagtcttcgtgtgttcatgttcttctattttctgctctcttgtgtgtttttctctttgcgcctttgttcttgtgtgttgtcttctcgtgcttctgcttctcttgtggggggcggcgtctagtgagagcttcctcctcgcaggagcattttttattatacaacaacacctctgcggagcacccccgcggtgcggaagagaagtggtgtgtacaccaccacgcaacagctgtgctggctgtgtgaggagagactgagacgactacttctcctctcccccacacagtggtgttgtcaccacacacacagtggtggggcncgcagagagagactctttgtgatgtgtgcgacacaccactactgtgtgtgtgtgttgtttttattatatagagtgtcactctctcccccacataagtgatgagagagacactcactcctcgtgtatcacacacgagagagatcctctctctcttgccatctctctctcatatataacctcaccccgcgacactttgctctctctctacagagagagagagataggggcgcctacactgtctctcctcttctccaccacacagtggcgacacacacacacgcgcgagagaggttgtgagtataagacaactctgtgtgtgtttcgtgtgtgtgagagatatatatatgtgtaatgaggcacacacatatatttgttatatatatattgtctccctcttgaatagaactctttttattttttggtgttttttttgacgaagagtgagcgcctcttgtggccccccctcttccccctctttttgtgccccccacactctgagagagaggtgattgagaaggctcttttgtgttctccccgggagtgtggggtgggagggccccccggggttatccctgtatcactgtaatttgggcccccgtgtgtaaatataaagggcccccccttata

SEQ ID NO: 546988 - DNA, 108 bp, Homo sapiens
gtcagtctacaggcccatctccccctcatccgctcttcctcctgccagctggggctcctcaactgcccgggtgtggggcaggctcccagttccttctctcgtctcagg

SEQ ID NO: 546989 - DNA, 433 bp, Homo sapiens
  misc_feature (41)..(41): n is a, c, g, or t
  misc_feature (73)..(73): n is a, c, g, or t
  misc_feature (88)..(88): n is a, c, g, or t
  misc_feature (111)..(111): n is a, c, g, or t
  misc_feature (132)..(132): n is a, c, g, or t
  misc_feature (135)..(135): n is a, c, g, or t
  misc_feature (149)..(149): n is a, c, g, or t
  misc_feature (161)..(161): n is a, c, g, or t
  misc_feature (173)..(173): n is a, c, g, or t
  misc_feature (215)..(215): n is a, c, g, or t
  misc_feature (262)..(262): n is a, c, g, or t
  misc_feature (283)..(283): n is a, c, g, or t
cagttgttccctaaatgccttagagcctgctaaaaccacanttctttatgtgtatttgtgaatgttggcttgntgtgggcacacattnggttgaatgcatccttgaagttntgaggcacctaccacatttgntgntgcatattcatggntgcttttagaantcagaggagaantagattttaggggaggggttccccttcctcaggcactgtcgngggggtgtagaaaggaataatgtgtcctttacactgtcagtttcctntgagtgaatgtagtagacctnttagtcatcatttacttcattattaccagttatgcactaataattagtggtctgctaatatctcgtctaccaatcatcttcagcaataaacatgctttaattatcagctgataattaatgtagccataacaaataaacccccaaatgtca

SEQ ID NO: 546990 - DNA, 470 bp, Homo sapiens
tgaatcctattgaggtactaaagtgtactagacgttgtttgtggtgatggtcgcacaactcatgaatcagtcgggtgccagtcaaggtatgtgaacttattagataggtacaaaagtactagtggtttacaagtggcaaaaccccaattatttacgcaccaacccaatagttcactatagctgtaaaaaaaataataaagtatgggaggctgaggtagggagatcacttgagggcaggagtatgagaccagcacggccaaaatggtgaaatcccatctctactaaaaaatgtaaaacacataggctggtgcactggtggtaggcgccatatcattcacagctactcgggacgctgagacaggagaatcactagaactagggaggcggaggttgaagtgagtaagaggtagtgtcaacttaactgtagtctgggcgacagagggagactccctctcaaaacccgaacacta

SEQ ID NO: 546991 - DNA, 551 bp, Homo sapiens
tgctttgctgaataccgatctggccctggtgtgaggatctgggtctgtcaatatctgaagaggtaggaatccggtacaggtatgggatctgcatctgtcaatgtctgaggaggtaggacctggccctggtatgaggatctgggtctgtcaatgtctgaggagttaggaatcgtacaagtatgaggatctgggtctttccatatctgaggaggtaggatctgggtctgtccatgtctgaggaggtaggatctggcatgaatatgacgatctgggtctgtcaatatctgaagaggtaggaatctggtacaggtatgaagatctgcatctgtcaatgtctgaggaggtaggacctggccctggtatgaggatctgggtctgtcaatgtctgaggaggttggaattgtacaagtatgaggatctgggtctctccatgcctgaggaggtaaggtctgggtctgtccatgtctgaggaggtaggatcgagtctccccatgtctgagagtagatctgggtctgtcctgtttgtggagtagcactggtaccgagctcga

SEQ ID NO: 546992 - DNA, 144 bp, Homo sapiens
aagaatattcgaatccaataaatacccccctgttctcacccaaatgctgtttcttagctaacttgctctgacaacctactgatgtaacttctttattaatgtgaaatatttatcttttgaaataaaattcctcgtgctgaatga

SEQ ID NO: 546993 - DNA, 127 bp, Homo sapiens
ctggagcagttcatgagtccaggccatgcgctccttctgtcttgtagctctgagccccagctctaccgggtcttggccgctctgtgctgtatcctttgtcatcttgccagcaatcaggcaaagcagt

SEQ ID NO: 546994 - DNA, 141 bp, Homo sapiens
cataccaaggtaacctaggtagagagagcccctgtacacaggagtacccttctagcgtagtcacacgtaaaccccgcgggacagcagtgtatgtaggtcctcacagacacacagcctgagtaaaaagggcagtagccccag

SEQ ID NO: 546995 - DNA, 247 bp, Homo sapiens
gattgctactccatgtgatgtggctggacgcacaggccggggtttcgagcactgagtgctacttgctatagcctgctccccatcagggccctaacttctccctggccggtaccaagtatgggtcaggatagactgaggcctcttgatgtttgtgcaggcagagcgcgatcgcatcatctcttcccaaccttcagccatcttcgtgccagcctgctgcacatatgagttcgggtatccgagctcgata

SEQ ID NO: 546996 - DNA, 111 bp, Homo sapiens
agccaaagtggttaaataggattaaatctgcctgcagggagacgtaaagctgccaacgttaccctgctcacatcactagtagagggagaagctgtcctcactacatgccat

SEQ ID NO: 546997 - DNA, 1461 bp, Homo sapiens
ctccggcgtggtgtttgttgtactcaatggtggtccacccgttgtttcacatacggtggtggctctggtggtgcgcgtgggggtacccgtggtgtgacccgctttccccggggggtgtaagtgtattgttgccgccgtacagggagatgttttgggtggggttcaccgagcggcggcctcgcaggggttttttttttgcctagtagaaggtggggacggtagttatttggtgtgtcaccctagttgtgtggctgggtacttccctcgcgaggtgtggggcggcactacccccgggggttggttccccggtgtgttgttcgtcaaccaacaacgatacccagcagatgggggggtgtggtgggtggtccccgtgtggccgcctctgtggttggggggccgcccccctcttgggggtgcccctttctggtgtcgccagcagacgctcctcgtcgtgtgatgcactctgcccccccgtgtggggcgcccccacggacgcgcacgcgtctctctgctggttgtgtgcgccccacgccgcacgcgcctctgtgtgtgggagaactctccccctctctgtggcgtgtctgttgtaacactggtgcgccacactctgtgtgtgagagttgtgtgggacgacacacagaccgcagagcgagagaagagagtgtctctaccgcgctctctctctctcttgatgaacacactactgggcgtgtgtgtgtgtgtgtgcacaccgctctcgtgtgtctgtgtgtgtgtgggcggcacaccgcccacgacgactcctctgtgcgtgtcgccgcacactctcactgtgtgcgcgcccacccaccacactctcacacagagagagagagaagagagagagagagagagagtgtgtggggactgctggagaggcgcccccctctgcgagacgccacacacgtgtgtgcgcacacagagagaggtgtgacacacactctcgtgtctctctctgtctctctctgctgtgtggtgagtctctctctgtgtcccactcgtgtctctcttgtgtgatgagaacataaatgagagagagagtcctccacacagagagagactctctctacacacaccctctggcgtgtgtgtgggtcgtcacacacaaacacacacccacccacacagagagttagtagagaggcgcctctcatgagagcgcgcactctggggtcgtgtgtgttgtgtgccctctcgagaacacccacactgttgggcacgtgcgcccctatattgggtgtgtgttgtagagagtgtgttgtgtgagcccctctccccaggtgtgccacccggtctccccccaccccccctcccacgggtgtcggccacccccaccgcaccccccccccccccgtccccagttttccccccctttctccccccccccccccccttttttataaacaccccccccttaatctcccatttcaaccccccccttta

SEQ ID NO: 546998 - DNA, 1153 bp, Homo sapiens
gctcacgcacgcacacacgcgcacactcacacggtgcgcgcgcagcccctccgtgcctgcgggcgcagcggtgggctgctgtgtggagctgctgaagtggccatgtgtcctggcgtggctggggcggctgtgctgtgcactgtgctccgtgactctgcccgtgccagggctggctgtgctccagccgtggatgggcgacgtggatgctggccacgtgtgagccgtgcccgtgggtcgaggctgtgctgtgcggtgacggctgaaggctgctgtggctgtgtctgcatgcagtccatgcgatgctgcccacgggaagcttggaacccccatggcgtcctgccgctgtgcgccctggcatgcatggccttttaagcttcctttgacagcccaagcgcgaggattcaccggaagctccacgttgtgggaggcaaacctgaagcaaaacttcgcatggatctggcagcttagcccttttaacacgaatgctttgttaaaccagcttctaactttagcgggaaacggggttccccggcaacgactttgctatttcccctttagaatgtgccaatggctggatggagccgagcgagaaaagccccgctaccgagggaacagtgggcacaataggacaaaccttttctggagaagctggcctatttccctggagaacgagtgtcaagcgaaaaggagcagaagcagaaagaacctttcctcaagggaagcaacctggccctggccccgttttttacggtggagaacccgtgtgttaaaatcccaaacatttccaaagcccctggcgcggaagggggggttcccctggctagatgcgctttttccaacatttcctttttgcaagacggctccaaacgtttctgaacagaagaccccctagagaagggaagaaagccgcgcaagccgccgaaaagtttttcccccggtaggaacacaagccaaaccgttaggggcggcactatttaaacccgacgggatattccccccacggctcggcacacacggcgggaaggttggtttatacaccccccctatttttggcaaacccggaacactgggaacccgaacgtcgtggtttttaaaaactttccggcccttggccctttggcccttgtagtgccttttaccccccccgaaaagg

SEQ ID NO: 546999 - DNA, 518 bp, Homo sapiens
  misc_feature (74)..(75): n is a, c, g, or t
aggatcgctgggtcagtgatcctcatacatttcagaagatgacagatagttatgttctctgaacacagtggatnnagttaaaaatcaatgacaaaaacaaaatatctcaaatgttggaaaattaagcaaacacttctgaaataacttggaccaaaaaacagaacacaatgaaatggagaaaatattttgaactgaatgaatacaaacatatgcgaacttgttaaataagcctaactccaggcacaaaggaaaatttatagctttaaaacatatattagaggccgggcacagtggctcatatctgtaatcccagcactttgggaggccaaggcgggcggatcacctgaggtcaggagtttgagaccagcctgaccaacatcaagaaacgtctctactaaaaatacaaaattggcaggtgtggtggtgcatgcctgtaatcccagctactggggaggctgaggcaggaggatcacttgagcccagaggatcacttgagcccagaggatcacttgagccca

SEQ ID NO: 547000 - DNA, 1765 bp, Homo sapiens
  misc_feature (1235)..(1235): n is a, c, g, or t
  misc_feature (1584)..(1584): n is a, c, g, or t
tgggaacgatatgtatcctgagtaagatatcttacgagattagtcattgatgtccgcgttaggaatcggccaatgtaactgactgccatatcgagatatgtcttacgtatgcatataccgaactagttcgacattggacctagaaatcagacgtggttggacagctatcgctattgaaggttgtgcttgcatgcttagacttcatttatctcccacgtgatacttggaagcaatctagtaccccgacccaccatcccacgcgtacctgtgccttcgactagacgcgaagaatcacatcggtgattatgtcgcactcgtgtctcattcggtacacacgtaaggaaacacagtaactgctctgttgtgtcatgactttgtgtcctacacagtcactcattagctgggcgagggacttgcgccattggaaactccatggaaatgggctatctttaggagttccttcttgtctagggactgcagtcgtgaataatagcgctacaaaaaggcaattgtggatcgaacgagaaggaacacgaatgaggtacacgacgggacactggggtggcacccattgacgcgctggggaaatcagtacccacacgcatttggcgcctctatacgacgtatgcgacccttccgatagactcgaaaaggcgatcgatagctccaccggcagagaggcatgcgtacaacggcccaagtagtcacccatagactgaaaagacgcgcatctgatgagcaaattcgaaacctcgagtggtactcgcgcacaagaatacgcttttgattacatcgacgttgtgtgaccccattcgaattggaccactacgaagttagcataaccgaccatttttttgagtaggcaaatctgtctcttgtccgccgaataggcaacagccctagcaacggacacttcccggtcagtgcgataccacgaaaatctaagaagcggaaaggcacacttgactatcctccatgaaactttagcacgtggaaagcctgcccctccgtctgtcaacatgcgtagacgacacttttttcgatcgagcgctaaatttcgcctcaccgctctcacgtgtgaccagagcgttactttagaggatcacattggcgagaaggtaggagcccagttagtgggtcccagagaaatgtcgtgcaacagaagttttgccaccacaaaatttgagtcccctcttaatggcttcgtatcgtgaatgtacatgttggcttaccgnaccaagggccgccatgtttcgcatttggagaccccttcggtcgaatgtgggctgccaattgacataacgctagtgcgagctcccgaaaagaacttgggttaggaagacttacgcaacccaacacactaaggaacgctggaccctgcgcaccatcgcgggcagttccagacaaccacatcgggaaatctcaccgtctcgcctcgtatcagactatcgggcgcaaacacacaactattccaaaccagagtgcgggctgtcagagcgcatccccacaatcgctctaccatcgtgctgggcacgaccaacgaagtgttgcttacacccgcatatatagcgcgtaccagcgcanctctctgaaccttcatacaaccgcaacaacgtgaacgtcacgggaacttgcgcgtgcttgattagcagcgtacacgacaagctctagtctataccacaaactaagctggtgcgacaacagtgagcatgtatcgttgtgaagcagcgcaggaaccagcaccacatctcttggttatatgaca

SEQ ID NO: 547001 - DNA, 253 bp, Homo sapiens
tactgtggtgttccgtggttctagaactggtcatgaacagaactggtagtggttcaaagagtttagagagacgatggattgattaaatgcatggggctttgttgtggctgttggaagaaccgttacagctgttagtgaaagctgatgaggtgagatataggccaagtcagaattcacttcactgtgagtacaattgaaggaaaagatgagtttgactgttgttggggtaatgagaggaggttgcatccattgt

SEQ ID NO: 547002 - DNA, 1236 bp, Homo sapiens
  misc_feature (83)..(83): n is a, c, g, or t
  misc_feature (87)..(87): n is a, c, g, or t
  misc_feature (92)..(92): n is a, c, g, or t
  misc_feature (97)..(97): n is a, c, g, or t
  misc_feature (118)..(118): n is a, c, g, or t
  misc_feature (120)..(121): n is a, c, g, or t
  misc_feature (126)..(126): n is a, c, g, or t
gtaagcaggccgtttcagcatcaggcaagtggctggatggtattcgaaaatggtattacaatgctgcaggattcaataaactngggnttaantgcgngatgatacaatatacgaggantnnagtgntaaaagagccataacgaagacttcctgagcaacctttactaatgacaggatgttctcgcattaagcagggcactggcacctgcaacttgcaagcactcagactcttgccctaacacgagccacgtgcgaccaaaatactgaacgagcgaacacatttcctaccccttggcaacccgctactcatgcaacacgcagcgcttacttccggggcaacacgcacacaatgcacaacgcacgacagcaacctggcgccacaccagcaacgctaactccactgctacgcctctggacacgctcttgctgccgatttgccacgcccctgcctctactgcacacgaattgcgcctttaaacacgtgtgccacacacccacacaccgaagctctctctaaccgcacactctacttctctaggacttcctgaacaggcaatggctatatctagccataatattacaccaccttaaaccacctgagtccaataccttctgggttcaaaactgggcgccctagggcgaaggctaatatccactggaagacatttctccagtagattccgtttgtaattaggcgtggaaaattataagcgttaaccttggaaaagtgtccgcgttatattaccgtgggtctcacagcacttggttcgatagatgtctgcccaagacaaccttttgtgccaagagcggtcattattcattctgtaagggctaaagggtagggtttcattaagagcataggtcgatgaaccttaatgggcgaagcgctcttccgagtgaaaatggtcccctgaccctttgtctcaagttcgaaagggcgatgatattgccccattcaaacgcgtatgagacgttatggggcaagtttacggaccccttttaactttctcaagagttctaaactatggcggacaaaaggtggcagagtttactttacaagccccttatcgccgggcgtaagaaagcgcattgatgaccagatatcgcggatattaacttgagagcaaagggccgttatcccttgggacgcagttacagagcagggaacaagagaggcgggagaggctcaactatgaccgactccaacgcgaccaccattactagattaatacaggc

SEQ ID NO: 547003 - DNA, 794 bp, Homo sapiens
gggcgctgtcatggcgggtgtgcttgaagaatgaccactggccttgtgggatatggcgtgtgctgcgaatactcctcacgagagcgctaacgaatattgtacactaaagattcttgatgttcttgagtgaagatccctaagataatgcacgcatatacgacaagtatactgaacagacttacaaactgacaagctggctatggtttaaatgcgtgaagccagcatgttgagggatttagaatactcaatcttcaaggcggtcacattagaagaggtgattcttcaggctgaacatgaacgtatgatcctggctagaaaaatgagggaatggaatattatgggagccaccttagttggaagagccctccatgccgatcagtggaatatggccagatgataattattcaagctcgacattttgggtgtgttcatgggaaactgatgtgatttcatatacttctgttatattaagagtcgtgtacttattactgaccattgtagtaagtcacacgaacaagtgatatagtaaaatactgtatggagactgttaacattggtgattatggtccatatggtcatgtgcaatcaatttcgatttataaacgtagtcacagaaagttgtttcagagtatgatattctctgtgaaccagaagaggccatggggaaggacctggaaacgtcattaaggcaaaaatttcctaaaggattcttccctgcagaaaccatcatcaaaaaagtaaactttctttattagtatgtttccactccgtcattctatttttaaggtatccga

SEQ ID NO: 547004 - DNA, 490 bp, Homo sapiens
  misc_feature (8)..(8): n is a, c, g, or t
  misc_feature (66)..(68): n is a, c, g, or t
  misc_feature (263)..(263): n is a, c, g, or t
  misc_feature (277)..(277): n is a, c, g, or t
  misc_feature (310)..(310): n is a, c, g, or t
  misc_feature (315)..(316): n is a, c, g, or t
  misc_feature (319)..(319): n is a, c, g, or t
  misc_feature (346)..(346): n is a, c, g, or t
  misc_feature (355)..(355): n is a, c, g, or t
  misc_feature (367)..(367): n is a, c, g, or t
  misc_feature (375)..(375): n is a, c, g, or t
  misc_feature (403)..(405): n is a, c, g, or t
  misc_feature (410)..(410): n is a, c, g, or t
  misc_feature (418)..(418): n is a, c, g, or t
  misc_feature (445)..(445): n is a, c, g, or t
  misc_feature (480)..(480): n is a, c, g, or t
gctaaaanatagatgctctctgggtttgatgtcggcggcgtaattcttagcaagtctgagtcttgnnnccgcctcagctctggctgccttccggattccactttggcctctaacgagacaccttaaagaacaggctttaaaagatgctgcttccctgttttcttccaggaacacagagaccaacacggtttcaaacaccgggcgagcctctcactatttcctgggaatgttacttctcagcccaacacttctcttcccaagangttcacgttttgtntctgtttttctccccggaacagtacttacaacncaaanntcnttgattttcaaagatgggttcttttcntgtcctggnagagcatcagtnactaaatntcaagttctccacaatgctgcccccccnnngggcntacccggnggccaagggggagaattaacatctaanaacaaggaaaagactcagggggacatttttttggnacccacgggg

SEQ ID NO: 547005 - DNA, 134 bp, Homo sapiens
caggctgtctcgagctcctgggcttaggcatctgcccctcttggcctcccaaagtgttggcgattacaggtgcgcgccgtcacgcccagtgttgatgattctatttttcagtttttgggggacacatggcgaaa

SEQ ID NO: 547006 - DNA, 999 bp, Homo sapiens
caaacatcatactacgtgcccctggtggcatgtggacccggggctcctgggttacaactgtgccgtgacctgtacagcagtgatccagactgacgcgggagagggaacgtgaagcccgtgaacgagacctccgtgatcgtctcaagtctggctttgacgtgaagcctaatgagctggaacccctagcatggggtccctgggccctgggcttggatccctttccccgcaaatgggggctctggcgtctgcagcctggtccaccgtggcctgtcaccctttcccctttcatccgagcgcgtggtgcgccccgtggtagtcggagaacgtctagcgctggcaggtggtgtcaggcctgcggctggacatgtcctatgctgagcggctggcatgctgtagaggctgcatcgcgagacatgggtggcggcccatgggctacctgatgccactggcccggctgggatgcgtcacatgtgactcccgctgtcagcgatcggcattgccctcatccactcgcacctgctgctgcatcagcaggatgctttccattggggcctcctgcctcggtgcgagccgtctcattgagcccctggactctgggtctcggacttagccgggtccgcctacccagttgggactcttgctaaccccgctgtgtctcaccctctgcacgcgaacggggttcttcgtcccggctctttggtggtccttacgggactgcgggctcctttttggcccgatgtctgcggctcatctcctggcggccatggccgggcagcagtgagctgaggcgtggggccggacagcagacgtggtgcggccctcaacccgtggccaggtgccgtgctgccggggatataagtgccgagagggagggagcctgggaaccgttcaacaacgggcctgtgtgggaccccccccgggggcgccacaagaggtgggcccaaggggggagactgggcgacgagatcctcgagctatagataaaacacagagtcgccc

SEQ ID NO: 547007 - DNA, 179 bp, Homo sapiens
ggccaaaaaaatttaaaaaaatggggaaaggatagtaaggccagtcccattaaaggtttgaacaaaaaaaaattttccattggattttcgcccaagtttgcttttttgggccaaacctttgttggaaaaaacaaaatttggcttggtttttaaaaaaaccaaaatttttttccctcgga

SEQ ID NO: 547008 - DNA, 416 bp, Homo sapiens
caggtctctaccttaaacagcttcaggaaggggcgggagttaaaagggttatgattcaaggaggggccgcagaacacgggtgctgacaaacctcttaggataacaggagacccatataaagttcaacaagccagggaaagggtgtaagagttaattcgtgatcaaggcggtttcagagaagttcggaatgagtatgggtcaagaataggaggaaaggaagggatagatgtccccattccaagatgggcggtgggcatggtaataggaagaaagggcgcgatgatcaaaaaaatacaaaaggaggcgggggtccgcattcagtttaagccagatgaggggacaacacccgaaaggatagcacaaataacaggacctccagaccgatgtcaacaggcggcagaaattatgacagggta

SEQ ID NO: 547009 - DNA, 557 bp, Homo sapiens
agcgggggttgcagtgagccgagtgcgcattgcactccagactgggcaacaagagtgaaactccatctcaagaaaaaaaaaaaagaaagaaatggaactctagagaggtttcaggacttggctcaaagtctcagagtgagcaactggcagagctcaggtttaatctcccagatggtctagctctatctagaagttcttaggccttatgctacctatctttctacattctatgtccacgtatgttaaaaggttggtctccatttaaatcattcacgggagagaaccaggtatagagtatggtagcaggtggtaaaaactggcatattggtaattcggttagtagaccaacagggagaagaatggtccagtcagctgaatatctaattggactaccgggatatggggattattttatcaccaggcattttctaatcaggtaaaacttaacatctacagggttttacctaaggtctgagtttggctttatgaaaatttttagtacaatctgatatgaatttgagaatgtttgagatgaattctcataaatgtcaatttcc

SEQ ID NO: 547010 - DNA, 114 bp, Homo sapiens
gtgatctagaggatccgtgtcatccccttcgtgaagctaagcaccaaacgtagcctcttcccagagccagctctgccctggcttccctcgcgatctcccctggcttccctcgcg

SEQ ID NO: 547011 - DNA, 1268 bp, Homo sapiens
ttcctgccctcaacctgggcatcgcccccacccttccggccccccagaacccgctgccatcccccggagcctcccgcgagctggccgcgcaggatgggcgcactcaggcccacgctgctgccgacattcgctgccgctgctgctgctgctaattgctaggaatgggatgctgggcccgggagggtgctggtccccgaggggcccttgtaccggggtggctggcacagcctgtcctccatctccttgcaattgttgaccggctacttgagggcccttgcccaaggcgatgaacctttcggacgtggcttccatgtagtagtgccccggaggcccccaagatactggcacatgggcagtttggtcaggtaccgaagggaatacccccaggtttcatccgtattgcgtgtcattcagaggtcccggaggttggttgagagggcgtcgacgcgttgcaagggtgcagcacggccttacaaagcgctgacttgcccgttgtgatggctccaaaaggacatttggccccggcccttgccgtgggcccccacgcgcattgccccggtccgattttaacttgagttttgcccaacgatccccgcgttccactttggatttaccgcgggcattaaccccttgtgggacgaagtccttaaccactgcctgggaccaaggggatgaggagcccctcgcaagaagttttacatttcaccaggaactgcctaccattccgccagaggcttgctccgtgagcctgggcagccgctgccacacctatgtgtgtccccccacgcaactgggccccatgcacacaacggggactcacgtcgaaaacactcattctccaacgccccggcataacatggccgtttttgcaccgcgagtccgccccatattgccacgcgccgcggcccaacgtcgtcaccaccacttggtcccaccccggggcatagctcattcacctcttgtccgcgcacgggcgaccaagagtgcgacccgagccaaggaacacgacgcaccgacgacgcgaccctttggccaggtcgtcgcccccatatgggtacgcgccaactattggctgacccacgaagaagtctccaccccacgagtctgagcggccgagggacccagcaagctctattctgcagcggaaacccttttgagctgaggggaacacactcgcgggcgggccagcatccctctcgtcgacccgtctcgtacgcacgccatagagcaaagctcatccccctataatatcccttgctgcgccggaa

SEQ ID NO: 547012 - DNA, 582 bp, Homo sapiens
gagcggggacgtcagcgctgccagcgtggaaggagctgcgtgtgtgctgcgggaggacggaagtagagcccgggaccgccaggccaccaccggccgcctcagccatggacgcgtccctggagaagatagcagaccccactgttagctgacatgggaacaaacttgaagtgattgcagtgaatgatgctggcaggacagtcagagacagaacagaagaggaaaatggaaagaatgctcatatcctggaggatattccaggcccactcccatgggcaggtggtgcaagatatggtgagccatcctccagttagttcagaatctcatgcatggacgatgaacgatgacggagcccacagaagccccaagaactcccaacatacttgcgagacaaccaaggtcatactgggccttatgctagggaccacatacgtctgtggagcttcatattttcacctctggacaaagagaagctgagaaaacttacaactaggatactttcagataccaccttatggcctatgacagaatttacagatctgaacactgggtgtgcttatttccaacgaagaggaaacgagaatg

SEQ ID NO: 547013 - DNA, 859 bp, Homo sapiens
  misc_feature (554)..(554): n is a, c, g, or t
ggaggcagcacgcccgccgcgcccctgctctgtatgccgctctctcccgggcggcgcgcgatcacagcagaggagccaccgcgccgggttgatgtggttgggccggggtgaggaggccgcaagatgccgcagtccaagtcccggaagatcgcgatcctgggctaccggtctgtggggaacactcctcattgacgatttcaactttgtctgaaggccaatttgtggactcctacgatccaccatagaaaacacttttacaacgttgatcaccagtcaatggcccacgaatatcatcttcaatttgtagacacagccggccaacgatgcaatattctatctttcctcagaaatactccatagatataaatggatatatctgtgtgtattcgggtacatcaattcaaaagtttgaaggtgattcaaagtttatccatggcaaatgtgtggatatggcggggaagtaacaatacctatatgtgggtgggcataagaaagagctggcttatggaaagggtgatcagttatgaacgaggcaaccttgtgagaaatcttgncatgcagtttttggaatcttctgtaaagaaatcagatgtgtggatgtttatccgaaggatacttggcggcagaacaactgtagggacgttcacagacagtctatgccgggatgtaatcttgtgcacgctgagacctggaatttttactgacaaagcatgcggtcctgagatacatgtttattcttgtaacgacaataatgggccgagccactcaattttaacctggttgacagtgtctccagtcattaacactattcaatttagtttatattaacaatgagcataggcgtgactataaagctgta

SEQ ID NO: 547014 - DNA, 276 bp, Homo sapiens
  misc_feature (33)..(33): n is a, c, g, or t
  misc_feature (43)..(43): n is a, c, g, or t
  misc_feature (154)..(154): n is a, c, g, or t
  misc_feature (157)..(157): n is a, c, g, or t
  misc_feature (162)..(162): n is a, c, g, or t
  misc_feature (166)..(166): n is a, c, g, or t
gcactgaccaagaacagcctggacgccagcagncagccggctnctcgcccacactgaccccggggaagcggcacagaaccggccctccgtgatcacctgtgcctcggctggcgcccgcaactgcaacctctcgcactgccccatcgcgcacagngcntgtgncacncagggcctgccagctaccggagccaccgagcgctgccaccacctgtgaccccgtggtggaggagcatttccgcagagcctgggaagaattacaaggagcccgagccggca

SEQ ID NO: 547015 - DNA, 468 bp, Homo sapiens
atcgatacctaagtgcgtgccgccaccaccatttccggattgcttttgcaactccccactttcagcaatacccccaccattgcgatggccgccagcgttctgctgctagtgccgggctttccgttgattaatgccgtcgccgatatgtttaaaggccacatcaataccggactggcacgctgggcgatcgccagtctgctgacactggctacctgcgtcggcgtagtgatggcactgacgatttgggggctacgcggatgggtgtgatcgaatttctgttagcgttggcgcaggatatgatcctcgccgccattcctgcggtcggctttgcgatggtgttcaacgttcccgtgcgggcgttacgctggtgtgcgctgcttggctcgataggtcatggttcccgaatgatcttgatgaccagcggcttgaatattgagtggtcaacctttatggcttctatgctggtcc

SEQ ID NO: 547016 - DNA, 893 bp, Homo sapiens
tggatccggcgtcagggctgacgggcggaccgaggtgtgagcgcagagtctgtcaggctgggttggtgaaggtgcgcggggcctgggcacggtgttgggagtgcgcggagggaccggccaggcgggctgcaggcaaccgtcagagccctgtggacaccccctcaagcgtccgcagtgcgcgatgaaggcactgatcttagtgcggggggctatgcggacgcgggctacggccgcttgacgctgagcacccccgaaggccactggtggacttctgcaataagcccatacttgctgcagcaagtgcaggcgcttacgcccgcgcgcaggcgtggaccacgtgatcctggccgtgaggctacatgtcgcaggtgctggagaaggaactgaatggcacacggagcagacgtgctggcgactccgaatctccattgtcccattgacgaggaagccctttggggacagctgggccccgtgggctgctggccccgggacctaactctctgagactggagacccatattctttcggtcctcgaacacggtgacgtgatcttgcgagtttccccttccaaggacaatggttgcacgactccaccgggcaccaagtgggccaagtgaaggggctccacaccctgggtgacccacacgctggggggcaccccctcccaagtacggagcatgcgtgcctgctgctgaacgctatgacaacaaggcgcggcactcccccggagtcggtgggcaaagccccccagggcgtcccggtcccagtaacgaatcaccgcaggcgctgtgacaaacctgaagcccgcagacgagcgcgcggacctcacacctcgagcccaacgccatggagaaccgcgggctccacacataatggccacgacggcaccaaaa

SEQ ID NO: 547017 - DNA, 986 bp, Homo sapiens
tggccggatctggctctgacaacctctccatggcgtatgcgcggactacctccggcatgttgttcattctccctctgtatggtatgccaaatggagactggagaagaggaaaggtgctccgtgggacatgctacccgttcgtggcaatgtcatgagggaaaggtgaactgtacacctactttctactacaactcgtatgcgattgatttgtcgcaacataaggggctactccgagaatgagccactgggtcctctggcaatgtctcacatctttgggaggccgaagatgatctcggatgccatccccgagcttgaaggcctccatccacacgcaagggggaagatttccgcgaaggacccttggaaggtgaagccgctgtgacgggtgggacagatttcctttaatttatgaacggcagtcatgttcagcttgcaaaagaccgtgtgcagagtaaacttcgtattttaattcgctctgggtgatcgattactggtattgacatcattcatgccttccaaatcgtgggtggctctgtgggcgcatcaataaacagccgtacccttggaattcattaaaaaataaaagaaccgagcccacggggacacacaagccacaacacgtgggcggcggcagccgacctgggggcccgcccggaacacagacgtgctacacgagaacaagatcgactgtgagcgtgcacgagcggagcccaacagacggggatcagcgtgacagcatgggaccaacaaacggagcagaaccacaagggaacaacacaagccggggccaggacacaacacagcagggtgagggaaaacccacaccacaagacaaaacaaacgccgccgcgcggggcccaccccggagggcagtcgacgacaaaaaataccgacatagggagagaaacgagagggctaaacacgagggcgttaatacaacaacagggggaagcaacagggcaagccacgaaccattcaaaaaagcc

SEQ ID NO: 547018 - DNA, 486 bp, Homo sapiens
cccacaccacctgagtcttataagaggattacaggcgtgagccaccatgccaggcctccttttggtttttgataaatctccatactattttccatagtggttgtactaatttacattccaaccaacagtatataagagttcccttttctttcttgccagcatgttattttttgtcttttaaataatagccattctaactggggtgagatgaaatcacattgtggtgttagtcatatacctcttgtctatatgtatgtcttttgagaaatgtctattcatgtactttgctcatttttttaaatgagtttttttttttaactgttgagatgtctgaattccttgtatgtgctgggtattagtagtcccctattggatgagtaatttgcaaacattttcccctatacaagaggttgtttcttcactctgtggattgtttcttttgctgtgcagaagcacgtaaatttaatatactctcatttggctatt

SEQ ID NO: 547019 - DNA, 910 bp, Homo sapiens
  misc_feature (728)..(728): n is a, c, g, or t
taaagccctgcgtggcaagccctgacgcaccgccgatgatgcccaggaagacagggcgatctggtagattccaagatacttccttaggatcatccaattattggatgattatccgaaatgttgcattgtgggaacacgacaatgtgggctcctaagtcaggatgacacgcctagaatccctgacaatggtccctatctgcggagcgtaaggctgctaggtcggctcgaatgggcaaaacgaaacaccaatgtatgtcgccaatgggcgcaattccgaggcgtcgatcctgtgtacacatacaagcccgagactctgagacgaaaactagctgacgctcaatataccgtggggggaaatagtgagtgcattgtgttggtatcaaccaatggaagtgaccctttcagcatggaagattcatgcggcacattgttatgtgtagggacatactacatggttgtgccagactagactgaccccgttgcacgtggttgcacgcatatgaccccaatgtgtatagtcagcgtgaagagccatatgcccagaagcaaactggttcatcgttgtcacctgaaaaaaaagcgctaccgttttgtgtccaggacttatagtgtattcagccaggctaaaaaatcgtccagggggcccccatggtacaaattccctgaacgttgatagatggcaagctagactcgaacgaacttggcagtatcaaatagtttgggtgatnccctaggtcgaaaagaccaacggctcgtcatggaaactagtgcatcaggaacacttcgttgctccacatatgcttccttttgggagcttaggatccatctcagcggggaggtttctgcaccaattgtgtaagaatgctacaaccccttgaaaatgctctgaatatcacagaaggaaaatctg

SEQ ID NO: 547020 - DNA, 288 bp, Homo sapiens
tggaagggcatggtggatggccgacgcctgtaaccccagcagtttgggaggccgaggcaggcgatcgcttgacgtcaggggtttaggaccagcctggccaatgtggcggggccccatctctgcagggaataaaaaaaattagccaggcatggtggtgggcgcctgtggtcccagctactcggagggctgaggcaggaggatctcttgagccagggaggcgaggttgcagtgagccgggattgtgccactgcactccagcctgggtgacagagcgagactcctccatca

SEQ ID NO: 547021 - DNA, 137 bp, Homo sapiens
ttatccatttaaggatatatattaaacagagagagtctaagtagaactacagtgactaatcagtccctcgggatggtggtgaaccgtgaagcatgctttaaccatctaagacgtgtctaacagcgcgctttgtgggg

SEQ ID NO: 547022 - DNA, 314 bp, Homo sapiens
acaaggtatacctgtttaggtatactgacatgggtctttctgctcccttaaacactaccaaactacaccatgggccagctgcagtggctcagatttgtaattccagcgctttgggaggctgaggcaggtggatcacttgaggttaggagttcgagaccagcctggccaacatggtgaaatcccatctctactaaaaatacaaaacagctggacatggtggcaggcacctatagtcccagctacttgggaggctgaggcaggagaatcacttgaacccgggaatggggaggttgtagtgagccgagatcgctcca

SEQ ID NO: 547023 - DNA, 425 bp, Homo sapiens
atacagagatcgagagaacacacacgcacacacagaccgacacaggacactacacacacaatatactactcacttaggcctgtctgcgcatagaaaaacatctctcagggtcctaacatattgatatcagatacactcccccgaagcgtgtgtggacatctttctttcaagagagaagtgtctccttacaccaggcgcgtatccactaccagtgactctggagggatatgacctgggggagggagtgtgtcatatatctctttgagcgtgtgtggctccgaagtcatatatgtgcctggatcctctgccacgggttaaatttacaggtgaagagtgaggttgtcatgcgctcagatatgcttcctggctctccctcaagagtgcagccttggatagagaactcacagctctgggaaagagaggag

SEQ ID NO: 547024 - DNA, 475 bp, Homo sapiens
  misc_feature (243)..(243): n is a, c, g, or t
gaagtgaatgttgagaaggctcaccccgctctttacccttctgcggaatgccttgccaacacccagtgacgacccccactgcgctcatgaccgaccccaagtacatcatttggtctccggtgtgccgcaacgacattgcctggaactttgagaagttcctggtgggccccgacggtgttcccgtgcgcaggtacagccgccgctttcgtaccatcgacatcgaacctgacatagaaacccctntgtcccagcagtctggcaactcctaaggcggccctggcattggcttggtgattactggctgcactctggggggcggttcttccatgatggtgtttcctctaaatttgcacggagaaacacctgatttccaggaaaatcccctcagatgggcgctggtcccatccattcccgatgcctttccacctaatgaaaggtggtttcactactaagaataaagtgctgaatatcagaa

SEQ ID NO: 547025 - DNA, 130 bp, Homo sapiens
ttaacatcgtgtccttttgatctgttgtgatttagagggtgaactcactggaatggggatgcttgcatgtgtaatcttactgagagctaatagaaaggctattgaccaaacctattgacacgaatgttca

SEQ ID NO: 547026 - DNA, 150 bp, Homo sapiens
  misc_feature (64)..(64): n is a, c, g, or t
  misc_feature (102)..(102): n is a, c, g, or t
  misc_feature (133)..(133): n is a, c, g, or t
cctggtttgtccaggagtagtcccaagtgtatttcatatgaaatgcttcatgtcacacctccantgagcccaccagtatgtcctcaagaccagtcctgtggntgatgctgctggttgggtggatgtggataangaaactctgaaacaaag

SEQ ID NO: 547027 - DNA, 377 bp, Homo sapiens
gcacggcaaaccccgctgtaacccgcataaacccactctttacgccatctttacgccccaccctgcgctcgctctcgttcctttacaccgctcctgcggacaatgcccccacacgcggcaatcgccgcaagacggggaaatttccatgagcgttctggacggagtgtcactgctatgggccgtggcgctgttcatttatctgctggttgcgctgttacgcgcggatcggaactaggagcgggctatgcacagttatgactattggctgatcatcgccttctttgccgtggtactggtgccggcaccctttttggggcggttctactacaaggtgatggaaggccagcgcacttggctcacccagaacgacccaccga

SEQ ID NO: 547028 - DNA, 144 bp, Homo sapiens
cgttgagttattggaagtatgcaagatctggccttgaatcgcacggcttaacatttcgtcagcttcatccagtacaaacatcttgatgtatttgggggacaggtatctccggttaagcatatcaaacatacgcccaggtaagca

SEQ ID NO: 547029 - DNA, 107 bp, Homo sapiens
gccctggaaatcgcaatgctccacagaaacatgtgtaaaatacaccatttatggagtccatgaaggtgtgcctcaaatctcatttagtaaagctgggtagtcacaga

SEQ ID NO: 547030 - DNA, 114 bp, Homo sapiens
cacgccaagctcagactcttatatagcacatccggctcctcttgtccttttgttttcttgcgcatggcatttcactcactctgtcaccaggctggcgtgcaatggtgcatccca

SEQ ID NO: 547031 - DNA, 190 bp, Homo sapiens
ccctgtgctagcaaccagcctcactcgtatctgatcgccattatcgcgaactgtctgaagcgattgatgatgattataccgatccgactaaaatgcacttatgcgcttggtttaaactggtctaactccattctgggtggtttcaacatcagtggctataaaacatatagttacgacggtgacaatgact

SEQ ID NO: 547032 - DNA, 985 bp, Homo sapiens
gatccgaccctcaccccacctcggggttctcgcagccgcggccctggcctgtcactgcaggccttgaccccaacccttcttgccagtagcctggtagcattctctgcccctgaagtctccatgcccaccggtccgcatggcctccctgatcccatgctggagccccatttccctcatcccactcttgcaacaccccgtcccacccattactattctccatacggcacgttgcaccagaacagcgagatcatctacggaccccggctcatgcctatgtcatcaaagcagcccccacagcaatcacatatcccatgaccccgacccagtcgagagcgaaccacatccgccgggccccatccaagggctacgacggcaccaccaggcgcgcccctaacacacacaacagcacaagccacagtgtggccagcgaacgacacagggcgacagcatctgcccatcctgagggaccccgcgacgcacgaaccccgcggcaccgcccccgcgggcccacaactcccccgcacgtactaggacaccacattccccgatgccctgcgccagccgctaaagcgccacacagacacccggaatggacaaacaagacctagaagagagacaccacaaaaaccacttgccagtggcccgcaaacaatcacaagcggatgaaaccccacggcacaaaaaacaacatcacaattcagttcagtgacccaccatggacaaagcgcatggcccacccaactctgcgagccaccactataggccacatagccacacctcatcccacagacggcttagtggcaatctacggacactaggaaacaacccatactagacaagagccggacatcccactttaggacgcgaattcagcaactaaccagattacagcatatcaacaataactaccacggacaggccacttcttccgtatctacacctattcacccggcgcagaaacgtagattgtagcgaacaagcaacg

SEQ ID NO: 547033 - DNA, 887 bp, Homo sapiens
gcgcggtagctgggaccgtcgcttcagtcgccaattatgtagcatctttgtccgcgcccaagagctacacacctttacgaggtgacacgagccaatgtgaaacggtcgcccagatcaaggtctcatgtagcctctctggagggcatttgcccccggaatgactcccgtcgtgctccttgtgcatgttgcgcccctggagtgatgtaggccaccctcttgtggccatgtgcggtggtggtagtgctcctgactagctccttggatcgttgcaaggcctgcatgcttggatggtaaatgtcctattggttcccgtggtccctgtgcttggacagaacgtgagacggtcagatctcctaaagtgttggccaaatcatggagaatgatagacagaaagaatggacatggtcgggctaagcggcggattgcacttacagatcggcgctttgtcaagcgttgtgccgcacctttgggccgtaggacacgaagaggctccactagagtgccacagctacttttagagttcatcttctgctacattcgtgggctgttcgttcgtagatctagatagacacgcccactcttaagttctagatcgataacaaaattcaagaactgagtcaataaagaggagcatcaatgcatgttacacacaaaatgaagaccagaggcgcccattggtctaagtggacggggtggcccaaaaacggccgaggcgcgaggcacaagggagccagacaggcccgatagaatcgtgccgaggataaccccgggctattcttccgttggacctttgatgggcacccttgcagggagaaaccctcggtggagcttgggacaataatccctttgtgtcttacgagaggatagtcatcgacgcgtagtcagag

SEQ ID NO: 547034 - DNA, 280 bp, Homo sapiens
tgtaccccagtggaggccagcttgatgagcagttctacctgcaggctgctgaagctgcccaaacagaccagccatgatgtgccctgtcggggatgagagccaggtcgagtgctccacatggtcagagacaagccagttttctccttccaacctcggggccacctggaacttggcgacaaactcgacatcacccgttcgacacgggtgatgcggttgggactagcgagtctgacttgagtacacgtttcgtggcccggagactgccgtcctggggacacgg

SEQ ID NO: 547035 - DNA, 136 bp, Homo sapiens
tctgaggaagctgggaaataagaaatcgtcgtcttctccacggggtggtgacttatctcccaccccgtggagaagacgacgatttcttatttcacaggtccttggacatcgctttggccttcccagcttgctcaga

SEQ ID NO: 547036 - DNA, 419 bp, Homo sapiens
ccgtccctctctcaacttcgtgccctatcccttatttatttgatcagctatgccttgtatttttccttgcttagactgttatcatttacacttctgtactgttattatgatggcatcttctggctccagtgcgaggaggctcaccgtgctagcactgtgagtccccgctttaatgtccatccacgagttcacagtcacaatagaaagcaaggcccttacagagactcttgaagctaacagtactttaaggtcgaggagccttactgccctggggaattctgggggatatgcctttcgatttctgctctactcgggttcgcccaccacatagatccccatctgtcttgctgtccgaacgtgtgtgatgcagattctgtctcacctatcgcgtgtattccctccgatcccgctcacttcta

SEQ ID NO: 547037 - DNA, 219 bp, Homo sapiens
  misc_feature (30)..(30): n is a, c, g, or t
  misc_feature (96)..(96): n is a, c, g, or t
  misc_feature (104)..(104): n is a, c, g, or t
  misc_feature (114)..(114): n is a, c, g, or t
  misc_feature (176)..(176): n is a, c, g, or t
  misc_feature (191)..(192): n is a, c, g, or t
  misc_feature (205)..(205): n is a, c, g, or t
aatgagaaagtttgaaaaaaagaggtggancggtcggaattccgggatccgcatccgcctccggcctggcctgatttgcgccggtttaagtgacgngccgacgngggctccggntccgttccgacaggcaggccagctggaatgagagatcgcgcgcgggtacggcgcaaaggagnagggggggcggtcgnngggaattgtgcantgggccccgggaaa

SEQ ID NO: 547038 - DNA, 250 bp, Homo sapiens
gggtcagctcgccgaacaggtcggacgctttgcgccgggactcatcaggtgatcagcaccatcagcgcggtcattttgcagccggccagcagcaggcctttcttcggaatgccgtttttatccagctcgccgtacactttcgggaagttgccgtcgttggcggcgcgtaccccggcctggccgaccagcatcatccacgaaccgagcgacgtcaggcaggcgaaggcagtgaaggcggaaaccatcggtg

SEQ ID NO: 547039 - DNA, 272 bp, Homo sapiens
gctcgactctgcacggccctttgaagattcgggctacatgtacacgtgcatgagcgtgtgtgtgatgtgcgcgcgtgtctgtgtgtttgttcatgtctagccggcacgtgagtgtgtgtgtgtgtgtgtacctacagtggtgcttctgagagagatgttcaaaagcaaatctttgccttgagagtagctgtgatgtttttttttttttcttttcttttttcttcttcttcttctttttcttctcctctgagaggacagaggagatagtcgac

SEQ ID NO: 547040 - DNA, 153 bp, Homo sapiens
  misc_feature (60)..(60): n is a, c, g, or t
gtattagcatcatccctctactattttttagccaaatcaacaacaacctatttagctgtncccaaccttttgcttcgcagcccctaacaggccccctgcctaatactaactacctgaacgtgcctacccctcaaaaatcaatgggcaggctaa

SEQ ID NO: 547041 - DNA, 379 bp, Homo sapiens
  misc_feature (319)..(319): n is a, c, g, or t
  misc_feature (326)..(326): n is a, c, g, or t
  misc_feature (340)..(340): n is a, c, g, or t
  misc_feature (344)..(344): n is a, c, g, or t
ccgatgctcagaagtgtcttgccagcaacattcctgctagcatacaggagtgatttcctaaaccagtttcattctagtctgaatagggacaaacaaatcttgaggaagcccaagtgcgtacctttatttttgccccaccaccctctttctgtactcacaatttttgtttgttttttgtttttttgtccctgtcatataatattttggtgcttcaaacttgtaccttcattgtacatcctttctttctcccttgggtcttattataaaggagacaatgtacggtgtaattaccaaaaggatagggaaaccaggatttcangcctctncctgggtctatctnaatncattctttgtaaaataaacatgggttgttggatac

SEQ ID NO: 547042 - DNA, 170 bp, Homo sapiens
  misc_feature (1)..(1): n is a, c, g, or t
ntgtgatctagaggatcctccagaggcacaagggaggaggagaggtgctctgactttttagagtttccagtttttctggttctggttttttcccagcggggattttgggtcttcttgatctgggataagcacagtgcagagcatgggctggggtacgtgggccggtttct

SEQ ID NO: 547043 - DNA, 1152 bp, Homo sapiens
gaagaaggttccagtccccggaaggcctggacctggacgcctggatcaatgagccactctcgtgacagcgagtcagagtgacgagaggcccagtgcccgtcttccacgaggagtgagcagcggtgtccaagcacctggcctgtcggaggcggacgacggaagagctggctcgtgctgcctgagaggcccggaagcaggagcaggccaacaaccccattctacatcaacgagctcgccatcgccacagcaagcggtaccatggacaccccgggcgtggagcacattcccctgtggctgcagacttgacctctccgtgcccttgaaggttccagggcctgcctactgtcaggatcacgtatgtgaagctggacgcgaggacgcgccggcacccggccgaacgctggcagaaggacaagaggaggaaacagaggcaaaggacaaacggagcagacgaggcgagcgccagccgaccaggccccacagccacagacagccgacacagagaccacggcacacgacgcgacactccggacaactggcacccaaagaggagcaacacaatcgagcacagaccgccaccgccctgcaccagtggcccgccgcccgccgcgagcggcggaggactgaacagacaggagcagacaacagggaaacacgccagcaggaggaccgaccggcagtaccccgagcgggcagggcacgggccacagcgccgcccgacgaggacgaaagacgggcaaaagtgagcgacaggcgcaagaacaacaagggagaaaataagaaaaacacactgacacaacgaaggataccaccaacgcggccacccagcggacgacagagaccgaccgacaagcacgcacgaaccgatccgcgccgccgcaccggcaccagaggacgcacggaaaggaagaacacagccgaaaatgcaaagacgggaggaggcggcgaacgggggggggagcgacgggccagcgggaaggctgcagggaaggaggaacacacccgccccggaccacggacgccccgcgggcgcgagcacgaccgccagaccaacaaacagcaaagcacgcaccaggcccccgagagcgagtggcgcaacgcagagcggccgagcgcagccgccgggagtggggagcggggacgggggggagg

SEQ ID NO: 547044 - DNA, 236 bp, Homo sapiens
tggatacagaagcaccaacgagagacacagctggtggaacacacatggccagagtgagagccatgctcaatgaccgtcgccgcctgccctgtagaatacatcaccgctctgcagctgtcctcctcgcctgtcactgttcaatatgctaagaatattccgcgcaaacaaagacaacaccaccctaagcttcgagctgtgcgctggtgatcccagaagccgtcaatcgtccagtatac

SEQ ID NO: 547045 - DNA, 208 bp, Homo sapiens
tcttccttctgttctagtgagtgtatgagaccttgcagagttgtttatcagcatactcaaaatttttttcctggaatttgtagggatgggaggagggggtgcagcttacttgttgtagcttttttttttttttaccaacttcacagagaaagcagttgtcttgcctccaggactgtctgttctggggccaagaaaaggccacactgtt

SEQ ID NO: 547046 - DNA, 357 bp, Homo sapiens
cagtaagggacggtggccggattgctcaccagaaggtggtacggctcttacggccaggactggatgatggtaaaccccggttgggggtacctggcaaggtggtcatgcagggcggtatggcaggtgtggggaagatggccaagtacgggagagaatactttcggtcccttgaagaactggtgagtggcatgtacagaatctatgacatggagaacgtccggctgggacatcatttcaccaattccaggattctatccagtatgtccagaagaatgcgggaaagctgaccaccactatgggcaagtaatgtgcccaatcaccatagtgccattcaacttagggccaatcaccataggg

SEQ ID NO: 547047 - DNA, 616 bp, Homo sapiens
tttcagaaattacctgcgagtaattttttcttagtgattgcagaccgctatgttgcctaggctggggtgaaactactggactcaagcaaacctctcacctccacctgtgtaagggctaggattacgggcctgagcgactgcactatgctttgcaggggcctatgggggcagatccttctatgttcatgggcgcttgggcgatatgtggggttaccgccccactactgtctggagtttaaagagttccaactctctcgctaactgctgactcgtccgtccccgcctctgaccccaccgcggatcccgggccgaacccctccgggtgccggtttatacaggtatcctccccttatcctgcgggacggcgtctccgggggaaatgcttgcgcaccggcgacccacatgtggtttccccgactaagcgcgattacttttctgtaacctcgtcctccggtggtgaatatttgctgccatactccttgggtgttgcatcacaggcgctgaatatcttgcctcgagctccctcgtgggcgtagctctctacccctcatcggcctggagggtcttcttgcttccctggcggggccgcggtctcttttaccaccctttacccccc

SEQ ID NO: 547048 - DNA, 967 bp, Homo sapiens
ttctccccctcattaatgcggcttccatccctatctcggctcatggccaggaccttggtgaattgtttctgtggttgaccgtgcttccctttcacccggtttagggggccaaggcctaggtagcaacgagcgcggttctggcctgctgatccccccatgggtgaagggcaatttcacagttgagctagcttgtaccgctacctgtctttagggaaggacgccactcatcggtatcttgggacgcactgcctcatcactaaccgaagcttcttcctgcggccacaagcaaagctgctctcccacgctttctgtatgcccttgctcccttctaggccccgctggacctctgacagaaaggtgctcgcacatccctgtttagccgtgaatgtctaacgaccatctcgctggagccccgcggaactggggctatacagcctctgcgactgacacgcgttgctcttccggggccaagaaagcgccagatcccccgggagcaacgctctaccctacgaatcgtgttcctcgagtcagatccttcgtttcattcgccccacgcttctccagatcgcacccagtagaccactggatatgatgtctacttcgatccaatgcaacatggcacagtcgcacccagagaagagagactgattgacgcgtcagcgatacttcggtactagcctcgcgaataactagtatcacggcgcacagcggtgtctacagctcactgaagtagcgctcacgcacgtgctctgcgtagctgaagtgcaccaatgggggagtaaaggggcgagcactccacgtgagagaatgctgcctgtggcactgtcccgccatgcctcagtgccacttgacattccttgtcaccagcaaccatactcgagccacctggatgtcccttgtcccaccaactctgcagctccatggccaccccgtgccacccgtaggcagcctctctgctattactcac

SEQ ID NO: 547049 - DNA, 116 bp, Homo sapiens
gcgagtagcatactgcacacgcgaggccacactgcacacgccgagagcccagaccaaaatcgccgatcttcacgtgcacacgccgagtgcccataccataatcgccgatcttcacg

SEQ ID NO: 547050 - DNA, 658 bp, Homo sapiens
tgtaatcgacctgtcccgttgaagaggcgggcgatgacacgggcgatgacgagaagcaccctatgagtacctttaattgattattgctacttcactagcctaatcagacccacaggtcctaaactaccccacctgcattaacattttcggtgggcgtctacctcggagcgaagcccaacctccgaggagtacatgcttaagatttcaccagtctaagacgtaacgtaaactatagctgctagatttagtatccatagtaaagcgtttgtaccagatggtagacaaggttcaccctagaggataaacagcagcacatccctatatctagcagtgccgatatcaaacgatatagggttatacgaactcgcatgtaggatcacggacatcccgagggtgcagtcgctatcatgggttcgtgttgttctaaccgattagatgtgctacgtgatctgagttcatgatccggtatgtaatccagagtctggtgttctatctacttcaaatatcgctccctgtatcgaatagggaccaagagatataaggcctacttcacaatagcgccttcccccgtactagtgatactcatctcaacttagtattatacccaaaaccgcaacctataacagggtctccaactgtgcaaatgaacctttgattg

SEQ ID NO: 547051 - DNA, 957 bp, Homo sapiens
  misc_feature (707)..(707): n is a, c, g, or t
ctcactgttgcctgtttcttgtgtgtgaagggcaggactgaaaacacacaagctccaaactaggcccctggtgaccctcacttggtcagcaatgccatcagtcctcagaacttccttccacgaccctcctcatcagtccttccaagccgcaggcagctttataccccatgtgccatcaccaggctggactgtccaccttggctgaccagactgagccctgatggcttctatttcccaaagccatgccacccaggaagacaagcctgagtctgtaggaggggagctgccacacaggctcccagctgcctgcccggctccttatctacctcttggcagattctacactcagtccccaggcctgatccaatcaaggagttgaggcttttcaaaaacacacactgggagaaaaatgcaaaccaaagcaggtggacgagatggggtgaaaggaaaacaagaatggcaatgttacacaagaccaagagtgcgtgacgttaatgcagaaatggaggctgcacatcacttaaagcagactcccagctggctgtgctcggggcctccagcagccagtgcaggatgcaaaacctggcaagcccacaaagcactgtgcctatgggataaagcaagccagctggcccagggaaagcccgattcctgacactcaggctgcaacaaaatgtctcccaggacaggactgatcacaatactgnttttagtcatccaatattcgtataatgtgttacttttgagaactgaatgccgtacttggggatgcacatgtattttacaattgaatctgattcctggtggtgaacattccaggaggtggtaggcttatggtaaaaaaaaggcgttctacgaaattttactcccgactgggggacaccccagaggtctttgaaatgttcctacggcccggacttatgacaacgaacttgggggcaacacgccacatgaccg

SEQ ID NO: 547052 - DNA, 947 bp, Homo sapiens
cgaccgtgggttcccacgatgccgccaggatttgcgtgatggtgtaaaccacctctgtgtgtaaaaaaccttgtgcaaacacacgggtccttctgagccgcgccttgttttatgttgagacgcgcctcccaagaccgcagaatctgtgttgccaacacagggtcacaacttttggggcgagacctaacccttctggaaaagacaaggagttcgtaactcagccattatgagcccgtgtgccgccgtcgtcttcactatggacggcgccaagccctcttatacccctttctgggggaaaaaactttcctgttgcttcagtgaaagcgatcatgctagcaaactgccctccaaaacacggtctgtcgttttaccaagaagtgattctgtcagcatcaaatgattttccccaacaaaaattctcgtcagatatcttcttgataaattatgaccctgccccctatggataatttttgccgccccccccacccccactcattaaagtaagtctctgtgccacaaaaatcgggtacaatctaattgaccactcgtatatgaggttgattctctacattttcttggaccccacccacacctccgggccccaaacatctctttcaccacctgcttctaggaacgaggtgatatatatctcgtcacatcacctatttgcaaaaatatacttagcccccgccacatgttgcctttataatcaatatcgagcgttcatttcgaaatggctgaaccatctttgagaaacaattcggccccagattttttcccagacagcatttcattccattcacagtgtagattcgtcttgatctatatttattagaaagaatcactcataaacccgccagattttttttctataacagaaaaaggcagcccaaagtacaagtcctgtcccccaggcttaaaaaagaagccctttcccccacataaca

SEQ ID NO: 547053 - DNA, 205 bp, Homo sapiens
ctgagtctagcaggatcccctaggtggaaatgctgactgtgtaagaaatgacggtgcttgaaggcatgatgatgtgcccacatgactctggatctcgaacctgttggcaggatgtgaacaatggtgagctgtgcagcccacaggactgggctgtggctggtgtggacacatgccccccaacgttggccaatgctgagtctctggg

SEQ ID NO: 547054 - DNA, 466 bp, Homo sapiens
tcagtgatgaccatgccctgccctgccctgccctgccctgccctgccctgcccagcaccttcagagccctctgcagaaggttgggcacagggcggcccatctgcgtgtccgttccacccaggagcttctcggcactgtgccggagtggtcagggttgctctgtcatctgcccacagtgtactatgaggggctgcaggacaagctggcacagatccgcgatgcccggggggcgctgagtgccctgcgcgaagagcaccgggagaagcttcgccgggcagccgaggaggcagagcgccagcgccagatccagctggcccagaagctggagataatgcggcagaagaagcaggggcctctctcggcagccacagccaagggtggaggcttcaggtctccagcttctctgcttctcagctgccatctccagtgccccagaatggtacagcgataataaaatgtatttcag

SEQ ID NO: 547055 - DNA, 147 bp, Homo sapiens
gttaacagctatagaccatgcacgggccgtcgtttaacacaaacagttataaccatgcacgggccgtcgttgaccgcgaacagctatgactatgctctggccgtcagttatctagtacacaggctatgaccatgcactggcctgtcg

SEQ ID NO: 547056 - DNA, 368 bp, Homo sapiens
tgatagctgactctagaggaaaaactacagacggtgcatgccgtaccaatgatgcataacatggatcctgaaggtgaaccacagaggagggcagagaattctccgaggaaatggtcatttgatgtgaggacccagaaagacagacatatctacacaaattgatatagcagactactctctgatggggaatggtaaagggacaaggacaaagtgaaggttgctgagaagatacaagttctggctataagaagggcagaggagcagaggcaggagacagaggtgggcaggcatctggcccaccccaggaccctcctggaggggcttggacactgggaggaatgaaggctggcacgggagctggcacgggg

SEQ ID NO: 547057 - DNA, 1218 bp, Homo sapiens
gcggaagtcccaattcacgaagattgagcagtagctgtgagttgctggcgctggagcgattcgtgtggcacgtggagccacggcgtgcgatgtagggggctgaagagcaggcagcagcggtcagcgggcctgccctctgctagccgctttgggtctcggtggataccccgatttcttcctgtatcgtgtgcggacgtagcgctgcggcgagatgcgacactccccccggctcttcggaacttccggtagttcggacactccagatgtaactcccatatggtccagcaagacgagacgacgttgcagcgattgacagctttgtcccgcagaggcttctgcaagtccagtgccttcaagtgtcggtgcctacgaggtggccgaagaaaggccgtgaatcgacgatgcatatggccttgatagcaaatggtttggcagaacttcaaggcgggatctggaactggggttgaataggctcgagtgtgacactgggcttccgggtaaaccggagcattcgcgtggtatcttgacggccgccacgggcaagactgcagagacctaagggagccacgacaaggactagttggattccatgcttaagatccgagctttcgcagcgaagatgcattgcagtctcgctattcgcccaaggccgcaggacccgacaagtcggcttgtgcaggtcttaaccagcggaccttccattgcaaggctacaaacggtccacctaacgaatgccgaacccaactggatttaattctgtgccggacacaattggtcccaatagtgctgattcttggcagattgcaaggacagaattgccggagcaagaaaacgccttgcgagagcgctataaccaagggggcttgcccacttgggcgaaaggctctgcacaggaaggtcttacatgcgaaagctgcagtagccagcgtttaggaggatgactaccgcgggcaagcaaatggggttgccaacaacgggcaggtgctttcctttcaggaaacgagccgtcagcaagggatatgagaaaggccccactatactggacatggaaacgttggccttaggtgaacaggatataaatctatcttccacgaaaaacgcggcgtttccctatactggagctatagaaccgtgtgcaatttttgtcccctttgtatggggcgaaggaaatctcattaaatagcccttccttggcaccgcaggtgtcgacccagcgaa

SEQ ID NO: 547058 - DNA, 194 bp, Homo sapiens
actgacctatctatactgacatatctatactgacctatctatactgacctgcctccccctggtgactacccgccatggaaccgttggatacaatctgcatgacttatctatactgacgctatctatactgacttatctatactgacgcctatactgacttatctatactgacccccgcgccgacaattatggcg

SEQ ID NO: 547059 - DNA, 1407 bp, Homo sapiens
  misc_feature (320)..(320): n is a, c, g, or t
catcacttctcagctaagatcaagtgttaaaataaataaataaataaataaataccaagttatgagtgtcagagcaggggagccctccacgcagccacggagccagtctgagggaagaggtacataggatagaaaaatctctaggctccaacgcttctgcttcggtgtctttccatttcccagggtctatgtgttgccttctcttcattttccagcaaaattccttttgagatatgttggccttcactcggctgaactagggggtgaaggaaggttgtcctctgtgggccactattgctggggaaacagctaaaccctgnaggccaagtggaacttggaggtgccaagaaaacctagaaggtgcaatggggctgcgacggatagaggtgtcaaaccagaagggaggaacccgtcggaggtgggctgtgaccaccggaccttttcataagtggtggcagtggtagaattgagggggcaagtaggcttggagaatgtttttagccaggggctgttgagagatggcagaagggggtcttaatgtggggactgtggacagtggggcattcgtgggaaccagagggattttggacaagtccagatggaatgtgcagggcataggtagagggaaaagaaaatccctttctgggaaaaccatttcttgtttattgaaacaatgcaggacatcatcaaagtccgggtggacacattccattatctacaaattacaaaggtaggcacagcaaagaataatgaagattataagaaaaccaagcgccaggcacggtgactcaagcctgtaatcccagcactctgggaggctggggtgggtggatcactcaaggtcaggagttcgagaccagcctggccaacatggagaaaccccatctctactaaaaatacaaaaattagctaggcgtgggggcgggcgtctgtggtcccagctacttgggaggctgaggcaggagaatcatttgaacccaggaggtggaagttgcagtgagctcagatcgcaccattgcactccagcctgggtaacaagaatgaaactccatctcaaaaaaaaaaaaaaaaagaaaaaaaatttgtgggggggcgacaggggaccggaaaaaaggttaaaaaactctttggggggcgcggggcccaaaaagaaaaagaaacggggctaaggttgtccaagagaccggcagacacgggggggtcccacaaaaaaaagccggggaccgaggtctgacaaccaagggggcggagcacaagcgtacaagggccaggcgataaagccagcgggaaaaacgaacccagcgcagagacgagacagatgagaggactatgctaaaggagcacacacggcacagacagacaagaaagcagcagaggcgagaggggagaatagtgccgaaaacggca

SEQ ID NO: 547060 - DNA, 478 bp, Homo sapiens
actccctgttaatcggccgagggtcctgttggtcgcttaagcgggcctctgcgtgggcggcgggaatccgcggacatcgggtcgggtctagtgctcccgagtggcgcgctcctgaggcgggagcccttgtactgggtctcgctgatggaggctagccagatgcgtagtgccacactagactagtatccttacttgtacgcttaatcccatgcaaattggcgtagatgactgcctgtgtagcatgcagttggttgtgggtgcccatggtgagtgcccgtgtggttgggggctgtgtgatttgtgtggaaccagcagagagagcataccagcagagaagtggtttctgggcaagtatggccatcctgtgtgtgccaggtgagagtacagcagagactagtgtgaacagtgtgttgcctgggtgggcaccatgaagatgcaagggcgaagagcatctgcagttgaaagtgcaaatttgccg

SEQ ID NO: 547061 - DNA, 1716 bp, Homo sapiens
  misc_feature (629)..(629): n is a, c, g, or t
cttttggggtctttgctgatctgtgaccttacccccgaccctgtgctctctgaaacatgtgctgtgtccactcagggttaaatggattaagggcggtgcaagatgtgctttgttaaacagatgcttgaaggcagcatgcttgttaagagtcatcaccaatccctgatctcaagtaatcagggacacaaacactgcggaaggccgcagggtcctctgcctaggaaaaccagagacctttgttcacttgtttatctgctgaccttccctccactattgtcccatgaccctgccaagtccccctctgtgagaaacacccaagaattatcaataaaaaaataaaataaataaataaataaataaataccaagttatgagtgtcagagcaggggagccctccacgcagccacggagccagtctgagggaagaggtacataggatagaaaaatctctaggctccaacgcttctgcttcggtgtctttccatttcccagggtctatgtgttgccttctcttcattttccagcaaaattccttttgagatatgttggccttcactcggctgaactagggggtgaaggaaggttgtcctctgtgggccactattgctggggaaacagctaaaccctgnaggccaagtggaacttggaggtgccaagaaaacctagaaggtgcaatggggctgcgacggatagaggtgtcaaaccagaagggaggaacccgtcggaggtgggctgtgaccaccggaccttttcataagtggtggcagtggtagaattgagggggcaagtaggcttggagaatgtttttagccaggggctgttgagagatggcagaagggggtcttaatgtggggactgtggacagtggggcattcgtgggaaccagagggattttggacaagtccagatggaatgtgcagggcataggtagagggaaaagaaaatccctttctgggaaaaccatttcttgtttattgaaacaatgcaggacatcatcaaagtccgggtggacacattccattatctacaaattacaaaggtaggcacagcaaagaataatgaagattataagaaaaccaagcgccaggcacggtgactcaagcctgtaatcccagcactctgggaggctggggtgggtggatcactcaaggtcaggagttcgagaccagcctggccaacatggagaaaccccatctctactaaaaatacaaaaattagctaggcgtgggggcgggcgtctgtggtcccagctacttgggaggctgaggcaggagaatcatttgaacccaggaggtggaagttgcagtgagctcagatcgcaccattgcactccagcctgggtaacaagaatgaaactccatctcaaaaaaaaaaaaaaaaagaaaaaaaatttgtgggggggcgacaggggaccggaaaaaaggttaaaaaactctttggggggcgcggggcccaaaaagaaaaagaaacggggctaaggttgtccaagagaccggcagacacgggggggtcccacaaaaaaaagccggggaccgaggtctgacaaccaagggggcggagcacaagcgtacaagggccaggcgataaagccagcgggaaaaacgaacccagcgcagagacgagacagatgagaggactatgctaaaggagcacacacggcacagacagacaagaaagcagcagaggcgagaggggagaatagtgccgaaaacggca

SEQ ID NO: 547062 - DNA, 240 bp, Homo sapiens
ttttttgaaaaagggccaaaggggcccccctttttttttttccccctggggaaaagggggagggggggtttttaaaaccccttcccttttgggggcaaaaaaagggaagggatttttttaaaaggccggggggggctttaatttttttggggccccctttaattggaacttgcctttttacggggggggttttttttttttttttgggggaaaagaaaaaaaaaagcccttttttttcca

SEQ ID NO: 547063 - DNA, 1566 bp, Homo sapiens
  misc_feature (479)..(479): n is a, c, g, or t
aaagccatttctctagattcctatacctgtaatcttattaatacatttaaaatacatcagtgcgggccgggtgtggtggctcacacttataatcccaacactttggaaggccaaggcgggaggatcacttgaagccacaaatttaagaccagcctgggtaatatagcgagaccctgtctctacaaaaaaaataaataaataaataaataaataccaagttatgagtgtcagagcaggggagccctccacgcagccacggagccagtctgagggaagaggtacataggatagaaaaatctctaggctccaacgcttctgcttcggtgtctttccatttcccagggtctatgtgttgccttctcttcattttccagcaaaattccttttgagatatgttggccttcactcggctgaactagggggtgaaggaaggttgtcctctgtgggccactattgctggggaaacagctaaaccctgnaggccaagtggaacttggaggtgccaagaaaacctagaaggtgcaatggggctgcgacggatagaggtgtcaaaccagaagggaggaacccgtcggaggtgggctgtgaccaccggaccttttcataagtggtggcagtggtagaattgagggggcaagtaggcttggagaatgtttttagccaggggctgttgagagatggcagaagggggtcttaatgtggggactgtggacagtggggcattcgtgggaaccagagggattttggacaagtccagatggaatgtgcagggcataggtagagggaaaagaaaatccctttctgggaaaaccatttcttgtttattgaaacaatgcaggacatcatcaaagtccgggtggacacattccattatctacaaattacaaaggtaggcacagcaaagaataatgaagattataagaaaaccaagcgccaggcacggtgactcaagcctgtaatcccagcactctgggaggctggggtgggtggatcactcaaggtcaggagttcgagaccagcctggccaacatggagaaaccccatctctactaaaaatacaaaaattagctaggcgtgggggcgggcgtctgtggtcccagctacttgggaggctgaggcaggagaatcatttgaacccaggaggtggaagttgcagtgagctcagatcgcaccattgcactccagcctgggtaacaagaatgaaactccatctcaaaaaaaaaaaaaaaaagaaaaaaaatttgtgggggggcgacaggggaccggaaaaaaggttaaaaaactctttggggggcgcggggcccaaaaagaaaaagaaacggggctaaggttgtccaagagaccggcagacacgggggggtcccacaaaaaaaagccggggaccgaggtctgacaaccaagggggcggagcacaagcgtacaagggccaggcgataaagccagcgggaaaaacgaacccagcgcagagacgagacagatgagaggactatgctaaaggagcacacacggcacagacagacaagaaagcagcagaggcgagaggggagaatagtgccgaaaacggca

SEQ ID NO: 547064 - DNA, 952 bp, Homo sapiens
cgtccttcatcatacctacccaagtaggcttggagaatgtttttagccaggggctgttgagagatggcagaagggggtcttaatgtggggactgtggacagtggggcattcgtgggaaccagagggattttggacaagtccagatggaatgtgcagggcataggtagagggaaaagaaaatccctttctgggaaaaccatttcttgtttattgaaacaatgcaggacatcatcaaagtccgggtggacacattccattatctacaaattacaaaggtaggcacagcaaagaataatgaagattataagaaaaccaagcgccaggcacggtgactcaagcctgtaatcccagcactctgggaggctggggtgggtggatcactcaaggtcaggagttcgagaccagcctggccaacatggagaaaccccatctctactaaaaatacaaaaattagctaggcgtgggggcgggcgtctgtggtcccagctacttgggaggctgaggcaggagaatcatttgaacccaggaggtggaagttgcagtgagctcagatcgcaccattgcactccagcctgggtaacaagaatgaaactccatctcaaaaaaaaaaaaaaaaagaaaaaaaatttgtgggggggcgacaggggaccggaaaaaaggttaaaaaactctttggggggcgcggggcccaaaaagaaaaagaaacggggctaaggttgtccaagagaccggcagacacgggggggtcccacaaaaaaaagccggggaccgaggtctgacaaccaagggggcggagcacaagcgtacaagggccaggcgataaagccagcgggaaaaacgaacccagcgcagagacgagacagatgagaggactatgctaaaggagcacacacggcacagacagacaagaaagcagcagaggcgagaggggagaatagtgccgaaaacggca

SEQ ID NO: 547065 - DNA, 563 bp, Homo sapiens
  misc_feature (6)..(6): n is a, c, g, or t
  misc_feature (18)..(18): n is a, c, g, or t
  misc_feature (29)..(29): n is a, c, g, or t
  misc_feature (33)..(33): n is a, c, g, or t
  misc_feature (35)..(35): n is a, c, g, or t
  misc_feature (41)..(42): n is a, c, g, or t
  misc_feature (47)..(48): n is a, c, g, or t
  misc_feature (54)..(54): n is a, c, g, or t
  misc_feature (61)..(61): n is a, c, g, or t
  misc_feature (72)..(72): n is a, c, g, or t
  misc_feature (100)..(100): n is a, c, g, or t
  misc_feature (106)..(106): n is a, c, g, or t
  misc_feature (137)..(139): n is a, c, g, or t
  misc_feature (145)..(145): n is a, c, g, or t
  misc_feature (147)..(148): n is a, c, g, or t
  misc_feature (161)..(161): n is a, c, g, or t
  misc_feature (178)..(178): n is a, c, g, or t
  misc_feature (181)..(181): n is a, c, g, or t
  misc_feature (195)..(195): n is a, c, g, or t
  misc_feature (197)..(197): n is a, c, g, or t
  misc_feature (205)..(205): n is a, c, g, or t
  misc_feature (214)..(214): n is a, c, g, or t
  misc_feature (222)..(222): n is a, c, g, or t
  misc_feature (229)..(229): n is a, c, g, or t
  misc_feature (232)..(232): n is a, c, g, or t
  misc_feature (238)..(238): n is a, c, g, or t
  misc_feature (241)..(241): n is a, c, g, or t
  misc_feature (245)..(245): n is a, c, g, or t
  misc_feature (248)..(248): n is a, c, g, or t
  misc_feature (256)..(256): n is a, c, g, or t
  misc_feature (258)..(258): n is a, c, g, or t
  misc_feature (277)..(277): n is a, c, g, or t
  misc_feature (285)..(285): n is a, c, g, or t
  misc_feature (298)..(298): n is a, c, g, or t
  misc_feature (313)..(313): n is a, c, g, or t
  misc_feature (349)..(350): n is a, c, g, or t
  misc_feature (356)..(356): n is a, c, g, or t
  misc_feature (370)..(370): n is a, c, g, or t
  misc_feature (380)..(380): n is a, c, g, or t
  misc_feature (388)..(388): n is a, c, g, or t
  misc_feature (403)..(404): n is a, c, g, or t
  misc_feature (416)..(416): n is a, c, g, or t
  misc_feature (436)..(436): n is a, c, g, or t
  misc_feature (456)..(456): n is a, c, g, or t
  misc_feature (560)..(560): n is a, c, g, or t
cgaggngcgggaacagtncgggagagtcncgcncngcggcnntagcnncggagngtttggngagggggcagngcgagagggggaggcgcagggcgagggngaaggnagtcaaaaggacgaagaccagacggcaccannngagaangnncaagcacacagangcagcagaagaggggcnatnggaaaaaaaagggngnacgggagngataacacnaaacagancaaagtnccncaatgnacngacnctnaatatgantnggcagatttatccacagcnaaagaagngggaacaagatcntgaaactttcctgancattataaagggagcaggaggaaaggctttctgtgnngggggngagatcagagtgancgcggaagcngaaaaggnaaaacagaagatagnnccagtgtgtgtntgtcagagaagaatatatgntgaataatgcgtggggggtngtgccagaaaccgtagggtgcacgtagtcatggaagtacaatgggtgggggaggtggtctctcagtccatgggcaatttcgagtggctacagaaaagtgtcttnttg

SEQ ID NO: 547066 - DNA, 921 bp, Homo sapiens
  misc_feature (320)..(320): n is a, c, g, or t
catcacttctcagctaagatcaagtgttaaaataaataaataaataaataaataccaagttatgagtgtcagagcaggggagccctccacgcagccacggagccagtctgagggaagaggtacataggatagaaaaatctctaggctccaacgcttctgcttcggtgtctttccatttcccagggtctatgtgttgccttctcttcattttccagcaaaattccttttgagatatgttggccttcactcggctgaactagggggtgaaggaaggttgtcctctgtgggccactattgctggggaaacagctaaaccctgnaggccaagtggaacttggaggtgccaagaaaacctagaaggtgcaatggggctgcgacggatagaggtgtcaaaccagaagggaggaacccgtcggaggtgggctgtgaccaccggaccttttcataagtggtggcagtggtagaattgagggggggagaatcatttgaacccaggaggtggaagttgcagtgagctcagatcgcaccattgcactccagcctgggtaacaagaatgaaactccatctcaaaaaaaaaaaaaaaaagaaaaaaaatttgtgggggggcgacaggggaccggaaaaaaggttaaaaaactctttggggggcgcggggcccaaaaagaaaaagaaacggggctaaggttgtccaagagaccggcagacacgggggggtcccacaaaaaaaagccggggaccgaggtctgacaaccaagggggcggagcacaagcgtacaagggccaggcgataaagccagcgggaaaaacgaacccagcgcagagacgagacagatgagaggactatgctaaaggagcacacacggcacagacagacaagaaagcagcagaggcgagaggggagaatagtgccgaaaacggca

SEQ ID NO: 547067 - DNA, 406 bp, Homo sapiens
accaggagtgaggcacagtgagctatgattgtgtgccactgaactccagcatgggtgacagaacgagactcatgactcgggggaaaacagcaaaagcaactgaattctgagttctattctcgtggtacattattttactaaatataaaccatttctaagagtgataacttcagacatactcgaacaatttgaatattgagtattagaaactttgactaccatttcacacaccaaccagtcaacttgtgaacccagatgttgtcagggtttctccccacaaaaccaaacaatctccagaaaacaccatctgaatgtcctctaattcagttcaaaactgggacataatgtcacataccacaggctgagggctcagtcccctaagactgtctccacttcagatgccagt

SEQ ID NO: 547068 - DNA, 297 bp, Homo sapiens
  misc_feature (207)..(207): n is a, c, g, or t
  misc_feature (238)..(238): n is a, c, g, or t
ccattctccgctcgatctgccagctgaacaggtgcagacacagtctcactttgcatgatgcacgggacggatcgcgaattgctcagctctccagaggtgaaggtattgcgcagtttggatcatctactcaaaccacccatgaactcaccattccaaataacttaattggctgcataatcgggcgcaggcggcaatattaatagatcngcagatgtcgggcccagatcaaaattgcaanccagtggaagctcctctggtaggcaggttactaatcacgtggctctgctgccagttatt

SEQ ID NO: 547069 - DNA, 297 bp, Homo sapiens
acattcaaagagctgatgcccgtgagctagcgttgcggcctcgcggctgcagctcggagaatgctggcgcttaggctaacgcacgttggacagctaaccagactacacgcctcccgtgcagccggaggcgggactgccacgcaacacgggctacgagcgcatagcgcggcggccactgtcgccattctgtggacggctcaacaacactagtgagtgactgaccaggtaggccaggtgctgctcgttgtggataatactgattgtaaggcaccagctattccttgtgacgatcggtgg

SEQ ID NO: 547070 - DNA, 426 bp, Homo sapiens
atgtattgattttacttattttatggatttccctgtttaagaattctttgcctaaccctaggtcatgaaaaatttattttatattatcttctaaaagtttaataatttttacatttatgtctatgatacatttttagataattttagtacattgtaagagctttaggtcaaggttcttttgccaaaaatcaggtggccatacttgtatgggtccatttctggaatctctattctgttctgttaatcttgtgtatcaatctctccatcaataccatactgcttttattactgtacccatataggaattcttatcacgtagagtgattcctcccattttttcttcattttcaagattgtttggctcttctaggacctgtgccttttcatacaaattttaacacaagtttttctgtgcctacaaaaaaa

SEQ ID NO: 547071 - DNA, 516 bp, Homo sapiens
  misc_feature (8)..(8): n is a, c, g, or t
  misc_feature (75)..(75): n is a, c, g, or t
  misc_feature (108)..(108): n is a, c, g, or t
  misc_feature (149)..(149): n is a, c, g, or t
  misc_feature (153)..(153): n is a, c, g, or t
  misc_feature (189)..(189): n is a, c, g, or t
  misc_feature (317)..(317): n is a, c, g, or t
  misc_feature (336)..(336): n is a, c, g, or t
  misc_feature (366)..(367): n is a, c, g, or t
  misc_feature (411)..(411): n is a, c, g, or t
  misc_feature (427)..(427): n is a, c, g, or t
  misc_feature (430)..(430): n is a, c, g, or t
  misc_feature (495)..(495): n is a, c, g, or t
ttcagagnccatgtgcacctccaacaaaatcacactccctacaagttcagtgtgccccctagtggcacccgtggnacatcttgacaatgggaagggttaacggaagtngtgggggcttccaacccaatgggacataccaggaatggggntgtnggctgctgagttttcttggggaagaagagagagctntgccacagttcagcttgtgggccctgagacaagggccacagtgtgcggggaggattcctaagggggggaaggttggtgtcatgggcagtgactctgggggtgcgggccacggtgtggcggaaaatggngcgctgggtgggggcaagntgggggggtggggggtggggagacaccagnntgggggagggggggcatttccactcagagtgggtgcggggaacngccagcattttagggncangacccggtcagccagcttcaaccccttcacacgcaggatgagctcatggaggttgatctgccatnaagttgaaggcctcgctgaaa

SEQ ID NO: 547072 - DNA, 214 bp, Homo sapiens
ggcggataagattctccctggggaggccttcccttggcatgtgagaaagtcaaccagctactggcgacaatggcacgttaggtgcagtgacctgggccacaggacgcggaaatggactcccttgtccttgccttttcccttgtttgaaaagttggggacacattgggccttttctgatccctggccaaattacaattcctggaaagcctttcgt

SEQ ID NO: 547073 - DNA, 241 bp, Homo sapiens
tcagtgaccaaggagggtctggagctgcctgaggaatgaggaggagaagaagaagatggaagagagcaaggcaaagttcggaacctctgcaagctcatgaaagaaccttagatcagaaggttcacaacgtccaatcttcaatacactgtgtcttcacttgccgattgtgaccagcactacggcggacagcatactgagcgatctgaagccggcactcggacactcacagggctttgtggca

SEQ ID NO: 547074 - DNA, 225 bp, Homo sapiens
  misc_feature (208)..(208): n is a, c, g, or t
  misc_feature (210)..(211): n is a, c, g, or t
aatgtttgtgtgtgtggtgtgttttttcttgggacccagggcgggcttggcatttttagagacaaggtctcactatgttgcctggtctggtctccaactcctggcctcaggctatcctcctgcctcagcctcctgaagtgctgggattacaggcatgaggtaggaggattacctgaggccaggagtgtgagatcagcctggtcaaatntnnctagaccctgtgtc

SEQ ID NO: 547075 - DNA, 906 bp, Homo sapiens
cgtgacgcggggggcggacgcgtgggtcgatgagtataacgggaaatcagtttggcaccaagctgagtacatctatatacatatatatatacgcgcacacacttgtacagaagttatgttgtggccaaggatatgtaatatacccctaggaaatggttcttacctctgggattttagaaggttagaatattttttcagagagaacagtggtactcaaaagaatgaaaggtggtccctacatttactgtattcatcacttaaaatttttaatttttccgagaactacaagtaacatttgaaccatgctgctgtaagtaccttaaacaaaaactcagtgataaccagtatttagtctattaaaaatgctctttttgaagaaaaaagttaggaagtctctgattagccagagtatagtatgagtcttcactgagaaatatggtgacccatatactttgtgaaaacctgggaaaatgcaagtgtgggtatgaagtgtagtgtacagtatgcatagaaacaatgtaattgaagtgtctatcttatagctataaactgacttatttcagaaattgtacagagttgagggggaaagtcaatacaggtaatatatttgcaaatcattaaaggatatggaacatccaaataagttacatttagaaagcaatttataatcaagtagtcaagctatatgaagctgtgccatctggattcaactaagaagggcccagaaaaaccgcacatacagtacatgcatacccaaaacaactaaacacaacggaactcgtcaactcaaaaaacctaccccaccaaacacaataaatctaacaaaagggaccaacacataggtacagaataatggcagtatcacagacaataccacggaaaacaaaagaggaaaaaaaaaaagaa

SEQ ID NO: 547076 - DNA, 140 bp, Homo sapiens
atgtgtgtgtatatgtcgtgaacaccctgagacacccattctctaaggggactgtctcactctgtactcccctggcccctcactgtgtgctgtcccctggatctctagaggcagtgaactgtgaggatgttggattggtc

SEQ ID NO: 547077 - DNA, 376 bp, Homo sapiens
tatgtgtaggtcacagtcttattctagtaacttagatgatggctttttagggtagactattaatattaaccaaaagatgactacaagtgacagtgaccaatggcaagctttgttcttatgtcgtaacttcatcagctgtctcagggttcaatactgacggcttttcttatctcatatttccataagagagttactgcatttctaaagtgttctttctttcatcatcttcaattcatcatttctcagatgataccagaaagccagagctctttctagaccacgtcacacatcacatcttgatgagctgaaatgccttttcaatgccgcaattttactgcggcaggcttcatggcctgtgccctttcaacatcttcct

SEQ ID NO: 547078 - DNA, 1241 bp, Homo sapiens
  misc_feature (284)..(284): n is a, c, g, or t
  misc_feature (321)..(321): n is a, c, g, or t
  misc_feature (377)..(377): n is a, c, g, or t
  misc_feature (1241)..(1241): n is a, c, g, or t
tccaagggtatatacccgtttatttaaaaaagtttacagtttccattatacccaactattaagaaggttatagctcagaaggaggctgtgtgtggtctccgtgttggacagaacgtgtgcctactagaatcatcacaagtgcaaggagaagagggtggaagggaggagcacgagggccgaggaaaaaataagcgataaaagagcttcagaattctcagttataggggctgtgggcgagtctccactgttttaactcttttgtctcagagtatattcacgaccanatatatgtgttcacccaaaatataccaatctctgtgngtaacatctaatgtgggcccatttctcttctcccaaaggccccaacgaggccaaanggagtggagtgtgtaaggcgctattaaatctcaagagagcccctgggactctctatctccctctcgagaagtgcagtgtgcggacaaaaacctgtggcgccttgtgtacgagtggccgcggtttctccctctctcttttctttcaagaggggggcttctcctctcccgcaaactctcaattccccgatatcccctttacaacgagagaacactccgccgcgagaggggtgtgtttcccccagcggggggcgccccagagaggaaaagagcgcccacccaaaactcctggttggggatttttcccagaaaaaagtctcccccaaagacagcacaagatgtgggcgaagtttctccgtgtgttgggccgcccccacaaatctcgagaggagcaaatttagaacacggtgcacgttcctcttccatcttctccacaatccacacgctgccgcgtgtggagaaaaagctccccccccatgtgttttgggcggagaaaacagtgcttcgagatcttaaaaaaagaaaacctcccttggggccgataaacacccttttttttctctcacaccaacgtggggcgcgttttataataccctttttttaccccaataaaagaaggactaccacccctttaggaaaacacccacaagcgcgagcaacaggggcggcgccccaaactatgtttttcgccctcatattctataaagagacagtcttctaagacaaacccacctattaaggtttctccccccccagtaaaaagaacctctttggtggggtgcgtttcccccaagaggaaaaaatctttttttggaagcccccccaaaacagaagaaaggcgccatttaacgcgaggaggacatattn

SEQ ID NO: 547079 - DNA, 801 bp, Homo sapiens
  misc_feature (33)..(34): n is a, c, g, or t
acaacttacaggctaagtagcgaggccaggtgnntaatggagcagttcggcggtcccgcgggtctgtctcttgcttcaacagtgttgggacggaacagatccggggactctcttccagcctccgaccgccctccgatttcctctccgcttgcaacctccgggaccatcttctcggccatctcctgcttctgggacctgccagcaccgttttgtggttagctccttcttgccaaccaaccatgagctcccagattcgtcagaattattccaccgacgtggaggcagccgtcaacagcctggtcaatttgtacctgcaggcctcctacacctacctctctctgggcttctatttcgaccgcgatgatgtggctctggaaggcgtgagccacttcttccgcgaatgtggccgaggagaagcgcgagggctacgagcgtctcctgaagatgcaaaaccagcgtggcggccgcgctctcttccaggacatcaagaagccagctgaagatgagtggggtaaaaccccagacgccatgaaagctgccatggccctggagaaaaagctgaaccaggcccttttgggatctttaaaccccagagttctgcacccaccgacacccccatctctgtgacttcctggagactcacttcctagatgaggaagtgaagcttatcaagaagatgggtgaccacctgacaaaccccaaaggctaggggccccgaagcttgccttttccaaaatacttcgaaagggtactctaacacggctaaagtcttttggcccaaaactctcaaaggcccctaaa

SEQ ID NO: 547080 - DNA, 901 bp, Homo sapiens
gcggaggctaggcgggcatctcgggcatagggactgctgtggaggacagcggggacgccgagctaagcagtttctctgagaaacccgcctggtaagtgtggaggaggcgggacactctgaagcccaagacgagaggtctgtagctccagccaaagaaaataaaccttagagagggagaaggaaaaaaaaatatccgatcgagctgttcctgagaacagcctgcagttggacatctacagagaggacaactaatgtgagtgaggcaagtgactgtatgtggactgtggagaaagtaagtcacgttgggcccgttgcaggacctggacgtgggttaggaacaggtgtcctttcagaggtgagagtgtcgagcaagggagacgtgaatgtggtctggagtgtgtccttggccttggctccacagggtgtgcttgcctctgcgtgcgccgtcagggagctcatccctgtggtgttctcgccagggtggggtacggggttgacactgaggagggtacacctgctggctggagcggcagagcagtggccttgattgtcttttgcacacgattttaaaaaccaaaaagcataaacatctggtccttcagcaatgctttctctgaagaaatactgtaacggaaggactttctccaagttaaccatcctgtgagcttgattgaggtacgggggtggcacgtggatacttacttgacctcagaggttaccccaagtccggggaagactcatcaggaggccacaggtctgcctataattagaccgcagttccagacacctgagggataacctggaagggcaatgggaatccaccccaagaattagacggaaaattcatgacggggtcccacacagagttagccagaaaggagaggcacacataggaaagccg

SEQ ID NO: 547081 - DNA, 869 bp, Homo sapiens
  misc_feature (33)..(34): n is a, c, g, or t
  misc_feature (426)..(426): n is a, c, g, or t
  misc_feature (439)..(439): n is a, c, g, or t
  misc_feature (447)..(447): n is a, c, g, or t
acaacttacaggctaagtagcgaggccaggtgnntaatggagcagttcggcggtcccgcgggtctgtctcttgcttcaacagtgttgggacggaacagatccggggactctcttccagcctccgaccgccctccgatttcctctccgcttgcaacctccgggaccatcttctcggccatctcctgcttctgggacctgccagcaccgttttgtggttagctccttcttgccaaccaaccatgagctcccagattcgtcagaattattccaccgacgtggaggcagccgtcaacagcctggtcaatttgtacctgcaggcctcctacacctacctctctctgggcttctatttcgaccgcgatgatgtggctctggaaggcgtgagccacttcttccgcgaatgtggccgaggagaagcgcgctctnttccaggacatcnagaagccngctgagatgagtggggtaaaaccccagacgccatgaaagctgccatggccctggagaaaaagctgaaccaggccctttggatcttcatgccctgggttctgcccgcacggacccccatctctgtgacttcctggagactcacttcctagatgaggaagtgaagcttatcaagaagatgggtgaccacctgaccaacctccacaggctgggtggcccggaggctgggctgggcgagtatctcttcgaaaggctcactctcaagcacgactaagagccttctgagcccagcgactttctgaagggccccttgcaaagtaatagggcttctgcctaagcctctccctccagcccataggcagcttttttaactatcctaacaagccttgggcccaatggaaataaagctttttgatgcaaaaaaa

SEQ ID NO: 547082 - DNA, 952 bp, Homo sapiens
  misc_feature (33)..(34): n is a, c, g, or t
  misc_feature (426)..(426): n is a, c, g, or t
  misc_feature (439)..(439): n is a, c, g, or t
  misc_feature (447)..(447): n is a, c, g, or t
acaacttacaggctaagtagcgaggccaggtgnntaatggagcagttcggcggtcccgcgggtctgtctcttgcttcaacagtgttgggacggaacagatccggggactctcttccagcctccgaccgccctccgatttcctctccgcttgcaacctccgggaccatcttctcggccatctcctgcttctgggacctgccagcaccgttttgtggttagctccttcttgccaaccaaccatgagctcccagattcgtcagaattattccaccgacgtggaggcagccgtcaacagcctggtcaatttgtacctgcaggcctcctacacctacctctctctgggcttctatttcgaccgcgatgatgtggctctggaaggcgtgagccacttcttccgcgaatgtggccgaggagaagcgcgctctnttccaggacatcnagaagccngctgagatgagtggggtaaaaccccagacgccatgaaagctgccatggccctggagaaaaagctgaaccaggccctttggatcttcatgccctgggttctgcccgcacggacccccatctctgtgacttcctggagactcacttcctagatgaggaagtgaagcttatcaagaagatgggtgaccacctgaccaacctccacaggctgggtggcccggaggctgggctgggcgagtatctcttcgaaaggctcactctcaagcacgactaagagccttctgagcccagcgactttctgaagggccccttgcaaagtaatagggcttctgcctaagcctctccctccagcccataggcagcttttttaactatcctaacaagccttgggcccaatggaaataaagctttttgatgcaaaaaaaagcagcttgagaggcacatccaaagcgctttaagtggtcacaagaagggcccagggtaactcaactctgggagggtcagctgg

SEQ ID NO: 547083 - DNA, 1024 bp, Homo sapiens
agcggagtcgtttcgcgtttccgtctggcgagcaggccatcaggtaagccaaggatgggtgcagtacaagtacactccaggagactatggatgaaagaagcagtgctgatgtcatgcgactttcttctgtagggtccgctgctggtgagttaccgccagtctctctgtcttcgtccacagggctctcccgggctcacatccacggtcctgaattaaagcgcggcacgaccgggggactatcaaggaccaaagtcaaggattaacgttaatatattatggacttacgtgtgacggcgtggttggacacgaggaacgcccagttttcctagagggtggcaacttatgggcagatgcctgtacgcgatcgattggatgttaaccaagtcgtaaaagtattgcatctgaagccgtatcgagatccagtatgcgagaggatgcgagcgtggactgccaactgtggggcgtcgtagcaggagtcactgaaattcttcactggggttcggtgagagattccacatacaagatattgagtgatggttaataccttcatttgacttccattaccgatatgatgctgattcaagaaggaatatcgctagacgaccccagtgggatcagcgggaaatcagtgccgacatagcacatgggagcattgcgtgggactggacattctggtcaggtccgaataggagcctgttgggcctttgggagaagggccagaagttttcatctatactaattgggtgggctcttctgcgcgtgggcgcgcttgggaagaaaggggggcaaagtactgtcttgcaagtgtaccaagcgtgtggcgcggattaaatattaagtaaaaggtcttgtgggaaaatgccattacattttacttaaggaaagtctagggaacagtccatgattctggcttaacggggtggttattaggactggtttaaaaattagtttggaagatgtttcttgtaatggctatggtgaaattaggagaagtgttacaggggcattatgttggaggaaagta

SEQ ID NO: 547084 - DNA, 1130 bp, Homo sapiens
gtgatccgcccgccttgggctcccaaagtgctgggattacaggtgtggtcacacctgtaataggccactgtgcccgggctcaatagttattttttctgcacctcctccttctcccaccctccaccctcaagcagggctcagtgtctgtggtgtccttctttgtgtccatgagttctcatcatttagctccctcttgtaagtgagaatatgcggtatatgagattctgtgcctgtgttagtatgctaaggagtaaaggtcccgcgggtctgtctcttgcttcaacagtgttgggacggaacagatccggggactctcttccagcctccgaccgccctccgatttcctctccgcttgcaaactccgggagcatcttctcggccatctcctgctgtctgggagctgacagcaccgttttgtggttagctccttcttgccaaccaaccatgagctcccagattcgtcagaattattccaccgacgtggaggcagccgtcaacagcctggtcaatttgtacctgcaggcctcctacacctacctctctctgggcttctatttcgaccgcgatgatgtggctctggaaggcgtgagccacttcttccgcgaatgtggccgaggagaagcgcgagggctacgagcgtctcctgaagatgcaaaaccagcgtggcggccgcgctctcttccaggacatcaagaagccagctgaaagatgagtggggtaaaacccccagacgccatgaaaagcttgccattggccctggagaaaaaagctgaaccaggcccttgtggatcttcatgccctgggttctgcccgcacggacccccatctctgtgacttcctggagactcacttcctagatgaggaagtgaagcttatcaagaagatgggtgaccacctgaccaacctccacaggctgggtggcccggaggctgggctgggcgagtatctcttcgaaaggctcactctcaagcacgactaagagccttctgagcccagcgactttctgaagggccccttgcaaagtaatagggcttctgcctaagcctctccctccagcccataggcagcttttttaactatcctaacaagccttgggcccaatggaaataaagctttttgatgcaaaaaaa

SEQ ID NO: 547085 - DNA, 976 bp, Homo sapiens
  misc_feature (33)..(34): n is a, c, g, or t
  misc_feature (320)..(320): n is a, c, g, or t
acaacttacaggctaagtagcgaggccaggtgnntaatggagcagttcggcggtcccgcgggtctgtctcttgcttcaacagtgttgggacggaacagatccggggactctcttccagcctccgaccgccctccgatttcctctccgccttggcagaagccctccgggaaccgactcggttcgtcgcgtgcatccatcctgcgtttcatgggaaccttggcacagcatacgattctccaggtggattagacgtccattcgttggcgcaatccaagccatgaagcctcccagaagtgcgatcacgaagagttattctcganccgaacgtgtgtgaggcatggcgtcaatcggtgctggttcgatcagtacctgcaggcctcctacacctacctctctctgggcttctatttcgaccgcgatgatgtggctctggaaggcgtgagccacttcttccgcgaatgtggccgaggagaagcgcgagggctacgagcgtctcctgaagatgcaaaaccagcgtggcggccgcgctctcttccaggacatcaagaagccagctgaagatgagtggggtaaaaccccagacgccatgaaagctgccatggccctggagaaaaagctgaaccaggccctttggatcttcatgccctgggttctgcccgcacggacccccatctctgtgacttcctggagactcacttcctagatgaggaagtgaagcttatcaagaagatgggtgaccacctgaccaacctccacaggctgggtggcccggaggctgggctgggcgagtatctcttcgaaaggctcactctcaagcacgactaagagccttctgagcccagcgactttctgaagggccccttgcaaagtaatagggcttctgcctaagcctctccctccagcccataggcagcttttttaactatcctaacaagccttgggcccaatggaaataaagctttttgatgcaaaaaaa

SEQ ID NO: 547086 - DNA, 92 bp, Homo sapiens
gtgagcttactgggtgccagctgccagaaagcacagatttgacccaagctatttatatttataagttatataaagtgtttcttactgtttgt

SEQ ID NO: 547087 - DNA, 990 bp, Homo sapiens
  misc_feature (33)..(34): n is a, c, g, or t
  misc_feature (802)..(802): n is a, c, g, or t
  misc_feature (860)..(860): n is a, c, g, or t
  misc_feature (954)..(954): n is a, c, g, or t
acaacttacaggctaagtagcgaggccaggtgnntaatggagcagttcggcggtcccgcgggtctgtctcttgcttcaacagtgttgggacggaacagatccggggactctcttccagcctccgaccgccctccgatttcctctccgcttgcaacctccgggaccatcttctcggccatctcctgcttctgggacctgccacgcttagcggtattctatgtggtaataacgacttcgcattcattgacgcaaagccgaacgccatggagctcccagattccgtggagagattatctccaccgcacggtggtcgtgcagacaagtcacaagagcgctggttgctagagtatgggatacctgcaggcctcctacacctacctctctctgggcttctatttcgaccgcgatgatgtggctctggaaggcgtgagccacttcttccgcgaatgtggccgaggagaagcgcgagggctacgagcgtctcctgaagatgcaaaaccagcgtggcggccgcgctctcttccaggacatcaagaagccagctgaagatgagtggggtaaaaccccagacgccatgaaagctgccatggccctggagaaaaagctgaaccaggccctttggatcttcatgccctgggttctgcccgcacggacccccatctctgtgacttcctggagactcacttcctagatgaggaagtgaagcttatcaagaagatgggtgaccacctgaccaacctccacaggctgggtggcccggaggctgggctgggcgagtatctcttccgccagggtttttccnattccagaacctatgagcatctacgagccacagcgacgtctgaagggcctccttgctnaagctaatagagggatcctgccataagcttctccctccagccaaaaggcagctttcgttaactatcctaatttctctcggagccaatggcgatncttagatcacctgcaggatgcagctgcatgccctcg

SEQ ID NO: 547088 - DNA, 1051 bp, Homo sapiens
gtgatccgcccgccttgggctcccaaagtgctgggattacaggtgtggtcacacctgtaataggccactgtgcccgggctcaatagttattttttctgcacctcctccttctcccaccctccaccctcaagcagggctcagtgtctgtggtgtccttctttgtgtccatgagttctcatcatttagctccctcttgtaagtgagaatatgcggtatatgagattctgtgcctgtgttagtatgctaaggagtaaaggtcccgcgggtctgtctcttgcttcaacagtgttgggacggaacagatccggggactctcttccagcctccgaccgccctccgatttcctctccgcttgcaaactccgggagcatcttctcggccatctcctgctgtctgggagctgacagcaccgttttgtggttagctccttcttgccaaccaaccatgagctcccagattcgtcagaattattccaccgacgtggaggcagccgtcaacagcctggtcaatttgtacctgcaggcctcctacacctacctctctctgggcttctatttcgaccgcgatgatgtggctctggaaggcgtgagccacttcttccgcgaatgtggccgaggagaagcgcgagggctacgagcgtctcctgaagatgcaaaaccagcgtggcggccgcgctctcttccaggacatcaagaagccagctgaagatgagtggggtaaaaccccagacgccatgaaagctgccatggccctggagaaaaagctgaaccaggccctttggatcttcatgccctgggttctgcccgcacggacccccatctctgtgacttcctggagactcacttcctagatgaggaagtgaagcttatcaagaagatgggtgaccacctgacaaactccaaaggctgggtggccggaggctgggtggggagtatctcttcgaagggtcatctcaagacgataaagctttgagccaggattttgagggccgtcttacagggttgctctcctcagcatagagagtacatccacactgggccggttttctgcc

SEQ ID NO: 547089 - DNA, 101 bp, Homo sapiens
acctgttgacacaaacagagcactactgaggccctagaagaaagcagctccagcttctactaaacaggctgacctggcgccagtcgatgtgccttcagcat

SEQ ID NO: 547090 - DNA, 114 bp, Homo sapiens
cacgagggcagataacaatttatgtttcgctgtcccccacaatggggagggatggactagatacttacttttaaaatatttgcacggaacgaactatggtccacacgtgtctgc

SEQ ID NO: 547091 - DNA, 605 bp, Homo sapiens
agagtgagcctttcgaaagatactcgcccagcccagctccgggcacccagcctgtggaggttggtcaggtgtcacccattcttcttgataagcttcacttcctcatctagggctacgagcgtctcctgaagatgcaaaaccagcgtggcggccgcgctctcttccaggacatcaagaagccagctgaagatgagtggggtaaaaccccagacgccatgaaagctgccatggccctggagaaaaagctgaaccaggccctttggatcttcatgccctgggttctgcccgcacggacccccatctctgtgacttcctggagactcacttcctagatgaggaagtgaagcttatcaagaagatgggtgaccacctgaccaacctccacaggctgggtggcccggaggctgggctgggcgagtatctcttcgaaaggctcactctcaagcacgactaagagccttctgagcccagcgactttctgaagggccccttgcaaagtaatagggcttctgcctaagcctctccctccagcccataggcagcttttttaactatcctaacaagccttgggcccaatggaaataaagctttttgatgcaaaaaaa

SEQ ID NO: 547092 - DNA, 525 bp, Homo sapiens
ttcggagggtaccacgagggagggtgatagcgtatctgaggataaaaggcagggggtgtacgcggtctctgggaggacatcgagacgcgagcttaagatgagtggggtaagaacccgagacgccagtgccatgaaaagcttgccattggccctggagaaaaaagctgaaccaggcccttgtggatcttcatgccctgggttctgcccgcacggacccccatctctgtgacttcctggagactcacttcctagatgaggaagtgaagcttatcaagaagatgggtgaccacctgaccaacctccacaggctgggtggcccggaggctgggctgggcgagtatctcttcgaaaggctcactctcaagcacgactaagagccttctgagcccagcgactttctgaagggccccttgcaaagtaatagggcttctgcctaagcctctccctccagcccataggcagcttttttaactatcctaacaagccttgggcccaatggaaataaagctttttgatgcaaaaaaa

SEQ ID NO: 547093 - DNA, 921 bp, Homo sapiens
  misc_feature (33)..(34): n is a, c, g, or t
acaacttacaggctaagtagcgaggccaggtgnntaatggagcagttcggcggtcccgcgggtctgtctcttgcttcaacagtgttgggacggaacagatccggggactctcttccagcctccgaccgccctccgatttcctctccgcttgcaaactccgggagcatcttctcggccatctcctgctgtctgggagctgacagcaccgatttggtggttaggtcctgcttgtcaaacatcatgagctcccagattcgtcagaattattccaccgacgtggaggcagccgtcaacagcctggtcaatttgtacctgcaggcctcctacacctacctctctctgggcttctatttcgaccgcgatgatgtggctctggaaggcgtgagccacttcttccgcgaatgtggccgaggagaagcgcgagggctacgagcgtctcctgaagatgcaaaaccagcgtggcggccgcgctctcttccaggacatcaagaagccagctgaagatgagtggggtaaaaccccagacgccatgaaagctgccatggccctggagaaaaagctgaaccaggccctttggatcttcatgccctgggttctgcccgcacggggaaggaccgcatctctggaattcctggagatgcattctagatgagagtgaagtttcagaagatggtgacactgaacaacttcaagtggtggcgagtggtgggatattatcgaagtcatccaggagataaagcttgagcggatctgaggctgaagtaagggtttggtagctcctcagcaagggtttaattaaagtggcatggaaagttggcaaaaaaaaacattgggggcgcaataaaatggggcaagaagagtttttgaagatagggcaaagcaagggaagtgttaagtaggggataatgagaagaaagatag

SEQ ID NO: 547094 - DNA, 103 bp, Homo sapiens
tctatacgaggataatggtatcatcaaggtccttcagagaacatccctgtgaattactcttgcttaagtgtaagcgatgctgtaacattattgaatgctctgc

SEQ ID NO: 547095 - DNA, 397 bp, Homo sapiens
  misc_feature (317)..(317): n is a, c, g, or t
  misc_feature (346)..(346): n is a, c, g, or t
  misc_feature (353)..(353): n is a, c, g, or t
  misc_feature (386)..(386): n is a, c, g, or t
tgatgctaagtgaaaaagtggtcactaaagactacaagcgtgtgccaccatgcctcgctaatttttgtattttttagtagagacaagagtttgccacattgcccaggctggtctcaaactcctgagcccaagccatctgcccacctcgtcctcccaaggtgctgggattacaggggtgagccactgcaccctgcctatttatttacttttcttagagatgggggtcttgctttgttgcccaggctggtctcaaactcctggcctcaaaagatccacccacctcggcctcccaaactgttgggattacaggcatgagncatcttcacctgggccagtaatgtatttnactccangaacaacttcatggaatttagggaactgttatnaattccccctt

SEQ ID NO: 547096 - DNA, 334 bp, Homo sapiens
  misc_feature (8)..(8): n is a, c, g, or t
  misc_feature (38)..(38): n is a, c, g, or t
  misc_feature (258)..(258): n is a, c, g, or t
  misc_feature (260)..(260): n is a, c, g, or t
  misc_feature (263)..(263): n is a, c, g, or t
cccccgancgcacaatgatcggcgccgacaacagcctnatgaaaaagtgctcagaagtcaataatgtttgatgtattaatacactaacctgtgtagccattggcaaagcatatgaatcatacctgagtcaaagtgttccgtataactacggagagttctaattgaacttttaatttatcattattttccttgatcgatcgtttttgtctagacatacgttttctcctatctagggattattatatcacttcataacancncancccccggtatctactagtcacataatgagggctgtttgaatagtctttttgaggggtcattatataattct

SEQ ID NO: 547097 - DNA, 101 bp, Homo sapiens
tgaggatccttcgactgcaggtggactgacccagcccttagagccaatccatatctgcagcaggtctcaatggtgaacagcctccagcgttgcgggtcgca

SEQ ID NO: 547098 - DNA, 218 bp, Homo sapiens
  misc_feature (72)..(73): n is a, c, g, or t
ggttgatttgctccccctagtgcagcaacccccacacccagcaccagggcccccagaactttccttccaggnntactccctgggaacaagtcaattgggctgatcactaaactcacatttcttggacctgaggagcctgtttctctcacggcctcacctcggctgagccgcagtagttcttcagtcgcaagctttatgttctcacccagctaaagctg

SEQ ID NO: 547099 - DNA, 657 bp, Homo sapiens
gagcggggcggggcgggctggagcggagcctgagcagtgactgggcgccatcttgtcgctgcagctggagtcggtgcctgaggttgcagccgagagtgtgcgccagcccgcggaccagcacgaagcctcgtttcccgccgatcgtcgtccgcgccatcgcaccagggtgtcagaccccgtgacatgagcgctctcgcgttgtcagcggtccacctgagcgccgtcagaatccggcgccggctccggtcctctgcagagcacggaccgcgggggacgagtgaacgggagcgagtacccgtggctggcccaaggacagaacatgcagagcgccgtgtcgctgctggctcgttccttggctcggtgcatcacgtgtgcaccgatgcccgtgtgcagtggcagcagcgtgcgtgtgcaacaccgtggggcagaatatatgagatggtcggccaagcggggtagccaagtccgagggtgacaaatttccacacaatcacgcgcgtgggacaagctgtggtggaacgggccatggggccgggcaacgattgcgggagcgacgtgaagaaaggcgaccgtaaaggcccgaaacatgtgtacacgaagaagggggaaccggaaggcagggatgccggttccgttcgatcaatgggggaaggggag

SEQ ID NO: 547100 - DNA, 402 bp, Homo sapiens
  misc_feature (59)..(59): n is a, c, g, or t
  misc_feature (71)..(71): n is a, c, g, or t
  misc_feature (98)..(98): n is a, c, g, or t
  misc_feature (114)..(115): n is a, c, g, or t
  misc_feature (120)..(120): n is a, c, g, or t
  misc_feature (122)..(122): n is a, c, g, or t
  misc_feature (144)..(144): n is a, c, g, or t
  misc_feature (148)..(148): n is a, c, g, or t
  misc_feature (154)..(154): n is a, c, g, or t
  misc_feature (161)..(161): n is a, c, g, or t
  misc_feature (181)..(181): n is a, c, g, or t
  misc_feature (226)..(226): n is a, c, g, or t
  misc_feature (255)..(255): n is a, c, g, or t
  misc_feature (307)..(307): n is a, c, g, or t
  misc_feature (335)..(335): n is a, c, g, or t
  misc_feature (363)..(363): n is a, c, g, or t
  misc_feature (375)..(375): n is a, c, g, or t
gggggggtagtttgaagtagaccttcacggggtcttagtttatccactgttgtgcagtnagggttccattnttgttgtttcgggctaacagtcccttnctttcacctttttttnntagtntnttgagggccagagatgcactgntttntttttnttttttnttcacagtttcctcagattnagcagggtgggaaacatttgctcaatagactcctgctttgtttcntgcttcttttgtttctacctgctgctctngctttgtactttctctgcggggctttgggacctcaatcttgttctgtgcttnttcagttcgttcttggcgggcggtcttnttcttggtgtttggtatctgtctcttcnggggtggggctncccccttgttggttgctttttggcctt

SEQ ID NO: 547101 - DNA, 943 bp, Homo sapiens
ggaaatacaacagatgatgaagaagaagaggaggtggaggaagaagaagatgatgatgaagattctggagctgaaatagaagatgacgatgaagagggtttcgatgatgaagatgagctttgacgatgaacatgatgatgatctctggatactgaggatatatgacattcggcagaccttcagcagcgagagcaggaagctcagcgcaaccaagaagctagctgcaacgaacggtctgcaggcggctctgttgatgctggagctcgggagtaacgctgatccagatagacctgccgagggctgggcacagctttatcggagcacatggcactacatgggtacgttggaaagtactccagatgagaactggattcagatgccataccctgacagcaacgccatgagcgcgtagcctgatcatcttgacctacagcctcggctctgtcgacccgacacacgctggcctcctagcaagcatcgcagcattgtccccaagacggtacacgtcacatatacacaggcaacgcattcctatggatacagatgtggacagcgagatatctcacaaaacacgacggcccagatcaatcgagtcgagcaagcatgcccacgccccggcaaccccgccacacacgaacccgagaagacatgcatacggcaaccaggaccggaacactgactcaaagagcatccgcccaccgggacccaggaagcagaccgcgcacagaaacaccacgcacacaacacgacacactgggtaaaggcccggacgaccacgccccccgaggggcccacccaccgcccttggcccacacaaagcccgaacaacggcgcgaacaacacaactgcgcccagcccggagagggacacacagcaggcgtagcacagaccccgccgccaaacgcaccagtagcagcaccccaaccggagaacgggaacccta

SEQ ID NO: 547102 - DNA, 203 bp, Homo sapiens
ctcgtgtattgtcaggttgtattgcgcgacagctcctggcggatcgcccggtaaccggctcgttgtggatcgcggcaatttccagatagttgttgcgatcgtcgtccagtacggtgaacaaccggaaatcgcgcatcactttgggcgacaggaactggctgataaagctctcgtccttgaagtcgcgcatggcgaagtgcaag

SEQ ID NO: 547103 - DNA, 126 bp, Homo sapiens
gcgcttaaaaaaaaagaagaggaaaagaggggtgggtagttcttcaatttcaaattctttcagtgcactgtaattaattgggaaagtataacgtggaggagtagcagtaattttattttatttttc

SEQ ID NO: 547104 - DNA, 430 bp, Homo sapiens
cgatttgggcgaaaggcataagctgcatgcggttggccgctgacagaatggccacgtcgccggtgccgccttgaccgcaacgacaggcggccacgatgcccacgtcgatgggatacatgccgatcagccgccccacgccaaagccggtgaccatcattgcggccacggtggcgacgatggtgaccacgttctccaccgtgaaggcgccggcgagcttgtcccagggcgtcatggcgacgccgatggcgaacagcagcggataggtcacggcggtgcggaagaacttgtagaccgagaaggcgcccgcctcgaggctgggggaaaaaaccctgccgagcttcaacaagaccgcgatgaacagcatggtcaccggtcccggccaggcccacagcttctgcgccaaggcgcccacgaggtagagcgtcacggc

SEQ ID NO: 547105 - DNA, 852 bp, Homo sapiens
ttgcaagaggaaggatggaagggacaccctgccccatttcatgcctgcattttgcccgtcctcctcccgcacaagtgccccagcgctgggacctaagggctcttttgcctcccatactcccattccagggacctagatctggggcctgaactcgtcctgccccatgatatcagggggccccagcttctcgtttgggcgtgtccctggcgtgccatcacatgcccatttccagtctggctctaggtatgtgatggtgggtatgagactttagggggcttggctcagcgtgggtgccagacttgtacggtgctgagaggcctgccaaggggcctgggcgccgtgcagtattcttctttcccttcttgacctgtgtcatcagggactggctcatttagtgccaagtgtcgcctcaggcccaggtttgagaagccgccgttcgtgacttcaatgagggcgtgaacttcagaggatcagcttcatgtcattcccatcagtgctcccagagcgtgatgaccagccaccaggaggtggacgggagaagcgcctcgctcccgttcccttccttctttccaggccctttgtcttgccaatgtccccgctggtggcctttcaggggcatcgactcttgcccaggactgtccacggggcctgtggcgggctgatacctgagttccggccgttctgcctccattgctgtgggcaccctagtgctccttcgagaggggcttcgggaggctgtgctggtcctctcgtgcccgtctagctcgctctctgaccggggggtctcaatgtcggcatcttcggatccgtgtgcggccctactgactggtcaaatgcgctgtgcgccgtcgg

SEQ ID NO: 547106 - DNA, 707 bp, Homo sapiens
  misc_feature (279)..(279): n is a, c, g, or t
  misc_feature (288)..(288): n is a, c, g, or t
  misc_feature (290)..(290): n is a, c, g, or t
  misc_feature (307)..(307): n is a, c, g, or t
  misc_feature (315)..(315): n is a, c, g, or t
  misc_feature (322)..(322): n is a, c, g, or t
  misc_feature (331)..(331): n is a, c, g, or t
  misc_feature (369)..(369): n is a, c, g, or t
  misc_feature (372)..(372): n is a, c, g, or t
  misc_feature (388)..(388): n is a, c, g, or t
  misc_feature (396)..(396): n is a, c, g, or t
  misc_feature (401)..(401): n is a, c, g, or t
  misc_feature (405)..(405): n is a, c, g, or t
  misc_feature (417)..(417): n is a, c, g, or t
  misc_feature (422)..(422): n is a, c, g, or t
  misc_feature (444)..(444): n is a, c, g, or t
  misc_feature (449)..(449): n is a, c, g, or t
  misc_feature (456)..(456): n is a, c, g, or t
  misc_feature (464)..(464): n is a, c, g, or t
  misc_feature (473)..(473): n is a, c, g, or t
  misc_feature (476)..(476): n is a, c, g, or t
  misc_feature (484)..(484): n is a, c, g, or t
  misc_feature (493)..(493): n is a, c, g, or t
  misc_feature (497)..(497): n is a, c, g, or t
  misc_feature (506)..(506): n is a, c, g, or t
  misc_feature (512)..(512): n is a, c, g, or t
  misc_feature (524)..(524): n is a, c, g, or t
  misc_feature (591)..(591): n is a, c, g, or t
  misc_feature (606)..(606): n is a, c, g, or t
  misc_feature (656)..(656): n is a, c, g, or t
  misc_feature (661)..(661): n is a, c, g, or t
  misc_feature (664)..(664): n is a, c, g, or t
  misc_feature (668)..(668): n is a, c, g, or t
attttgtttataaatgtcatcatcatagtcttttaatattttacataaaaaactgtatacacagcttatagaacttttatgtaaacatcataagctcaccattttgtcatttgtcagtttatttaaaaaataaaaaacaagacaacaatttagtagaagtaccactgggagggaggggaggggaaaaaaggatatacaggggcaggtgtattctctgtacagaggtgcagagaaaatttcacatagctttagagaatgccttgtggaaaaaaaaaaaanaggccccantncttgttactgccctttntcaaaacngtgtgcntgacctgcncaaataaaatcccaaaacagtgttgccacattcttcanggnaacaaagcaaaatttngtgggttnctttncccnctccttgttaanagtcnttttttaaaaacatcagaggtngatgnggttacngcgtacangtgtggtcngantgctactntcgtatgcnaatnacgagtgcnttaagngtcaaacaatgnaacaattgtccaaagaataaaaaaacaaattttagcctttaaataaatcaaataacatcagattctngggctgaacaatttncacttctaggacaggcacaaagttcgcttatggcaaaaacaaccccacancgcanccncccncccccctccggtagcgggtggagggttcgcagcgggctg

SEQ ID NO: 547107 - DNA, 1106 bp, Homo sapiens
agcggagtctttcgttcgggccctaggattcggtagccccgaacgtgtgggctctctccagtaccagactcatttcagtagccagcctttgggaagatcgtagtgaatacctcggtctcttagccacagggatagaatggcgggcctggatcggagccgctgctgcctgttgaagcttcttcggtatgctggctgattcaggtggtcctccccttgattcgagtctacaatagcgggttgggtgcaataaattgcgggattgctttgtgtagagtattttggggtcatttattttactttgctgaaggatccgaatttaatagacatacgactctaatttattcacaatgggaaacaaatatgcagaaacatatactcgcgtgtacccttcagattaaatatttaaattttggacatgcaagaaattaaattcgaaaataatcaattttgttggggattataaagcaactataaattacaattctatcaaacgagcgggcgaaggaaagacagctgggaatcgatccaagatatgcagcactagaatacgcagaggtgtaacaatggatatgctccgaatggtttgtgacaaagatataaaaacggaaaattgaatgcgatcccatgcttaaatgaatgaaatgacttacttgtatcgatgaacaatgccgacaggacaccaacgatgaggattccttatcaatgcatcgacgagatttctatcttaaatgagcaacttagaatggtgaacggaccagggggaaattaatggatgactatattctaattctaatcttgaggttaattaccaattcgcgcagcgattgaacggactggattggggagggtctccctggttttttaaaacaagccacaagccaagcaaactcaatggtctctggtaaattcggggcaaaatcctaaaatttggcttaactttggtggaggtattttggacttttgcagaaacatggaggggcacccttgtttccaggggggttttggagaccaggacttttgaattaggaggtgaatcgggtttacaaaggaatgatgttttgggaggggcaaagtttgtggggaagaaaagccctttaacgcgggga

SEQ ID NO: 547108 - DNA, 468 bp, Homo sapiens
  misc_feature (398)..(398): n is a, c, g, or t
  misc_feature (406)..(406): n is a, c, g, or t
  misc_feature (435)..(435): n is a, c, g, or t
ggagtcggtcaccagccttcagtaaacggccttccagcccgccaatccccactttgagatcggtgctgcatgagcccattaccggcggaacatcaataccacccgcgaccgccagataactgcgcatcccgtgctgcgggcgtttaagcgttaaacgctggcctgctttcatcggcaatcgccagccggtccagacggcattatcatccagccgcgcttcgcaaccggcacccgtcagagcaaaccacccatcagtttcgaactcaacagttaactgaccgagcgtgatctccagcgcgggggcattggcgtcattacccaccagtaggttagcaatgcgtaacgcgggcatatccagtgcgccgcagtggcttgatacccgactggcgaaaaccgtnacgaccgncatcctgcacagtggtattacatgcccgnacggataatcttcagcataattccctccttctg

SEQ ID NO: 547109 - DNA, 122 bp, Homo sapiens
taatgatgtgtaaaatatatatcataatattgtgtatgtatatatatcatatatatttgtatatgtgatatagtgtatatatagcatatgtatatatttgtataccctatatatatttgtat

SEQ ID NO: 547110 - DNA, 434 bp, Homo sapiens
  misc_feature (359)..(359): n is a, c, g, or t
  misc_feature (420)..(420): n is a, c, g, or t
atcagcataaaacctgggcatcaagtcctccagggtatggctggatttaagcaggtacatctggaagggtcgaaaaatcccttcagatcccagaccggatccctcactttcctcaaaaaattttggtattaccaggggaccttccactccaggttcttccttcgggtcacggtccaggaggacggtaggtggacttccaaaaatcccatggtctcgtcctttaacttcctcggtttggtccctttccagtggattcccaagggcttcaaaaagggcagtcaatccattcagagagagaggggggatttcctccaggtctccagcagacagatctctggctccagtaaagccaattcggntttcctggacctttaattttagttaaaacatacctaatggtgcggacctaaaggtgcggangggtcccgagctcg

SEQ ID NO: 547111 - DNA, 186 bp, Homo sapiens
cctaatcgcatcacctcttgctatactgatttagaaaggtgttcttcttctacttcttttttttctttaaataggtttagggtatttggtgatatttattttttttcctggtgggggcaaataagtgctcccaaaatgggcagccccaaggcctaatttaaatgtaagcctatcaatgtcaatgta

SEQ ID NO: 547112 - DNA, 672 bp, Homo sapiens
atacaccagcatgtacaccccgctgacattgtcagacatccccccagtatattacaaataatatcaaaaggtgtacacacattgtgacattagtagtagtataccgctagtatgttgtgaataattatatcagggtgtagacacctgttacattaggagtaacatccccctagaatattaccaatgatatcacagggtgtagcaccctttgcgactttagaaagtatcatccccctagaatattaacgagtaatatcacccccatctcccacaatggatattacgaaccatatcacaggggggtggacaccccccacaatatggcgagtaatatcaccctactctccccgcctagatactacgaaccacttcccctgtaaagacacacatagacttaaaataatgggatgaaaagatatatttcatgtcagtggaaaccaaaaaagagcaggagtagctatacttgtatcataccaaaatagatttgaagacaaaaactataaagacaaagaggcccaggcgcagtggctcacgcctgtaatcctagcactttgggaggccgaggtgggtggatcacctgaggtcaggagttcgatgccagcctggccaacatggtgaaacccaaatctattaaaaatatccaaatagccaggtgtggtggttcaggggatc

SEQ ID NO: 547113 - DNA, 1077 bp, Homo sapiens
agtagcctgctgatgctcccagctgaataaagcccttccttctacaatttggtgtctgaggggtttgtctgcggctcgtcctgctacatttcttggttccctgaccaggaaacgaggtaactgatggacagccgaggcagccccttaggcggcttaggcctcccctgtggagcatccctgaggcggactccggccagcccgagtgacgcgatccaaagagcactcccgggtaggaaattgccccggtggaatgcctcaccagagcagcgtgtagcagttccctgtggaggattaacacagtggctgaacaccgggaaggaactggcacttggagtccggacatctgaaacttgagaacatcaccaccctgaagccagagactaacactgcaggactcagcaggactatttaagaaacaactgaggcatcagaccaactttccccacaagtcctcggatctttcctgccatgctgatgccatatattccaacgtgatcaacctggctccccagaaggaggacgactttgctgtctacaccaacatgcccccttttcatcaccccaggaggacattgccagaccaagtggaatatgtctccattgtattccactgatgggaagctaatgagatgctcagagtgggggtcagacctggccccagctgaatcttggcataccctttgctttagatttatgtgtgtgtttaaaaaaaaaaaatacataggccaggcacggtggctcacacctgtatcccagcactttgggaggctgaggcaggcagatcaccaggtcaagagatcaagaccatcctggccaacatggtgaaaccccgtctctactaaagatacaaaaattagccaggtgtggtggtgcatgcctgtaatcccagctacttggaaggctgaggcaggagaatcacttgaacccagggggcggaagttgcagtgagccaagatcacaccgctgcactccagcctggcaacagagtgagactccatctctaaaaaaagtaaataaataaaaataaaacgtaaaacatattctgatggaaacaaacaacaaaaaacaaacgggggg

SEQ ID NO: 547114 - DNA, 215 bp, Homo sapiens
gtgagtcagatgagaccatttctttctgggagtcctggcggtttaataaggctgtcatgtaaacccacgagagaaagattgtctcgtgcacacatgtagtgtcccggatcactccaggatcacccgtcttccgagacctaatgaggcatgatggagagaccaccgattatgtcctctcacacagagatacttgatcctcctacatagaccagttg

SEQ ID NO: 547115 - DNA, 836 bp, Homo sapiens
ctgcttccttacttagaccccacacaaagggtggtgggagaaggcgggggtcagatctggaggaaatgcctatgaaaactgagatctagggcttgtgcagcaagaactcagcattctacttgctgtcctgtagggacagcccaatgccttgttttgtctttggaagtccctggtgcccagccatctgcctctaaccagggttctatctctaaaggatctttcctgccatgctgatgccatatattccaacgtgatcaacctggctccccagaaggaggacgactttgctgtctacaccaacatgcccccttttcatcaccccaggaggacattgccagaccaagtggaatatgtctccattgtattccactgatgggaagctaatgagatgctcagagtgggggtcagacctggccccagctgaatcttggcataccctttgctttagatttatgtgtgtgtttaaaaaaaaaaaatacataggccaggcacggtggctcacacctgtatcccagcactttgggaggctgaggcaggcagatcaccaggtcaagagatcaagaccatcctggccaacatggtgaaaccccgtctctactaaagatacaaaaattagccaggtgtggtggtgcatgcctgtaatcccagctacttggaaggctgaggcaggagaatcacttgaacccagggggcggaagttgcagtgagccaagatcacaccgctgcactccagcctggcaacagagtgagactccatctctaaaaaaagtaaataaataaaaataaaacgtaaaacatattctgatggaaacaaacaacaaaaaacaaacgggggg

SEQ ID NO: 547116 - DNA, 241 bp, Homo sapiens
gtatccctctccgtataggtgggctggttgaagatgaaatcccactgagtgagggcaagtccagcacccgtgggtgccagtccagaactggcccatctggagaccccctgcagaatcatatgggcttggatttggcatattctccacagacagggttcaaggctgatggtacataaagcctggtacttgactttcgatcaagatcagctgccttaagtactctacattaccacaaatgatc

SEQ ID NO: 547117 - DNA, 862 bp, Homo sapiens
  misc_feature (13)..(13): n is a, c, g, or t
ttataaattatanagcgtactcatttcccctgtgtcttcctgggaatttaacttagtctcagaggcccaatgggctgagtgtggtggattttgcatttcaaagttaagccctaaacccagcaaacaaccaagtaaagatggttattaacccaactcagactgactctgagtttatccatttttctaggactatttaagaaacaactgaggcatcagaccaactttccccacaagtcctcggatctttcctgccatgctgatgccatatattccaacgtgatcaacctggctccccagaaggaggacgactttgctgtctacaccaacatgcccccttttcatcaccccaggaggacattgccagaccaagtggaatatgtctccattgtattccactgatgggaagctaatgagatgctcagagtgggggtcagacctggccccagctgaatcttggcataccctttgctttagatttatgtgtgtgtttaaaaaaaaaaaatacataggccaggcacggtggctcacacctgtatcccagcactttgggaggctgaggcaggcagatcaccaggtcaagagatcaagaccatcctggccaacatggtgaaaccccgtctctactaaagatacaaaaattagccaggtgtggtggtgcatgcctgtaatcccagctacttggaaggctgaggcaggagaatcacttgaacccagggggcggaagttgcagtgagccaagatcacaccgctgcactccagcctggcaacagagtgagactccatctctaaaaaaagtaaataaataaaaataaaacgtaaaacatattctgatggaaacaaacaacaaaaaacaaacgggggg

SEQ ID NO: 547118 - DNA, 817 bp, Homo sapiens
attttccttaaaatttagacttgcacagtaaggacttcaactgaccttcctcagactgagaactgtttccagtatatacatcaagtcactgagagaacatcaccaccctgaagccagagactaacactgcaggactcagcaggactatttaagaaacaactgaggcatcagaccaactttccccacaagtcctcggatctttcctgccatgctgatgccatatattccaacgtgatcaacctggctccccagaaggaggacgactttgctgtctacaccaacatgcccccttttcatcaccccaggaggacattgccagaccaagtggaatatgtctccattgtattccactgatgggaagctaatgagatgctcagagtgggggtcagacctggccccagctgaatcttggcataccctttgctttagatttatgtgtgtgtttaaaaaaaaaaaatacataggccaggcacggtggctcacacctgtatcccagcactttgggaggctgaggcaggcagatcaccaggtcaagagatcaagaccatcctggccaacatggtgaaaccccgtctctactaaagatacaaaaattagccaggtgtggtggtgcatgcctgtaatcccagctacttggaaggctgaggcaggagaatcacttgaacccagggggcggaagttgcagtgagccaagatcacaccgctgcactccagcctggcaacagagtgagactccatctctaaaaaaagtaaataaataaaaataaaacgtaaaacatattctgatggaaacaaacaacaaaaaacaaacgggggg

SEQ ID NO: 547119 - DNA, 148 bp, Homo sapiens
  misc_feature (83)..(83): n is a, c, g, or t
gtctctctgatggtctctgaagcaaactgcgggcgatgaggcaaacaaagtgctgagacattctgttgaagacaaatgctacncaagaaaaaatggacagagccatgaggagctgatgaatctaattcagcgaatcagaaactttttt

SEQ ID NO: 547120 - DNA, 132 bp, Homo sapiens
agatcgaaccgagctggtacccgctcacacatgcaccgtattgtaattaaagcaaatcattgtttaaaaaggcagttgcaaaaaatgtttgtggtcttttataattctcattaaaagaatatctggcaaatt

SEQ ID NO: 547121 - DNA, 149 bp, Homo sapiens
tcataccaggctaagttactctcaagtaaatcggactacatgtttcacacacatcaggttattttcttagtttttattttcgtagagattgattttcgctataatagcccaggctgttctcaaactcctggcctcaagcaatcccccag

SEQ ID NO: 547122 - DNA, 1215 bp, Homo sapiens
  misc_feature (247)..(247): n is a, c, g, or t
  misc_feature (347)..(347): n is a, c, g, or t
  misc_feature (413)..(413): n is a, c, g, or t
gatcaagctaggggggtttgctatggtgacaggttcaggcacgcgctgggcatctgaggttgatcaccgtctcaaaatgggcaagtcacgacagatggccatcgatcctctcacgtaattactccagataacatatctgcccaactcacttgcagaggagtggtctcgcaagagtatcgattgcaacaatacactgagacgaggggacgctgcagtgggggagaacgatgggtcggcatgcggtggncttggacttcgtcacgagcctagtagggatgattttgccgtgactggaatgatatgggtgcattgcctatggacttcagtatagcattgcatgactgggnagcgagggtcagatgcgagtcatcgcgaggacggcactgctctattggtgagtaagcgaacatctnccacgtaaagtctgcgggaaagaagggtatggtactcctatatgaatgctctctctgtctcctctctatcttctgtgagtctttcgactatgggggcacgtagatgtgtgcgtgtccaaattgccccctcaccataggaaatgtgggaagcgcgagacatagacgccatcaaagtgtcctgtctcgtggggcacgcaaagaacacagtgtctgagacagtgggggtcacgtaaagtctcgttccttgggagaagggacctggtctgacgcgccaaagttgcaagtacacaccacttggcattctgggccacactgttggtcacggggcccaggccaagagggcttggcaccccagtctgtttgaatccaacatattggccgaaattttcaatactctagcgagggcgacacggttgcgcgggctacttggccaccataggaggctgtacccccccaattattaaccccaaggcggggaatcctctcttacttatggaaaaagtgtctaacccaggccctggttgggcagataggctcctggtgcgggcaggggacctttcccttttacaaaaggcttggcgtgggcaagggggggggcgggccccaactagtgttcgggttccccttcgagccaaaagtctccctgggccgcaagggatcctgtcatacaaaacccagggcgtgggggtccgaaggcaataaaccggtccccaacgcctgagcctcccccaatgcggactgtggccgtggggggaccccggggaaaaattccccccgaggaacgaggcattcggagcccaag

SEQ ID NO: 547123 - DNA, 376 bp, Homo sapiens
gagctctggtaccgttgcatgttggttgtccgaacttgcatccctgtgtcatgtctggtcatccacccccatctctgtgacttcctggagactcacttcctagatgaggaagtgaagcttatcaagaagatgggtgaccacctgaccaacctccacaggctgggtggcccggaggctgggctgggcgagtatctcttcgaaaggctcactctcaagcacgactaagagccttctgagcccagcgactttctgaagggccccttgcaaagtaatagggcttctgcctaagcctctccctccagcccataggcagcttttttaactatcctaacaagccttgggcccaatggaaataaagctttttgatgcaaaaaaa

SEQ ID NO: 547124 - DNA, 340 bp, Homo sapiens
cccgggaaaaggtttttaaggggggttttttcccccaaaggggcccttttgccattgtattccgggggggaaaaaaatttttttttcccggttttgaacccttttaaaaatcccaagggtactttggaaggtggggggaaaaccaaattattttgccccctaaaaccaaaaaaagtaaaattttttggggccccccccctggggggagacaaaaaaaaaattttttttaaattttgtaatttgctaccttattttgggttagtaaaaatgggcccggtgtttggttttttttccaccaggaaatttggggtggcccaaaaaacaaaggcaagggggccca

SEQ ID NO: 547125 - DNA, 547 bp, Homo sapiens
caccccaagctcgtaatgatgcagtagggggacacatagaccgcacatcacaccacacttgacaaggcgtggcgcgctagagcacaccatgggagtagagaacaggcctggagacgcaagagctcgcgtttgtagtgcatgccttgcgaatcgccacctcggcggtgtcatcgccctcggcgacgggcacacgcctccatcatcatcgctgacattaccgtggtatgacatcgaactttcctatgatcgacagtagatgtggaagcttccactcagatgagagactgcggtcgcacacacctggactcgaactcgtggcacatggctagagtaggcgccggacgtctgatctggacgaggattctggtggaaaggctcactctcaagcacgactaagagccttctgagcccagcgactttctgaagggccccttgcaaagtaatagggcttctgcctaagcctctccctccagcccataggcagcttttttaactatcctaacaagccttgggcccaatggaaataaagctttttgatgcaaaaaaa

SEQ ID NO: 547126 - DNA, 455 bp, Homo sapiens
aaaattcttttaaatctgaggtggtcccaggagtttttgaccagcagtgatacggaatgaaatgtgtgcaacactgtggatttacaggtaggaacacagaggaggtggtaatttgccccatgtttcaatgttgtgtctgaattccaagagcatggagcttgcaaacagcctgttgcgggacctagatagaaggaactacgaattccgcaacacgattgctgtcgccccaccgaaaatggacctgacctggagcaattataggctttgagtaatggagcaaggacctgtgaacttgatatacccgcttggtccacagcactcgttacctactcacagaaatgagcccactgaacgagagactgatggcttacgaccgtttaagatgcaagactgaaaacatcttttagaccagtgtttaagacctccatagtttgttcgttttagttcttaagaag

SEQ ID NO: 547127 - DNA, 298 bp, Homo sapiens
ggaaccccctcccggcttggggaggccccggggctgggaaagcctgtgccttcctgggccgaagccaaagccccctttgtctttccttggccctgttgccgaccagaaaatgcccagcctgtggggggtgggccttccctccttcgctccttttttaaattagggattttaaaggggacttttcagggacttgtgtactggttatgggggggccaaaggcattagggttggggtggggaggtcccgttttccataaaaaggaaccccaaataataaaaggccccccatttgtttttta

SEQ ID NO: 547128 - DNA, 654 bp, Homo sapiens
  misc_feature (33)..(34): n is a, c, g, or t
acaacttacaggctaagtagcgaggccaggtgnntaatggagcagttcggcggtcccgcgggtctgtctcttgcttcaacagtgttgggacggaacagatccggggactctcttccagcctccgaccgccctccgatttcctctccgctgtgcaaaccttccggggacccatcttcttcggcccatcttcccgtggcatttcctgggggaaccccttggcccaaaggtccaaacccccggggttacattaactgacctaccagggggagtttcgaggggacgagtcttacacttaacacgcggcccccttatgtccccccaccagaatttctatttcgccgtttttgtgggggcccccacctaatagtaaagtgccccccccaaaaaagaaaaggtcccacccataaatatagtttggcgacaaaaacacggggggcccccccaggttattttttccccagcaccatatgctacctctagtaataagacgcgggcacacaaaaatcccttcttatgtttacccccacgggggggctctttccccccaaaaggggggtcaaaaacccacagcggttttttcatctacacaagcagtttatgaatgatcaccccagcaccgccgtagaaatatacctccacttacccccgtggggg

SEQ ID NO: 547129 - DNA, 275 bp, Homo sapiens
gggggacacttacggctaggtacgaggctgggtggttgcacacttggaggccaaggctgggatcacctgaggtcagaggttcaagaccagcctggccagtatggtgaagccatgtctctactaaaaatacaaggattggccggacattgtggtgcacgtctgtcatcccagcaaggcaggcgaatcgcttgaacccaggaagcggaggttgcagtgagccgggatcatgccattgcactccagcctggtcaacagagcgagactccgcctcattg

SEQ ID NO: 547130 - DNA, 754 bp, Homo sapiens
gggtaactgcagtaatgtcccgtgtggccctggagtccacagcggattttcgaagctggggctggcatcaggccgctggacaccacgctccgagttctgtcagactccgacttcctagtctgagacaggcgcgaggtcggcggggcagcgaggccgtggctcccaccatggccgcgaattattccagtaccactacccggagagaacatgtcacaagttaaaacctagcttccacagcacaggcgttcctggcaacggcatgagcgacacctctgggtgtgggatgtctgtggggctcaatggccattccatgcatctccttctacgctaattttcaccaatgagggccgcgcattgaagacggcaacctcattggctgaggggctctcgcttgtgcgcctcgtctcccgatcaggcactccagcagtagtgagcatccagtgagaaactgaatgggaaggctcggatgcacatcatttgggcggccattcacggacactccaacgtctctttgtctgatccaaactcatggggtccagtcttccggactgttggaatacctggcggtaggcacgctcgggacgtatgtgaccacagtggtggtacgaaatacgtggaggtagtccaggggattcaacaccggaggattggtgcccagtgtgacaccaagcgaccccgaggttatcccctagcatgtacttgagatgccctgtcaaatcctcttctacaccaacccaaaatcagcactggaaaa

SEQ ID NO: 547131 - DNA, 522 bp, Homo sapiens
tgagtaaatagtaccacgatgtgactatttcacataaagctgtccccaaaatggttattaaaccacatatttgtttgatgcactttcctacatctgtattatatttcacaataacaaagcttaggaaggaagcaaagcacgggcagcagcagggcagggagcaaggagcaggcaaggcaaagcagggagggaagcaacaggaagaaaagcaaggcaggttatccatctaatcacacctattctcattcccaggccacttttctcaggtacaacacagcatgtgaatctcagcctccatggcagcccatgcaaaaatacagcattcaggtcatcacacacataaactaaaccaactcaaatctcacattcaccaacactttgcattaactgcaaatggcaaagcaaaaatcacagagtgctctcaagagcagcaataacaatcaggaactgtcatttaaattgcaaaggcactataagaaggagtctgacggctatgaaaacatagagctgatgcccaaagat

SEQ ID NO: 547132 - DNA, 209 bp, Homo sapiens
ctggacagaagagctgtgggtatgcccataggtgtgagagaaaagtggtcagaccttcttgcggcttgagattagcagtcaagtttctctgctttcactggtcgctcgctctctcctgtcaatgcattgatgatcactccctggagttgagaggcacactgtctagagtgtgacccggagtaactcgagttgccacaatatattcaaga

SEQ ID NO: 547133 - DNA, 233 bp, Homo sapiens
tcccccctccccctttaaacaaaatttaaaaatgggttcaagggtttaaaagcctttattttccaatttaattgccaaagggggcctttaatttagttttaagcttagggggggagcaaagcccggaaactttaatttcggtactttttgcaaccccgaaacctgtaaaaccctggccagtaacaagggttggccttttcagttgacctgtaaataccaaatgctttttccca

SEQ ID NO: 547134 - DNA, 937 bp, Homo sapiens
  misc_feature (584)..(584): n is a, c, g, or t
agcgggggcggagcgtgcggctgtggtgtgtgagagatccgaatgccagcgtgatgcgcgaggtggagagctgagctcctgtcggatcggacaggggtggacccttgaagaccttcagccgggccgtatgcgaccattgatgggccctgatgtggtgactgggtctcttgctgcggtgactgctgaaccgttcggagtcggctcatgtagctgaacagatagaactattgatgatgcatgagtacatgtagaagatggatctgggtataaagtagagaaggatcaagggtagcgggatgatgaatgtatgtatgggagagaggaacgagagctattgacgttgggatggattaaatgcattgacaagagtaagaggaaccttgatgagagtaagtgcggaagaaagtaagccattccagaagccacgagagtgttaaggagcagatgatgaaacactaatcgatgcaattgcattggtattacaagagtgacagtcaggattcttccctgtagaagaaattggattgtcggatatgcattcttgagtgcatgttagtataagagatacaggcgtcacataatcnacgtagcacttgtatgggaacacatggcttctttatcctgggagacatgcgaggagaaagtaaaaccgagttcacacaatatattaagttgttgcatgtaagggcagcaaaggaaagcgttgcatgctgattgttccactaggaacaagctgggttggtaaaggggaattgggaactcaagaacgacagagagtgctgggatagaaagaaacccttttgggtgacccagtaatgcctaatagatactaggggacgaaatgcggaagttttgtattaaatcaaaaattgacttggaagtctcgagggatagattgtgcctttgaactttgtgaattcgagttgggcaagtatgg

SEQ ID NO: 547135 - DNA, 594 bp, Homo sapiens
cctacgtgaccttcagatgttatccccataggggctgtgttgagtggttcttacttccatctgagaatgcccacatcatagaggctacatgtgaacgcacctgtcagcataccttgcagtgaaagacagttaataacaccaattccattttgccctgttgagacaggcggactcagacttacagcctttaagaagtgaaagggggccaatagatatgtccccaaatatcgagtacacctctgcggcctaaactgagaaaagagagtgctgtctgtagcaccatccatagaaaaactggcctcttgtttgcacagcaaggaagcagtgaattaactaagcaagggagactgctttccagaagtctttctataagtagaaataaaaccaaacaagtacacttatccaggaagaaaaacaaaattcaagctgaacctagccgctgtctcaaggatccttcaatttttcaggttgcaaggcaactaagactgatagcagctaagccagatcagttgattaagtgtccccgtcggaaccagccagtcattgtgttaaaccaccctgatgtggactcgcctgaagtgtcaacggggtacc

SEQ ID NO: 547136 - DNA, 132 bp, Homo sapiens
atactccacggtagttgagctttgctaccagataaaccaagcccacccctcatgttgagaaactgttcaccagtcctacccacaccatgccacacagctccatgcccaccagccgcagccggctaccacgcc

SEQ ID NO: 547137 - DNA, 158 bp, Homo sapiens
cagcccggagtaattcaggtcggtttttatttacttcaaattcctccctgtacgaaaggacaaaagaaataaggcctactttacaaagggccttcccccgtaaatgatattatttcaacttagtattatacccccccccccccaagaacagggtttta

SEQ ID NO: 547138 - DNA, 259 bp, Homo sapiens
tcccccccccccccctccggtgggggggggaaaagaggaccccccccacccccccccccacccaattgtgtttatatgtggaaaatttttcaaggggccccccagctttttttagcccccgggccctcccaaagggcaaatatccccctttttttttttggaaacccgtccttggagaactaaaacttttaaccccctccttcaagtgtgtttcccgtaattgtttcccttaaaacccattaatgttcccaagggttta

SEQ ID NO: 547139 - DNA, 242 bp, Homo sapiens
  misc_feature (26)..(26): n is a, c, g, or t
ggtgttctcgagtgggaaaacccagnacaggtgatgaacttgcaaaagtttcctgcaaacagtcttgcatcgtcacccaggctacagtgcagtggtgagatcctggctcactgcaacctctgcctcccaggttcaagcaattctcctgcctcggccacccaagtagctggaactacgaggcatgcaccaccatgcccagctaatttttgattttccagtagaaatggagtctcaacatgctg

SEQ ID NO: 547140 - DNA, 406 bp, Homo sapiens
  misc_feature (78)..(78): n is a, c, g, or t
  misc_feature (191)..(191): n is a, c, g, or t
  misc_feature (198)..(198): n is a, c, g, or t
  misc_feature (221)..(221): n is a, c, g, or t
  misc_feature (270)..(270): n is a, c, g, or t
  misc_feature (301)..(301): n is a, c, g, or t
  misc_feature (337)..(337): n is a, c, g, or t
  misc_feature (385)..(385): n is a, c, g, or t
gctgttactttgaagcatggaaattcttgtttgggggatcttggggctacagtagtgggtaaacaaatgcccaccggncaagaggccattaacaaatcgtccttgcctgaggggccccagcttgctcgggcgtggcacagtggggaatccaagggtcacagtatggggagaaggtgcaccctgccactgtnacttctngctagaccaagtggttctgccangtgacctgttcagcagcagaacaaccagggccatggggaccggggaagnttcacttggagatggcccccagacaatgaanatttgtgtccaataggtcaataattcttggagactnttggacttgatatattaggaccacttttttcttcctcatcccatttgngccatgtgagggcctttccct

SEQ ID NO: 547141 - DNA, 113 bp, Homo sapiens
cgaaagataccgtctcagtagtgatggaattgaggggggagagtggtgcggaagtgtgatcctcacatcgggctccatgcaccgaggcactgagaaagctcattgaatacaaa

SEQ ID NO: 547142 - DNA, 223 bp, Homo sapiens
cagtgagacgagatcgcaccattgcactccagcctgggtgacagagtgagactctgtctcaaaaaaaaaaaaaaaaaatcgtacctctaaacattgggaaaggggctgtaaatcccaagagtgaagggatggaggggttccactttttgccaccctttaccctgctggggggcttcctttttgctcccctggactttgcaaaaagaccaggctggccggaagc

SEQ ID NO: 547143 - DNA, 407 bp, Homo sapiens
agcacagccgcgtcttgtgctgtggacaccgccaccgcctgtgtatccgccgcctctggacacggtgtatgagtaagccacaatctttaatgagtaaacatattcctcaattctgtggtgtgcttgtgcacacatttatggaggttctgaagggcagtggagattactggcaggcacagcacgaactctatgcagacaagtgaactgtagaaactgagtactggttcacacaagaagcccccatatgagagggtatgctggacacacgaatgttgaattgaaattcacagagcattttacacagagatctgacctggatggtgtcctcaatgcacattttttctgtgggcctcagaattaccggattgaagttgctgcgctcttggtaggagggtcatatcactttc

SEQ ID NO: 547144 - DNA, 1476 bp, Homo sapiens
ggagagagagagcggaccccagagagccctgagcagccccactcgcgccgccgtgctagttaccatcacaccccgtggagggagccgcagcgtgccgcaggccgggcccgagtcaccatcaccgaaaccatgagcagcgaggccgagacccagcagacgaccggcgacacacgtcccgcgcggcgacgcaactacagcgccgaacagaataccaagcgtccggcacctaccggagcagccggcagcgggggcagcggccggccctgggccgggcctcacaatcgcgagcgcgcacggccaagcaggggcaacagaccacaggtgcatccgcacacggacagccgaccccagaggaacaccagagaaacacactgccctgccccaacagccacacgagcaacacgcgcacaaacgcgcccacccaatcccacaccacgcggcacacggagaccacccatagcgcaaagagacgccagctgcacgataccaaccccaaacacccagcaccacaccacgcacaggcaagtcgcaccacccaacgagaaaacgggacccgtagcagccagagcgacgaaaaagaacacatagaaagcgaggaccataggtaaggacagcacaacacccacgcaacagcgccagccagcaggaaccgaaaacacagtagagagaagacccccccccaggaagacaaccagcaagaacagaacagacgaacacaaaggcacaaggccactggaaaaccacgaccaccaaaacaagagccccaacacaaaaaaacaaaccaacaacgcacaccacaaaaacgcaacctaatacaccgaccggataaaacccgaacacaatacacaaaaacgggagaaccacacagaacaggcaaacaaagccaaacgaacacacacacctccagcaggaacacaaccaacgaagtggaaagaaaaccgacaataagcagaggccaagaaccacacgatagaagccagagaacaacaacacgagccccacaaacaacaccaccgcccgcagaccaacgcacagcccaagagagacaacccccacaccaggccaaacacgcagccacagcaacaaacaaagaaagagacaacgacggagcaacacaccgagaagcacacaagcaaaccatgcagcgcaaaacaaaccgaaaccaaccagaaaaccaacgcggacacaaaagagcaacagaaccacaccagggcagagacaacgaccagaagcagaccaacgcgacaacccgacaacatagcaccagaaaacacagacggacaggacaaccagccgcgaagcaaaccgacaaagacaccacaccagcagaggccacgcacaccaccaccgcgaatagcgaacacaacgagacccagcgcagacaagagaagaaacagcaacaacagtcccccaccaacaacccacccacaccccaagagacgcagaacaagacaacagcacgagcccaccacacag

SEQ ID NO: 547145 - DNA, 505 bp, Homo sapiens
gccttgctttctgcctacccaagatacatgttctctcactgcattactgtgctcagacttgtgtgggagcagcagagatgtatcgacaagaggcccttgaagctacataaacagtcactctagtaacgctctgttgcactagtatagtccctggagtcagattgctatcacaaaaatggaaaacatgctgacatataaattaaatgactattatggaaatataaaaatattataaaaaagtagcataggggccgggtgcagtggttaacgcctgtaatcccagcacttagggaggttgaggcaggcagatcacctgaggttgagagttcaagaccagcctacccaaaaatggtgaaactccatctctactgaaaatacagaaaattagccgggcgtggtggcacacacctgtaaacccagctgctctggagctgaggcaggagaatcgcttgaaacctgagaggtggaggttgcagggagccgagattgtgccactgaaatcaac

SEQ ID NO: 547146 - DNA, 451 bp, Homo sapiens
ataatgatagccagggtctttgtgctccaggccaaggcgcagatgctggctgcttgctcctcatatgagacttcctggactgcctctcacagcctgatgcagcaccatgtaccctagagagaggactagtccacagtgttcccctggggcccatgcaggcccctgcctgagcctgtggtcctaggagctgggtagaaggtagagatgctgctgtcagaggtccaggctaaggacaagtggggcaggtagggcaggtaccactggccatggatggaaaggcaggcaagttccaagaccttagcaggtcaaggactgctcaggctgccttgggagcagacccgctccccagacagtcacctggcaaaggcagaatctcctcatgacgtctcagaagcttgtccgacaccagaaggcaagctccgcctatttaacatgaggccataggatcagc

SEQ ID NO: 547147 - DNA, 328 bp, Homo sapiens
  misc_feature (22)..(22): n is a, c, g, or t
  misc_feature (44)..(44): n is a, c, g, or t
  misc_feature (50)..(50): n is a, c, g, or t
  misc_feature (87)..(87): n is a, c, g, or t
  misc_feature (152)..(152): n is a, c, g, or t
  misc_feature (163)..(163): n is a, c, g, or t
  misc_feature (310)..(310): n is a, c, g, or t
tcctcagaagcccatcccgaanaccctctgtttttttctaaacngggctngaatgctgtggtgggcccctagaggtgaggtagagantgtgacacatcaggtagtgtgccacacacacacacacacacacacacacaaacacacatacacanataaactgttnaagttatctcatttatatgaacatcaatctggagaacaggcatggggatggatattaattgtatgagattatggtgtaaggaacatagagttgtatcaggctgaatttactgattaggaccatcaaggtagtgactttgtgtttaanatggcagcttggcgagtt

SEQ ID NO: 547148 - DNA, 246 bp, Homo sapiens
agggggttttttttttttaaaaaaacccccccggggggttggtttttttcccagggcctgggtttccttggggcccggggccccccccccgccttttttcccccgggggggattttttttttgggggttttttttgggaaaaagcccggggttttccggggggggttttttttgccctttttcccaaaaaagggggggggttttttggggttttttagggggcctcccccccccccccccccctta

SEQ ID NO: 547149 - DNA, 267 bp, Homo sapiens
catgactcactatagactcagcagacacacacaacgttggcatacagggacaggcgtggtggctcacaccggtaatcctaacactttgggaggcctgaggcgggatgaatcgcttgaacccgggaggcagaggttgcagtgagcagagatcacgccactacactccagcctgggcgacacagtgagatttggtctccaaacaggaaaaccttgcaacacaacctttggggcttacaggggctcatgataaactggggtagcgaaact

SEQ ID NO: 547150 - DNA, 149 bp, Homo sapiens
aaaacaggtgtacagggaaatggaacagtcaggaaatcttttaagatggcatcctcgaaatatagaagaggaagacagccattgctgttttcatcttattatttttgcttttcgcatggctggtagtttacatttacagtatcacgaac

SEQ ID NO: 547151 - DNA, 917 bp, Homo sapiens
tggagacagagttccgctctgtgtggcccaggtgggggtgcaagggcgcaatctcgattcaccaaaacctcggcctccacgggttcaaggcaattctccgggtctctacttaaaattacaaaatttaggccggggtggtggggggcgcacctttctctggtattctcaagtcttctcagggagggctggagacaggagattcggtttggaccccggggaggcacgatgtgttggcagttgacgctggagatcatggccattggaatttcccgggcctagtgtgacagaggggaaactccatctccagggaaaaaaaaaaataaaccccatttttgggggttccacatttagacttacactaatttgggagctctattgggggcctttacctctagaagaaggtttaaagcacgcgtgtgcgcggggacccccctttttagccaaaagacgaacatgccgtgtgtgtaacaacacaggtttattcgggctcgggaaaggagataacaggtcaataaacttcaaggtggaatcataggggctcattatatagcgagacggtccgtctggcacccctctgatggtatccaaacttttgggtgcggttatggacacatcgttaaacattctgagattcctttactttgggaaagagcgcttcaaccctttcttcaagggccaatatttgtcctttcgaaacaatttattctgggggtcggggggagcgtgaaacattccagaggggacgtgggggaagacccccacaattgggacagggattgtgtccccaaaattatttatgtgtgggtcggtgttcgcaaaatcggaccaactttcatgtggtcacacatgtgggtgtggtatgtgagcaaaaccgttggtgttgtgtgtgtgttgtctaagatatcgtaaaaaaatgc

SEQ ID NO: 547152 - DNA, 361 bp, Homo sapiens
  misc_feature (1)..(1): n is a, c, g, or t
ngtgggatacagcttccacatgtgttatataactcatcaacactatctctgattggcctctcctgttgtagcacagcctcttgcaactcacatcctgtaggacacaacacatacaggtctgggtcagcgtgaagacagcctacagcatcagaggctactctttctactctctattgagtggcagctgctttggctggacgagcgcgatagccacctccattgatgggcggtggggcaggcctcaggctggaagcctcttctctcttcttgtcaaggggtcgatgaccacgggcactgaagaaaccctcctcattgtcgttgacaccttggaagtgtgtgaaagctacgagaaatctcgtgc

SEQ ID NO: 547153 - DNA, 481 bp, Homo sapiens
gacgcgcacagcacgccagcgtgggggacagagcagaacccgagccccgcccccccccaagcaaaagacaaggacccagaacataatgctacgtagagcaggacaacagggcagaggtcaggaacgctagcgcccatctctagtcctatcagatagagatttcaccatactataaatacaaaacatcggaaggagcagtcgctagtcggggcagagcagcttcccaccttcacacagccacctccacaggcacagagccccagggctcatttttcctgcagtctccattggatataacacttacacccactcagctccctagctggcctcctctcagctgtgatcgcctcttccctgaagagctctctgaatttgagtaatgacatggctgtaccattcatttagtttaaacacattttttatttgggtgaaaaattgcaaacaacctataattcaaaaataacggtaggcaatcaagctg

SEQ ID NO: 547154 - DNA, 942 bp, Homo sapiens
cactgctgttgatgcctccatgctttccattcctagccctgatcccaacccagaggtccacatatgcctaggagagcgggagaagggtgtcaggaggtgcggtagcatggttgtcgcagcgcccgagcagaagcctggaaaataggctccatagcggaaggaacacagtgtgcctcaactcattccagggagaatagatggctctgactcagatcataggagtatgtggacctgacgcaggtgatgtgagccaggtggcctgccccatccaggtcaatctccatggacctggggcgttggagctggcgaaaagtgagtcagaagaggcagagcaggtcgcgggtgggaacaggggttcccagtttgcaggccatggccagtttccccagtagcacctcagacagcagcaggaacagggtgtgggctccctcttgtaaacattggtggctacaggctctcatgatctctgatgcctggggcctcagtcggagtcttccttggtagcctcttcctcttcaagtcctcctcttcttcttcctcttgggtgaggcccccggtcagagccgggcgggacggggtggcgggtcggaggcgcctccccggggtacggtggcggtcccggcggtgagggcgcgctgtccgggatcgtcgagggacggggggaggcttgggccagggcggggcggcctgggacgcaggcggggcccgtgcatgccattgtcccggaggctatggcaggccgtaccatcgtgccgcagccgtctgaggccggggggtctgccctggtacggttgtctgaagccaataccacggtagctctggtggcgcccccaggtagcagcggggaggcccctcacgggggttgcaggcggttttggccccctttctcccggttcagcacggctccgcgggggggagcaccgccatttctcgggggcccca

SEQ ID NO: 547155 - DNA, 417 bp, Homo sapiens
ggctttgaaagcaagagtgaaatgttctctggtcacaaggaatactggagtcgtgttcagggccagggggggaaatctgttccccgaggtccggtatgccttgatatcctgaatgccacagggtagcaccacaggtggtaagattatagtaggaattataatggtcatagaagtactggatggctcgagagtggaacactgcactaacactgcaataaatagaatgtgcccctttcacagaggtttccatgatgtacgttacttatggctcttaaggctgagcaggtacagaaatcctcaggacctacagaatggtgtatctcgtgtagctgaggtcatcgtccgaactttcatggaatcctgtagcctctgggattttcacctcaaggtcattgctatgcatccaggcgctcaacg

SEQ ID NO: 547156 - DNA, 562 bp, Homo sapiens
cttccccttgaagaaaaaaggtgtgtaccccaaaagcaaagtccctgggccctgggaaaagccttatcccgggcagggtttggccccatagtgggtggacaaacactggcccagttttgctggtttgctgggagcacacaaacattggcacaaacttgttggttttttggaaaagggcaagaccccaaaccaaagcaaaaaacacttccagtttttaaccaggctccttccagtcccaagtgggcagaatcagaacaaaagtagtccccatcaatgtcacatgaacaaacaagctgcccccaggggaccatttggggaggggaaattttttttttttttcccccttaaaaaaaaacacatttgccccgaacactttccccctgttattttttcctcatatcccaacactaaaaatttttgtgacattagccaggggggggttatggttgtgtgaaccatgtatgaaaatccagtgggcccccaccaaggagacaaacaaacttgggtttttttccccccacttttccccatggtctttgtgaaaaaaaaagtcccctttgga

SEQ ID NO: 547157 - DNA, 534 bp, Homo sapiens
  misc_feature (534)..(534): n is a, c, g, or t
cctttgaagaagaaaaacccttttttagggaaaagtcccccttgcccttaaagtttcctctgcatggggtttaaagaagttaagaaaagtccttttcccgggaaggaaggaggaaaatttgttcctttcaaaaacccggcctttgaagggaggtttttttgttgttgttttctataaaaattgagggaaagggttttgcaaaaaaattttttgctttgggccaaattttttaagcaaaaaaaaaaagcccagttttgcttgcatcccttgaaaagggttttttttgaagatcaaacccccccatcccgatgtataagttttaggcaaaaccccattttaaaatttccctgaataacccctgaaaggaatttttccaatcccgataaccaaagtgggcgggaaataaaagggaaaatttgggattttcccaaaaaaaaagttaaactcttcttttctttttattaaaaagcccagctttgggtttttctttgttcccaagttttttttttaaaaaaaaatggttccccttttccn

SEQ ID NO: 547158 - DNA, 778 bp, Homo sapiens
tcttgctctgtcaaccaggctagagtgcagtggcatgatcttggatcactgcaacatctgcctcccgggttcgggtgattctcctgcctcagcctcccgagtggctgggactacagtcatgtgccaccatgcctggctgattttgtatttttagtggtgacgtggtttcacaccatgttgaccaggctggtctcggagctcctgacctcaagtgatccgcccaccttggccttccagggtgctgggattacaggtgtgagccaccgtggccagccttaggggataatttaggtttttgtgtttctgttttaaatttaaatttttatttttttgaggcagtatcactctgtctctcaggctggagtgcagtggcgcgatcaactcactgcagccttgaattcctgggcacaagtgatcctcccaattcagcttctcaagtagctgggactacaggtgtgcaccaccaatgcctggctgaattttttttttaagagatggactcttgctgtgctgtccaggctcgtgtcaactcctggcctcaaatgatcctctctcctaggccttccaaagtgctgggattacagacgttagccactgtacccagcctagttcaacgtttaagcattaagaatggactctttggaggaatagggatcttttacgggatctctacagtcagtgactcttaatgtattgtttgggaccagtagtagcttagcttcacccaggagtctttcggactgctcatctggcaggggcgggctcaggccggtatccg

SEQ ID NO: 547159 - DNA, 1289 bp, Homo sapiens
tgaagaacttccctaatgccatcgatgcacaccctgcagtgggctcgggatgagttttgaatggcctcttcacgcagccagcagaaaatgtcaaacagtacctcacagaccccaagatttgtggagctgaacactgcgtgctggcagagcactcagaccctatggaggtgctggaggctgtgcagccgcagacctggtgctgcagacgaccacagacctgggactgactgcgtgacctgggacacatgacaacacacatggaacacccagtacatcgaaccaccatccggacaagcatgcatgacacacagtatcccatccatgaccagctcaacaaagcatcaaggagcgccatgtatcatggtcatggagcaccaaaacgcatgatccacacaccgcgtcaccatttgcatgtcaacaatcacccatgcactctggcactaatgatgaatggcatgactgcgcaaccatgataatgccccagcacacttacggtgcatgacaagtgcatcctcacgggaacacgagcctgcatgtggaccaccacttccctggctaggtctgttgacacagcttagcacgaacattcaagaccacacaaggtcatgggcgctccacgactccagtgcttatcatgagacagagagacttgagcggacgcgcccaccagtcgcacgtcatggtatgccgtgacacacgagacgatctaaaacgggacgccatcacaagaccaagtacgtggcccaggacgcatgcagcaagatcgtcccaatgcaaattacagagaactgtcacccactaggaccctaggaaacacggactgaactgcaccgcaccacctctcattaatgagacatctccccatcgcatgccgatgtcatccgacccctcccgcaggacgagaagcacactactcaacgaaacattactgccagcacccgggcacccctgctgcaagccgacatttacgcgccacacacccggtcccacacccaatgccctgtagcacccaagacggcggctagcccgcacacgagagtcactagagcgtgaccaggtctccaccaccacctcaccacatcactcactcaagacatggctacccccacttcacacaatatcatgacccactcacacaactcacacccatacaactaacctcatatccatctcgtccatacccactgcacacatcataccatacagaaaccacataatggacacaaacaaacaacaacatcatacatcataacacgcttcccattcctacacaaagcagcacacatcta

SEQ ID NO: 547160 - DNA, 156 bp, Homo sapiens
  misc_feature (139)..(140): n is a, c, g, or t
atgtcagccattgagctgcgggctgctctcacccctgtccagatcttccccctctttctctgcagtaggttcttcctttctactttcagcccaaatgggtttggacctaccgtggggaacggaaacttaatttacaccnnctccagttgggcaggc

SEQ ID NO: 547161 - DNA, 411 bp, Homo sapiens
  misc_feature (5)..(5): n is a, c, g, or t
  misc_feature (43)..(43): n is a, c, g, or t
  misc_feature (99)..(99): n is a, c, g, or t
  misc_feature (216)..(216): n is a, c, g, or t
  misc_feature (221)..(221): n is a, c, g, or t
  misc_feature (247)..(247): n is a, c, g, or t
  misc_feature (261)..(261): n is a, c, g, or t
  misc_feature (268)..(268): n is a, c, g, or t
  misc_feature (277)..(277): n is a, c, g, or t
  misc_feature (285)..(285): n is a, c, g, or t
  misc_feature (300)..(300): n is a, c, g, or t
  misc_feature (322)..(323): n is a, c, g, or t
  misc_feature (328)..(328): n is a, c, g, or t
  misc_feature (331)..(332): n is a, c, g, or t
  misc_feature (341)..(341): n is a, c, g, or t
  misc_feature (345)..(345): n is a, c, g, or t
  misc_feature (393)..(393): n is a, c, g, or t
tattngattcggggggggtgtgggttttttggggtgggaatgngggcagctgcttcaggacacagatttgggtccccacagtgacatgatgattgtgantggaccggaagcgggttagtgaagcaccattttctcctaagtcttattccaagctaagcaggcttaaggttacagtggaaagtgagagcacacagaggagcggacatgcagcaaggngaagnagggaaagaagagaggggtgggtganccagggagtggctnagttaangaaaagcgngcgggtgnactccacgtagtcgnacgcggtggggagctcgcggcnnttgangtnnacgtagggnttcntgtgggagacgcagtagtcggcttgttcccgggtcaggttctggtagngctcctccttggtcaggt

SEQ ID NO: 547162 - DNA, 227 bp, Homo sapiens
gtgtctagaggtcccacatgattgtcaccgctcactaaatatcaaaaataagcccggaatgatggcgcatgcctgaaatcccagctacttgggggctgaggcacgagaatcacttaaacccgagaggcagaggctgcagtgagccgacatcacaggactgcaatccagcctgggcgacagtgcgagactgtctcaaaataaatagataaataagaaagaaagggcca

SEQ ID NO: 547163 - DNA, 208 bp, Homo sapiens
agtatattaacagctttacctgataatgtacaacattcatgaggccgagaattattcacatgcgatgacagctcgctctgataacgcacatattaggctttctgtgacaggtactatccaacgtcgaacaaatgtttaactgtcggtcgctgttgattgtcagtgtgccacggtgggtgggcacatatctggccttggtgcatgttgc

SEQ ID NO: 547164 - DNA, 1072 bp, Homo sapiens
  misc_feature (217)..(217): n is a, c, g, or t
  misc_feature (563)..(564): n is a, c, g, or t
  misc_feature (597)..(597): n is a, c, g, or t
agcggacatagtggagacgtccggccttcggatcgggagtgttctgttgttgcccctccactgaatacagagaattcaaactatagggtgactgttgagcaagaggcacacgaagattcttctattcactggacacgtgtatcccacgtggccaccagacgcttgaacacacgggcaggcaacgccaccacagacctagggccacacactgctccantggcctctctttgtggcgtgaagagcaaggtcagcgcaccctggcatactgcttacgacaggccgcctacataagaaacgaacatggcactcgatcgtgcgggaagtaaggtactacacgtgaatgcgagctcagttctggatgacatcgccacatgagagttaccatcacgcatgtgaagcatgacatatggatcttatgtgatcgttgcgagttaacggaagcacagtgacagacaacggggcgagaccttcatagtagactgtcattctgcagagaaaaggcctagcgtaacttgaagtcaactacattggagcctagcatgcgcattacttgtaattagcannataacgagagagatcgtcgtcgatgaacttctntgctagtcgttgtagccgattgccgttctaatgtatgatccctcgataacacctagaagattccatgcatcacttgaatggacgtgtacgaggacatatttttcgttgggcgcaggtcgcttgagttctagaacacgtacatgaaactcggcgttagttggcttaaaactgagatatcgttacaggtcctttcggaatttttgaattagtaaacctgccaagttcacgtacaactggggtactcagctgatttacgccctttttttagagactctgtattacgaacttccggttgagataacttgtttccagaactttttcaccaaaacgatggctgcaggtgcccattcgttaaaagctttactgggagcactctggcttcgacttattatacgacttgagatataacgtgggtagtgtgaaatactatttaaaatactggcggaaaattgcgctcccctgtgctttagaacca

SEQ ID NO: 547165 - DNA, 540 bp, Homo sapiens
  misc_feature (39)..(39): n is a, c, g, or t
aatcggatgcgctggtaacgccccaaagagttgagtagntggcgtcggagtcgcccgccgatccctgccactgataggtcagtggcccgagtgcgcgcgcctgctccacggtgccgctggcagcaccggttccatcggcgctgtgcgcgcgcacgctgtagctcgacgcggcggcgggcgtcacgctcgcaccgaccaccgacagaggcaccgtcgtgttgtgtacgcctttgccggcgaacgcctgcccagggtggacgactcccaccggcgccgtgccgtcgaggtagctagtcaccaaaccgacgccaatccacgccccaccattgacctgcacctcgtaacggtcgatggccgccgcgctgcgaaatccgatggcgcccatcgagggcggactccgcagtgcgccgcgcaccgcgacgacggaaaatgtctgtcccgagccggcggatactgtcggagcgctccaggtcaactgcacgccaccggtcaacgccatggcattcaaggacgttggagcgcgcggtggacccgcggccg

SEQ ID NO: 547166 - DNA, 157 bp, Homo sapiens
tattcccaatggggttttttaaaaggggtttaaattttaaaaaaagggacaggcaaaaggtcattttaaaatttgaaggaaaaaatttgaagtccccaaaaagggtttggggttttttggttttgttagtaaaacccagttttggggggatgcccta

SEQ ID NO: 547167 - DNA, 215 bp, Homo sapiens
agttaaatcgtgaccatctgagaagcagaatctcctagcgcgacagatccttccaagtaagtgcgaagaagaggcatgaccacatggatgatatggatgatgaagatgatgatgaccatgtggagcagccaggagtacattgactcgaacgactctgatgatgtaggatgacactgatgattctcagcagtcctgatgagttgcaccattctgat

SEQ ID NO: 547168 - DNA, 141 bp, Homo sapiens
aacctcaaagcctcttttccaccctaagaggtataattcagtcaaacttccccttccctgacacacctcgattttccatcttgctaaattgataagtttacaaccagtactaatgatataaaaactaacactaaacaccca

SEQ ID NO: 547169 - DNA, 630 bp, Homo sapiens
ggctactctgtctcttttctccacagcattttccactttaacggcatatttcttctttactcgtttagtattcttctcaatttcctgtctgtagtacctagcaatgtaaaatcctgtacatacgagtgtaactatttggcgagtgaatggtctatgcaatttagggcttgttggaaccctcaataacatcacctctttcccaacaaggctatctcttccacctaaactttagattttcccttacagtccaattaccatatatgtgtatcttctcattaccctgtatgtagatcctcagctcaatggtgtattcgaggatccaggctctgtccccttcccctttgccatcctcagtaattagctgcattcatatgcttgtcttttcaatgacccaaggagattgccatagttccaggagtcacttaaagacaaaataacattttgctaaagagagcgagatttcctcccataatctactttacatcagggaagtaaaccattccctctgggaggactctcagcagtcttccctttactgtgtcaaatgccccattttttaactgcaagggaggctgggaaagcaagccgctggtgtgagcagcctctgcaatgggatgcagaaagtgtggt

SEQ ID NO: 547170 - DNA, 118 bp, Homo sapiens
ctcctgctccacgatgcgggactccagctgctccacggactccggctcgcgattctgcgcggtggcgctcatcatctagcctcttcatcaggctgtacttgtgcagggcccgctaaaa

SEQ ID NO: 547171 - DNA, 673 bp, Homo sapiens
ctagagtactattttactgtgcttttagggccaggagaggggtactctccgacctaacagtaaagagactgtctcataagatgctcttgcttcacaacaattcctgactaattctaataacgacgatgtgcattatatcaggagcctatattaggaaagagtttattagattcacatcaggcatcatctggactgtatggaactaaaagtatggtgccgaaattgttaagcgaagattacgcagggcttggacatcaagactgaggttttaatacctggataattttctcgcacatgtccaagagatgccacatacggggggattccttgggctgacaggatattgcgacttcttttctgtgttgaaggatacgatgctcgctttcacggcttctactagagggacccgtgatatgctcgcggcgtaagctcctacccagtttagaaaagagccaccagatgataggcgtacggatcaacttagaagcccctgaggcaaccctgccgtgggcccctcagaactttacaccgccccgttaatgaactcgtcaagctttgccttgttgaggcagccttgcaactcttttcttcctagacatgcccggtaaagcgcgtcattacaaaacaaattttctagcttttatattcagggcaacggtggtaatttttatgt

SEQ ID NO: 547172 - DNA, 328 bp, Homo sapiens
  misc_feature (8)..(8): n is a, c, g, or t
tgtgggtnaattgaaatgcctactcccccatattgatcaagtttaagaaagttggctgggcatggtggttccatgccctgtaatccccagtacttctggaggcccaagatgaaaggactgcttgaacctaggagtttgagactagtctgggcaacatggcaaaaccctccctctagtttaaaaaaaaacaaattagccagacatggtgtcatgcacctgtagtcccagctacattggaggctggggcaggagaattacttgatcccaggaagtagaggctgcagtgagctgtgatcacaaccactgcgctccagactgggtgacagag

SEQ ID NO: 547173 - DNA, 86 bp, Homo sapiens
  misc_feature (33)..(33): n is a, c, g, or t
  misc_feature (74)..(74): n is a, c, g, or t
tgcagagctctgagcactcgcttcggtcggggngtctccctcctgttgctttcctaaccctgccctccggggtntaataaagtctt

SEQ ID NO: 547174 - DNA, 1009 bp, Homo sapiens
cgcgcttcggccggcgccttttcccaggactcgccaacccctcgcacccccgcgctcccaggtccccgcgtcccggcgccgccggccctggagctgcccggaagtctcggttccgccgccgggctcgccagggaagccctggggccgccgggacctcggcccgttcctccgtgacccgagaagcctgcacgcacgggctgtcacctccgagatgctgctagctgccgctcgccggtcaccgccaccctcgggtcctccttctccgtgtagagtccatgagacccatcagcacccacctatgatggaacccgcgaatgtatcgacacatgaccgtgcctaaaggatctctgatctccatgatacatacacaacgctcgtcccaaatggtaccacccacgcaacgccaggatggaaagcagccatcaacgcaagcgcgcacctgcgaatccacatacactcagtacacccaaacacccctcctactcactaccatgaaacagaaaccactacaacactaacaacacgaattacaactcaccatctgcttgcgaccaccgcaactgcacacctacacgagcccccacaaacgccaacaaacaagacaactaggccgccatgccacacaaaatccaccccacacacccatatccgcactacacaaacaccctagacccccgacacccaagtacgccttcccacgcgcaaccacccatctaaccaccacacccaacaactccagacaaccctcaccagataccccaacaatacaaggacttatagaagaccacccgccccccactcacccactacgcacagcaaaacgccgcaacaaaccaacgtcaccacgcacgaccccactcaaacaacccacacaaagacacaccagcgagtggagaagaccaatcgataacacgaccaaccagacgaccatatacagacacatacaaaacacgaccagccaccacagcagcaaaacacttgccgacgggtccccgctaccaagccagca

SEQ ID NO: 547175 - DNA, 179 bp, Homo sapiens
  misc_feature (46)..(46): n is a, c, g, or t
  misc_feature (79)..(79): n is a, c, g, or t
gagaacctcatccacgtaggtgccacagacaatgtggtgatttgtnacagcaatggagtagacgctgccaccagacgtntgcaggacgtgggatgcagtcaagggttcggatgtcccagatcttgattgtttggtaggagccgctgtacaggtagctctggggcagccaccagggcccg

SEQ ID NO: 547176 - DNA, 1212 bp, Homo sapiens
gtttgtacaagtcagcaagctctatgtgagtctcaggaagtgaattaaatttggaccttagtgttttactcttgtatttattttattttctttttgaatgttacttaatgactctctcctgactcaggagaaaaaccccttgttggaaggacagctgtggtgactcaggcaatttcctcggggttcccaaagcaatgactttggaaccacagtattctcgaaccagctctagtttccacaataatatcttcacatatactacgcaatgtacacatatccagctatcacaggtatacacaacgcctcctaaattcatcataatacccactctctgcgctcaaagcgtcatctggctctacaaaattcaataatgtcctctaaaacttatatcctcgcggctacaatcaaccttccctccttccacacctctcttacacatcaaccacacgtgctccacccgatatcacacctttgcggcatcattataaaacggcgctttttcaatattaagccccaaaagcacacagcaaaatcattcaccagcgcccatatacaccaaccacacacaatctcacccgtggctgtgcgcatgatcaacatcaactcgcttcaccactctcagctcccccaatcaccaatcgcacctcatccagccacaaccattacttacagatactatagcaccaatctccaccacccaccactcaccacaacaatcaccacaacaccctcagcggtgaacagcacaaggacgacatacaacacacacgtgcccatgcgcgaatacacacaccggtgccacacaccggcgccatcccacgagcagccacatcacacccggccacggccacacggggaactagccaccacagcttcgactcaacacacgacgacacaccagaaacgcgaaatctaccaaccgacaccaccgcccaacaaccgcgagtctaaccccccgacacacaacactcacacccacaagcggacacaccgacatcagcgatcacacagtgggaacaatcagcaaagccaacatcccacaccagcagcaggcgaaagcataccacgcattcgaggggcaacgatcacaattcaaagaagcacaatgcacagggccagcaacacccaatggtacaccgcgcaccacacagacacagcagcacaacaggtcaccccacgagcaagtcaaccgtgcgcccgcacacatcacga

SEQ ID NO: 547177 - DNA, 148 bp, Homo sapiens
tttagaggatcccgggtcccatgcatgttgtggaagatggctggattcaggtagatggatggatgttgagttgggccttggggaggttggaggaggtggggaggaatggggtgggttggaggttggatgaggggagagaggggtatcc

SEQ ID NO: 547178 - DNA, 415 bp, Homo sapiens
  misc_feature (27)..(27): n is a, c, g, or t
  misc_feature (109)..(109): n is a, c, g, or t
  misc_feature (112)..(112): n is a, c, g, or t
  misc_feature (231)..(231): n is a, c, g, or t
  misc_feature (268)..(268): n is a, c, g, or t
  misc_feature (301)..(301): n is a, c, g, or t
  misc_feature (310)..(310): n is a, c, g, or t
  misc_feature (361)..(361): n is a, c, g, or t
  misc_feature (398)..(398): n is a, c, g, or t
ggcaggcaagagtgctggagggcggcnaggcgaccggagcggtaggagcagcaatttatccgtgtgcagccccaaactggaaagaagatgctaattaaagtgaagacgngancggaaaggagattgagattgacattgaacctacagacaaggtggagcgatcaaggagcgtgtggaggaggagggaatccccccacaacagcagaggcttcatctacagtggcaagcagntgaatgatgagaagacagcagctgattaccagatttnggtggttcagtcttcactggtgttggctctganagaagagtngtcttaggcatgatggacctccatttgactcttacctgtcgctcatgagcntctatatctctcatctctgggacaccatagccatggncccttccctggatgcct

SEQ ID NO: 547179 - DNA, 151 bp, Homo sapiens
ggatttcagtatcccgagtctgccatgtatccagatagaccatgtacacgaggtagtactcagccgctatatccaaggttgacaaagaaaaagaaggagacggttctcgcaactgttacaaaatcagttggtggtgacatgaacggcggta

SEQ ID NO: 547180 - DNA, 189 bp, Homo sapiens
  misc_feature (27)..(27): n is a, c, g, or t
ggcaggcaagagtgctggagggcggcnaggcgaccggagcggtaggagcagcaatttatccgtgtgcagccccaaactggaaagaagatgctaattaaaggtgagggaaccaaagcggggaggttttttccagtcagtactccctttcttaggcctggcattcctggacagcctacttcttggctaggc

SEQ ID NO: 547181 - DNA, 103 bp, Homo sapiens
cgtcagagtactctcgagcctgtctttcccactcaccttcttcagaccacaaactcattctcagcagctgtgcggcggttaatttcatctccgctacctacag

SEQ ID NO: 547182 - DNA, 123 bp, Homo sapiens
  misc_feature (14)..(14): n is a, c, g, or t
gggggggggggggnccccccccccccccccccacccccccccccgggtttttttttgggggccccccgggggtggggcccccttaaaaagatttctttttttttggggcccccccccggggga

SEQ ID NO: 547183 - DNA, 109 bp, Homo sapiens
tgtactttttatgcttttttgactttttaatgggaattttatcagtaggatctgtttgtacaaatacgcatttactttttctggagccctttttcaagtctggcttata

SEQ ID NO: 547184 - DNA, 1605 bp, Homo sapiens
  misc_feature (382)..(382): n is a, c, g, or t
gtcgcaacagacactgccagcatgcaacgagctgccgggtggccgaagaagctctcacgcgctgccaacgaagtgtcgttcgctcccgacgctgagacgcaactgctactcagggctggccgggtgttgcgagcctgctggacggaagcgcggatgtagtcacgacaggcgtacgaccagccaaagtatgacaggggtagccccatcctctgtgctcaacgtacccagtgactctctgcggcctcgaagtcttatgagtacgcaacttaagtgtcgcagagtatccaatggccgtcgctgggacgaagcagctggagttctcccctcgctcaatgaggtcgcgcatggacgagtggcgtgatatctcactaggacgtctcgncccagcaatgctcgtagctttgccctcgctcaagtcacacctgaatggagcgattggtggtgctcgcgctcgctgggaagccgctggcttggctcctacgaccaagcggggctaaagccgaggcaaggggcccatcgcttcgcctcgtcgttctccaccgcaacacgcaatctgaccacggctcacagagagtcgatgccagagggctcgacatggaacgcgagaagcccaaggcaaaggaatggtctcattaggtgtgcaaaggactagggtcgatgccacgtgtgacctcgcaaccgtggaggtttgacctcccttagagctggcccgagggaggcccatcggagcgcgttgctcccgtggaagttgaacatcggcgagcaaccgtcgttgagggccacgaggaggcagtgttccggaggggattaaaagcaccagcctgaaaacggcgtgggacgggcgtgacgtggaagtccgcttgtatgcccgcgtgcattggaggcgaaggggggacttggaagttaatcccccaggttacacactgttgtcccctagtatccactcccgaggagcctccaacgaatatattgggcgcccccaagggtccccccaaacggggtgctacaatttacccgaagtcccaatgaaagtgcgcccaacagtgtaaacacgccggaacttttcaatgaaggcttgccgtgcaaacaagcttggggaggccccttgagagaaccgccctttacccaggtcccacttcttggacaaacacaaagaccccttcaattaaggagtagtccccgcattgcgtaaccttccggacaaccagggttttgtccccccacagatgacacccttccttgatcgagagaccaaggttccccatccggagagggaggaggccttggtagggcaaggcgacttgggttggcgcgccaatacgggggtggaacacgactggcccccttagagagccttttggcgactttgcaagttggatgggcagtccaggaggggccacaagagatgtaggagcaggttccccctgtggctagccaggttagacacaatctcctggcggctactaaacattcacggcgaccttttcaagcacttcagccagcggcactatggtggccccagagaccggggattcgggaaggcgtacattagaagagtcctccagagtgggagccagagaaaggcttcgttccctatgagaggca

SEQ ID NO: 547185 - DNA, 363 bp, Homo sapiens
gtcaggagtttgagactatcctggccaacatggtgaaaccctgtctctactaaaaatacaaaaattagccagatgtggtggtgggtacctgtaatcccagctactcgggaggctgagacaggagaatcacttgaacctgggaggcggaggttgcagtgagctgagatcacgtcattgcactccagcctgggtgactacagtgagactccctctcaaaaaaaaaaaaaaaatttttgagtttgttaaaattgttctaggggaaaggggcattcaaatttcaaaaaaatttgagggggatgttaatacctcccttttgtggaacacttttgtcccacccggggggactacagggaaactcctttt

SEQ ID NO: 547186 - DNA, 362 bp, Homo sapiens
  misc_feature (20)..(20): n is a, c, g, or t
  misc_feature (26)..(26): n is a, c, g, or t
  misc_feature (29)..(29): n is a, c, g, or t
  misc_feature (46)..(46): n is a, c, g, or t
tttttaggttccaaacatgnattggnagnatttcctgcctcttggnaaacaggagaggaatggcagcagaaaccgcagctctgcgggtctactttcagtgacacagatcctgaattccagcaaaagagctattgccaaccagtttgaagaccgcccccccgcctctccccaaggggaactgaatcacgtgaaaagcagtttcttcatctcaccatcctgtattcttcaaccagtgatcccccacctcggtcactccaactcccttaaaatacctagacctaaacggctcagacaggcagatttgaggtctccccctgtctccttattcggcagccttatgattaaacttccttctctgctgc

SEQ ID NO: 547187 - DNA, 758 bp, Homo sapiens
cctaacggctaggtacgaggctgggtggtgaatctccttattggttgcgtgcaagaacgctgagctggatgacgcctgtcagctacaagcaggttattcacgaaaaccattaatacgctgaatgatactggctcaatggaagcggctctgctttctgactgagctgcacgttaacggccgtacacaactactggaaagtgcgtcgaggctgtcgcagacggccaaatagagacgctcctacaggtttcgatcagctgaacaacgaacgaaggagcgcaaccggcgtcgctccgcctgccgtaagcatggctggtccaaccgtgccgacccgaccgttgcaactggaccagtcggctgagccgcgcgatccagcacggtctggcgattgccgccgggcattaagagcagcaagaagatctcggacaactatgccgccggaatagtctgtaacgccggcttaccgtcgcttcacaagcgcgccagctggctgacaggctacagccaagaatgtcatcacccgcgttatcggcgaacagcagatcagcgagctggggatgcattcctatctggcggtcggtcacggttcgcaaaaacgaatcgctgatgtcggtgatagacgtacgaaggccaacgcgtcgcgaagatgcaccgcccaaatcgctgctggtgcgctcaagcgttcaccttcgactccggcgaatctcgatccagcctccacaacgctgcgtctcaatgacgccgatatgtcccgccgcccc

SEQ ID NO: 547188 - DNA, 346 bp, Homo sapiens
ggggggggggggggccccccttttccccccaaaggcccaaggggggaattaaaattttcccccaacccccccccccccccttttttacgggggggggggaggggttcccaacattttttttcccttggccccttttgttttggggggaaaaaggggggttttaaacccccgccccgggcaccccccccaagggaagggggaattttttggggcccccctgggttttttttttgggggggggcggttttaggtttttgtttttttaacccggccttttttttggggccccccccccccccaatttttcccccgatttttggcccccccttaaaaggttttttgggga

SEQ ID NO: 547189 - DNA, 568 bp, Homo sapiens
cgaggggggagaataacgtcggtgtcgggtcagctgtgctctgcagtagtctgcctgcagcgtgctgattggagcggtggggacgaggctggtggtgtgtggcagtatgtgggtgatgcagtgtgctggcacaagagcagtggcttgggggagccggcagcagcagtaacagcagcagcagccgccgcagccgcctgccagtaaactgcggaccgtaccccaggggactacccagcctggccggtcctggaaagccgcagctcgggtcccgccgcagtcggcggtgggggatgggcaggcagtggctggtcccgccgtgccgagggttaacccccgcacggtcccaggtcctgagctggaccatgagccctcctccagaaaccacctgcgatcgccactgggccaggtagtgacacaaccagagagcgaatatgagcaaacaaaagaacaacacagaaaagaaaaagcgagaagagaacaacaacgaaagacgagaacagacagcaaagaaacaagagacaagaagaaaaaaaaaacaagaaaccgagaaacgaaagaaaacacgcaa

SEQ ID NO: 547190 - DNA, 899 bp, Homo sapiens
  misc_feature (567)..(567): n is a, c, g, or t
tcgccgggacggaggggtgaagaggagcggaggcagggggatgtggagaacacgggtaggggccgggggcgcgatggggggtggacaccgccggtaggatccgcggcgccgttgtggtggagaccgcgcgggggccagacaacagaggagggtgtgaggacgaacggcgcggtgggggcccaagcaaagggggggtgcgtggagaggaggtcggcgcgaggaggaatgaggggggcgccacaaggggggggcgaggagcacaccgcggcggaatggtcgccgcgcgcttctagacttgcgtggagaggggcgcggaggcgccgacgcgaggacgagacgctgggtgggggaagcccgcggggagggagaggtgtggcgtcggcgcgcgggggccgagcagagaggggggaggagaggccgcgctggggcgcacggagagaagaggggagggagggaatgagaagtgcggtgcgccgcgcgacggcgggcaggtgccttgggggacgccaacgtgcggcgtctgacggggtgagagagagcagcacacgccggggccgacaggcgctnggagagaaagagagacaacggggcgggagacgcgcgcaggcgtggcaaggcgctgcggcagaggagtgtctttgtatggttgtcagggtgcttctgtctttgaggagagcacgaggttgtcggtctagtcttggccatcgggtgaggcgaggcacgaggtgcggccattgtatcgctgggctacggcgcacgcttggcccgtgccccggaggagatggcgggcgttcccacaggcgaggctgcagggcgttccacgaggcgcccagctggtgtgcccccgggccaccccccaccgccgggcgcgcgggcgcaagccccctcccccaaataaa

SEQ ID NO: 547191 - DNA, 406 bp, Homo sapiens
  misc_feature (58)..(58): n is a, c, g, or t
  misc_feature (70)..(71): n is a, c, g, or t
  misc_feature (81)..(81): n is a, c, g, or t
  misc_feature (137)..(137): n is a, c, g, or t
  misc_feature (147)..(148): n is a, c, g, or t
  misc_feature (168)..(168): n is a, c, g, or t
  misc_feature (175)..(175): n is a, c, g, or t
  misc_feature (178)..(178): n is a, c, g, or t
  misc_feature (217)..(217): n is a, c, g, or t
  misc_feature (220)..(221): n is a, c, g, or t
  misc_feature (225)..(225): n is a, c, g, or t
  misc_feature (243)..(243): n is a, c, g, or t
  misc_feature (265)..(265): n is a, c, g, or t
  misc_feature (271)..(271): n is a, c, g, or t
  misc_feature (276)..(277): n is a, c, g, or t
  misc_feature (287)..(287): n is a, c, g, or t
  misc_feature (298)..(298): n is a, c, g, or t
  misc_feature (300)..(300): n is a, c, g, or t
  misc_feature (306)..(306): n is a, c, g, or t
  misc_feature (343)..(343): n is a, c, g, or t
  misc_feature (359)..(359): n is a, c, g, or t
cccccccagcaccacttctacccaagagccccttgccagggagcccttggctgaagcntggacggctgtnnctgaggtganccgcgagggctctaggagaaacggtggtccaggtctctctggggggtgaggagagnatgagtaggnnttgcccaataccaaggggtnccggagnagnttgaagaaggcatagtagttgctgaagaggatgagggcnagnnaganggtctggtgccacttttnagaggacattagggagtaaagntgaaanaaaannaaaaaaaaanaaaaaaaaaanangatgtngaggataagaagggtttgctgaaaaagaaatggaagnggaagtgggagaagtnagaggggatagccacgttgtagtggcctaaggctttgtagaggttct

SEQ ID NO: 547192 - DNA, 1512 bp, Homo sapiens
taaaaaagttaaacaaagacaaaaataaaaagtgaatccacaaatttaaccagaagccatacttctgcacatttccagtttgggctttcatttaccatggactatccaaatactcgggctactaccacagtggattacaacccagaaagagtgtactttaatgtggttaggtgctcgtgataaagaagaggagttaaaaagtggtgtatttaaaaccacagcgagatggagacgtgagagtgcttttcatataggtacgcgtgagggtgttaccataattcatattgtcaaaataacatagcgtccaagtcacccagagcccacgtgaactccactacaaaggccaaacaacacaaaaacatcaacagagcacacgtgcacagcacacttaaatcacaacaccgtggtaggcccaaaaacaaaactaagacaatgggtacccctcgtgaggcctcaaatagacagggctagtataaaatctccacgcgggggcccgaaaacacacacccgggggtgggcccaaaacggtaaaacctacactgaaaacatgagtggacactccagcgaacacaaagccgccaagaaaacagccaccgctatagaagaaacaccaagctgttacccccggtatactacccaaacaacaccagactattcagtgcgcacaacgaattggcaccattacaacacaacccgcacccccatccaacacccgtggggacaaccccgaaggggacaactaagtagtacaagcgccaaactaacaaccaaccgggcaccaggcggcctaaacaagaacgggcacaccaaactggcacaaacacactcccccgttaaaaacaagcagagacacgccgtgagtgggctaccgtagagcggttgactccccaggatgaccatcacaaaatccgagaacccaaacttacccacacgagaaacggaaatcaacaggggagtacatagagacaacggccataacaaaaacaagtgtggtggcacacacaagtacgccatagacgcagccaaagcgacccaacgatagcaaccaccataactatacaccataataacccagacgataacaggagtgacaaagcaacaaatgtgccagcgaccgcacgtactactaacgtgggaccaagaacaacgcggtctagtcgccgaacacccagcgcgcaaccaccaacagagcagcgtggttaacgagacaacatagacgggcacagaactgtggcgcaccagacgcaccgcaggtaacagccaacacataccaacggcaggatgaaaacaccacacgagcgtgccccaacacaatggggaacaaacacagcaaccgacggcacagtggaagtacaacaacgtcgcgaagtgcgcacagcagaagcaacctagtaaccagacgagacagaagagtcggcccgatcagaacaagttggcagaacccaccatgggtggttgatcgacacatcggcagtaactgtagtgagacgcagagcgaccagaaggagatag

SEQ ID NO: 547193 - DNA, 139 bp, Homo sapiens
atattggagccttattgtgaagaattggtctctgtggtgtgatactccttcccaggatgtatcatttctcctcccctagtgtccttaagtgctcctccacaggaaacatctatttgggctttgatgtttaataaagtag

SEQ ID NO: 547194 - DNA, 297 bp, Homo sapiens
gctccaattgcactcgctttttacgcagagagactaacttggcattcttgtccagacgatgaagctcaataattgttcacattgttctcttatacatctctccatatacatacaaaaattgggtctcagatcttgactccgtcgtgtgacaaaatactcacatcgcaccgcaaatcaactttgatatgcttgtctgaaccctagcgttggcagagttcgtctgggggtttttcgcatccctagccactggttacttcgaacaaataaataaaagctttctgtagttgcaaaaaaaac

SEQ ID NO: 547195 - DNA, 807 bp, Homo sapiens
  misc_feature (643)..(644): n is a, c, g, or t
  misc_feature (705)..(705): n is a, c, g, or t
  misc_feature (713)..(713): n is a, c, g, or t
  misc_feature (752)..(752): n is a, c, g, or t
  misc_feature (759)..(759): n is a, c, g, or t
  misc_feature (773)..(773): n is a, c, g, or t
  misc_feature (776)..(776): n is a, c, g, or t
gtaaccatgtacacaatggaaaatatttctgtgacttggccgacctgttctttgcaggaacagagaccaccagcacaactctgagatatgggctcctgattctcatgaaatacccagaaattgaagagaaacttcatgaagaaattgacagggttattgggccaagccgtgcccctgcagtccgagacaggatgaatatgccctacatggacgctgtagtgcatgagattcagagattcatcaacctcgtcccttccaacctgccccacgaagcaacccgagacaccgtgttccgaggatatgtcatccccaagggtacagttgtaattccaactctggactcccttttatttgacaactatgagtttccagatccagagacatttaaacctgagcattttctgaatgaaaatgggaagttcaagtacagtgactatttcaaggcgttttctgcaggaaagcgcgtgtgtgttggagaaggcctggcccgcatggaactgtttctgctttgtctgctattctgcagcattttaatctgaagtctctggttgaccctaaggatatcgacctcagccctgttacaattggcttggcagtatcccacgcgaatttaaactctgtgtcattcctcgttcatgagacnngtgccatcattatcccttacaaactgactgtttaaaaaaactgccaagcgggctgtgaganggctcagngggtaagagcacccgatgctctccgagtcggagtcaatnccagcancacatgggggtcanacnatctgtatcgagaatcgacttgctctgaagt

SEQ ID NO: 547196 - DNA, 311 bp, Homo sapiens
gtcgacgtcgtttcgaccaaaggcggcgtaggcaaaactaccatcgaggccaacctcggcgctttttgtgcggatgcaggcctgcgcgtgctcatgatcgacctagatcctgcacagccttcgctctcctcgtattaccaattggtcgatgaagctcaaggaggcatctacgacctgctggcattcaatatcaccgaatcagccaagatcatatccagcaccacgataccaaacctgtcgcttgtcatttccaacgacatcaacaaccaactgaacagcctgatcctgcaagcacctgacggacggttgcg

SEQ ID NO: 547197 - DNA, 652 bp, Homo sapiens
gattggagaagagggtaagagtgatcttattgaattgcattttgtctaccaatttagtgcccacattttccccagacatatgtgaggccctcatgttcctggcacagaggatgagtcacgtttttcggtcttgtgcctttgtctgtgcctttagagaggaccagtcctttgtgaaataaaccaaactgctctggtaatgttcgaaagtctgtaatgccaaatgtatttgactgtcaaattcaatcaggaagggaacgatgatacagaagaaagatctcgtgtttcaagttaattgtttaaagcatgttgtgtttcgtggaatagccatcgttagacaacgatataaatcctttacctagtatcatgcttccgcataccttttcctttcattctgcgttacgtacaatacttaccttgaaagttagcgagtgaacactcccagtcaccatgcatagtggaaagcttcaagaaataagaataataataaaaaagttaaatattataagtgataacttgtgcgtgcacactgggctcagtcctgtaatccagcactttgggaggccaaggcgggcggatcactcgaggtcagagttcagatcagcatggcaagatggtgaaaccctgtctctactaaaactagaaaaattagtgg

SEQ ID NO: 547198 - DNA, 210 bp, Homo sapiens
  misc_feature (69)..(69): n is a, c, g, or t
  misc_feature (82)..(83): n is a, c, g, or t
  misc_feature (85)..(85): n is a, c, g, or t
  misc_feature (88)..(89): n is a, c, g, or t
  misc_feature (97)..(97): n is a, c, g, or t
  misc_feature (112)..(113): n is a, c, g, or t
  misc_feature (141)..(141): n is a, c, g, or t
  misc_feature (145)..(146): n is a, c, g, or t
gcacagcctcccttccttctttctccctccgcctcccgagcaccagcgcgctctgagctgcccccaggngtccctcccccgnncnagnnagcccatntggagggaggaagtnngggaagaggagaggaaggggagccggancganntacccagacagagccgggtgcacatgggtcttgtaggtgtgaccacgcagatcaacacggctgt

SEQ ID NO: 547199 - DNA, 401 bp, Homo sapiens
  misc_feature (93)..(93): n is a, c, g, or t
  misc_feature (262)..(262): n is a, c, g, or t
agtagttaaagactaagtgaattgataccatggaaagtactatgggcccaggaacaaactaatactgtctattattattactaatctgtttcnaggtgaccagtgtgtgaaaatgtatttttcactgacataactcttctatgacattttaagttatgtagtgcatgttcataccagtatattaccactggggcatggtggctcacatctgtaatcccagcactttgggagggcaaggtgggcaaattgcaaaaattagccnaggcatgctgacatgcctctagtcccagcttttatggaagcagaggtgggagaatcacttgagcccatgaggttgaggctgcggtgagccgagatcgtgccactgcaatccagcctggacaacaatgagaccctgtctc

SEQ ID NO: 547200 - DNA, 261 bp, Homo sapiens
actctgaacactgggaaggtcatgggatttggattatctaggccatcttaggggctttagctcttatgtgcagaagagatgggagccatggagggctttgagcaaaggagtgggagagctggcatacatttcaaaaggattgctgtggctgctcggtacaaaatcggtaagtgacagtagcagtactaataactgtttttttttttttaattgttgttgttgttttgaggtagggtcttactctgtcacccaggcttagag

SEQ ID NO: 547201 - DNA, 376 bp, Homo sapiens
tgaggtccgggacgcgggcggatgggcagctgggtgctgttggccacgaggattcctctcattcggtggaaggttccattcggtagataattcgggatgggcccggtcattccccggggcgacacctcgtcgatcagcctagtcgagggatgtcaagtgcgttgcggcgcggtcgtaatgagtcgccagtatggtgagtttgtgggctctacaacgtcggcacagcacagcgcaccgttaggccgtgcgagtcatcccaagcttcggttggttctcgacgtcgttgttgctgcggccggggttgccttgctggtgtggggaattatggtgatggcctcgcccacagtctcttgtcgaggttcgcagacattcttga

SEQ ID NO: 547202 - DNA, 1534 bp, Homo sapiens
  misc_feature (328)..(328): n is a, c, g, or t
  misc_feature (651)..(651): n is a, c, g, or t
cggacgcgtgggtcgacccacgcgtgcgaccacgcgtccgaatttgaatcaacacaatcgacccgacaggcctaattattagcatcatcgcctctactatatttgttaacccaaatcaacaacgacgctatgtagctgtgtccccaagtcttttcctccgaccccctaagaaccgcccctcctagatagtgaactgacctggactcgctaccgcctcagaatcatgggcgagccgagcggccatcgttagtccaagatgacatccaccgtattcagcgaaaagaagatactcatacgcttgcgtcgtagtaccttaactctcctcttnctagaaattcatcgccttagagttagtacacaatttcgagcagacgcaacgacgtaaacttaaatcgagtatttatatgattctatgctatgcgcatatacgcagcatctttataccacctaagcctgtgaggcgtgatgcatcaaccccgaaatgcaggggctacactcgaggcgcagaaagaccgcacttgatacaacggcgaggggcgaccataaccgtgtgcccgtgatattcctaaacgaaacgcctaatttgagggccgtcccccctgtcgcacacctgaacggtccgaatcggccacgtggacattgtttgagganctgttcgaactaaacaaacccctgttaggggccgttcgacgtaaaacaccagtgtcctaactataagcgtccagcttctgtcgaacctgacgcgcagagaaaagcttgaatcgagaaagcgtcccttgtgaggcccaaacaatacattgtaattaatggaaccttaaggacttgtgaaccatcgagaattaagactgtaggtcatcacggctacacaagcattagcccttcctggttaacggggatcttcaccaatttttaatagaggcttccacccttaagaagccccaaggggtccggaacggcgcccccaatcggcgggggggttccgaatcagatacacgttgggcacggcaagtcacatcctttgaaaagaccctaagggcggggtcatgggctattaacttacggcctcgaaacaccttccattccttcaagcccccttggacaaagagagcattagtggcttacccccttttcatggtagctattccccttatgagagggattacattataacaaaggctccatgtctgggccttacggatcaactgggcctatagaagtccggctacaatggaacaaacattgaaacagcaggaccaataatgcctgcggagaacaggagcaatctgaatgtcaagaacgccgtatagttaccggggaggcacattcgaataataggcacggggaaattcccagtaaatagtggcatacacgcagataagaagcgccagcagggtagtaaccccagcaggacaactcccaccagacgggggactaagcgcacccaaccagcaacatgaagacagcgatggacacggcaataacacaaacaaggagcatcaacgcggcagaccctaccccacgccaacacaacgag

SEQ ID NO: 547203 - DNA, 504 bp, Homo sapiens
attgcttatacacaaaacgatggctcatttatacatgatatgctttgaaatgaagcacgtgacttagtatgcacagaacagttcagataatatctaccatcctagcctgaatccttctacaggtgcagactaaatgatgtcattatgcatcccgaactacacggaggttatattcatttccaacacaggcgacctctgcaatgtaaaaatagagatgcgttttaactaaatggaaagaatggtttgctttggatgaaatgtaccatccgacacgctcttgagcttattaaaatcactgtggttagagctctctctttacaaggatgatggctgacataaaatatttggaaggattaaaccatccgttacatgaacggtcacttgttagatactaaattcggtttggattgaaaggaaaggtcgatttttgtatttattgtacgcaccaaccatctccgtcctacccatgcctgcatctgaaaaagggctgactccaagatgaag

SEQ ID NO: 547204 - DNA, 293 bp, Homo sapiens
tcttctccgaaggcacatttacatttttcctacaaggaaatactgtgggctcactgggagaatattggatatttgggggctaggccacctatccatgaagaaggtccgcgaagatctgtataaatgggtttggtcagaaccgatggtaccccaggaagaacacttccagtcatgggcccggacgggaacgtaggacaaagcggttaccagaaaaaaacgcatctctcctttgggacgtaccatccccggtctacatgagctcggcgttgccgtacttgggcgctgtgcgggac

SEQ ID NO: 547205 - DNA, 326 bp, Homo sapiens
tgatcgagctcggccctcttgatgcaagtgtccagagttgttcattccttccgccgggttcgtggtctcgctggcttcaggagtgaagctgcagactttcgcggtgcatgttacagctcataaaggcaacacagacccaaagggtgagcagcagcaaggtttatcggtgaagagtgaaagaacaaagcttccacagtatggaaggggactccaacatggttgctggtggtggcttgggtgggctggttttattcccttattttgggcccaaccaaattggtggtggttggtcccttttacagaaaactgattggtcccatttaaaa

SEQ ID NO: 547206 - DNA, 124 bp, Homo sapiens
  misc_feature (26)..(26): n is a, c, g, or t
tctcatcttctgatcccatatcatcntgctgcacgttgagcacaagtggtggtttactacttgagtctgctttccgtgggcaaggggggtgtcccctatcagcgtgtgttctattggttgatga

SEQ ID NO: 547207 - DNA, 127 bp, Homo sapiens
taagagcaacttacttctacaagactttcatacagccaccaggaccttaacacgattctaccaggaacactgatcccacatacgtgacgcacatagttgtgtatgtgaacaataatagactccgatc

SEQ ID NO: 547208 - DNA, 230 bp, Homo sapiens
attaacaccatgctgcttggaagaggtaggagccaagggaacacagcagtgccatactggaatgtgctggggaggcccgggcaccctgtatagtctggcaggctggtgtcactgtcgccaggcaggcagcgccgggttcaggcactgtctgctgcgtggtctggtgcagtctgcgtctggttctgttggggttgggccaaggttgtggccggggctggggcggaggcatc

SEQ ID NO: 547209 - DNA, 156 bp, Homo sapiens
tggtcttggtgggatggagttaataaaaaaaactaatcttcgagctctgaattcctttcttctacttgtccagctctattactgagacttcccggagcttttggctttcctaaaagcgtgtccaaatttccctgaaagcctaagttcagagccagg

SEQ ID NO: 547210 - DNA, 737 bp, Homo sapiens
ttgcgagtcttatacctcatgtggcactgtacgtgtggataagtccttgtcagcatgtcccttctgtatgatacccagaaagtacataccaatgcgtgtggaagtatcacccaattgtatttgagaagttcacaaaatatgatcccgaatcaatgtctgagtgctgaggtatcttactactgaggatacatcagaatatattgtactgcgaagtatgtctgactattgcactggggaacattggtagggcaattagacaaggagaactgagatgttgacttcaagttttctggtgctatctcgtgcttaacatcaagatagtctgtgtcggacatgggtggcaggatactgccatttaacatatgttttgtagcaacgctagactgtggcgttgaaagtttgagacagatacagaaggagtgtcaactcatcatttaaagtgttcgcggtaattgtgactgcctcaggtctgccttttttctctggcagcataaatgcagtaatcctctcccaattgagcagcacacattttcaattctcatgtcgagtgatttgaaacatgttttgggggactgtgaaaacctacacgtttgtgtcatgagaatgtaagtcttttttctacttgtaaaatatagtaggttcactgagtaactaaaatttagcaacctgtgtggataatggatggagtgcgaatattgtacttactgccctaagttgattgacgctttggaacggga

SEQ ID NO: 547211 - DNA, 181 bp, Homo sapiens
gctatcaggccaggatgacctactccccattgttcttggaaatctccagtgctgctgggcagctgggcagagcactgggaagtgaagtccatgagtgcccgattcctcttagagaaaatccctagccttcagatcttggtgttttgacttcttactatagatgtttttaaagttcccaatt

SEQ ID NO: 547212 - DNA, 119 bp, Homo sapiens
taagacaactcactggccagttgtaatttacaagcaaaagcctgctgagtggattacagctgggccaagtacagtacgaggcaataacaaattagtgtgggtgattctggaattggaaa

SEQ ID NO: 547213 - DNA, 162 bp, Homo sapiens
atgggtcagatggacaggatgtaacatctgacaaccttctgggggacgaagtcttccaggggcgtctcggaagtaggagtcactcatgtagaaatatactagactgttcctatacttcccacaaggggcaaggagcacggtcagccccctcgattggtgagt

SEQ ID NO: 547214 - DNA, 398 bp, Homo sapiens
gacatgtgatgagctcacatgagggaatcgatggcacacttccaaggaatacggagacagggccagacatgccatggcgactcggtgcaccgggggccggctgtgcccaagagagccaggcattcagcttggattccaagttccttactgagagccccactgcttgatggcaagctctaggcttgcttgggatcggtgactttgctcatgaagaagatgttctgggtgtctgtaggggacactgatcatcaggaagggcctgttgcaacgcacaagggtccttgtctccactaatgcagaaaggagggtgatttggagtgcggtggcagctgctgcttctgtgccctcctcaaaatacatgaagcacagccttatggatcacctggaagactagtaag

SEQ ID NO: 547215 - DNA, 849 bp, Homo sapiens
ggcacaatgccgccaatctctttgcttaaacataacaagaatcacctttgctccagttcccaacaagttcctcatctccatctgagaccacatcagcctggaccttagtattcatatcactatcagcatttttatcaaatattaaacaaatttctaggaggttccaaactttcccacattttcctatattcttctgagccctccaaactgttccaacctctgcctgttacccagttccaaagttgcttccacatttttgggtatgttttcagcaacaccccactcccagtaccaatttactgtattagtttgttttcatgctgctgataaagacatacctgtgactgggaagaaaaagaggtttaatgggacttgtagctccacatggctgggaggcctcagaatcatggcctgaggcaaaagttatgtggtagcggcaagagaaaatgaacaggtgcaaaagcggaaaccctcgataaaaccatgagatctcgtgagacatattcactaccatgagaacaatatgggggaaactgcccccatgattcaaaatatttcccattgggtccctcccacaacacgtgagaattatgggagtacaattcaagatgagatttcggtggggacacagagccaaagcgtatcagaccccgtctctacaaaaacaaaaacaaaataacaaaaaagtagctacgtgtttgggcctggctttcacttatttaccaaggatcacgacctgaacgtgacaactggcaggccagggttcctgaccttggatgcacatgggcaccttgcccactagaacatctgtgccaagcagtgatcccatcaatcatacggaaaattaca

SEQ ID NO: 547216 - DNA, 350 bp, Homo sapiens
  misc_feature (2)..(2): n is a, c, g, or t
  misc_feature (219)..(219): n is a, c, g, or t
  misc_feature (232)..(232): n is a, c, g, or t
  misc_feature (268)..(268): n is a, c, g, or t
  misc_feature (298)..(298): n is a, c, g, or t
  misc_feature (307)..(307): n is a, c, g, or t
  misc_feature (320)..(320): n is a, c, g, or t
  misc_feature (328)..(328): n is a, c, g, or t
cnactttcttaccccagatagcctccgggcgctgcctgtagtccatgctgacagctgtaccagttagcccgccaaagactgctgacaagctggagacggttctggtttcaactacgggtaatattgatatcggaagtattctagacagatcctcggttgggttttctagctacatgtttgtattgcacagatccccacctgacatcctatagtgttgtnttcctgtgtgttncggggcttctgggcagctgggcctgcccggggaagnccttgcaggtgggaggccatacagagaccnactgtgtgncactgagcgtccnactgctgntgggcaactggaggactgcagg

SEQ ID NO: 547217 - DNA, 214 bp, Homo sapiens
gacactatcttctgacataacggtgtccactaacagcctcatacagacaccatggcgcatctgactcctgaagagaagactgctgtgatgccctgaggggcaaagagaacgaggatgccattggtggtgaggcccttggcagattactggtggtctacccttggacccagaaggtctcatgagtactatgaggatctgtcctctcctgatgctg

SEQ ID NO: 547218 - DNA, 399 bp, Homo sapiens
atgtatgcatttgccacaatggaatgccaaaccaatgatagatggttctaaggtaggtcaacacataagatcctgatgacctttgcagatggagggactgatgaaaaaagagggaggcggtgagtggtgggaaagtccttcattagaatcatatgaattaaaaacagatgcctgtgaatctccttattgaaatgtttggtttagaaatctgacctagaaaatcggtggctccttctgccaggaaacgtcttgagttcccgcccatgcttgacagcctctcattggagttttgatgacttgaagtacaaggaaaccagacaggaaaggtggaacctgggcagaaaaactctttctggcttcctaaaaatgtgaaaaattaaatgggagctatctttacat

SEQ ID NO: 547219 - DNA, 428 bp, Homo sapiens
ggggtacactgacttgagaccagttgaataaaagtgcacaccttaaaaaaaaaaaaaaaaaaaaaaaaaaaaaaaaaaaaaaaaaaaaaaaaaaaaaaaaaaaaaaaaaaaaaaaaaaaaaaaaaaaaaaaaaaaaaaaaaaaaaaaagggggggcggcttgggccaaggggatttaaaattggggaaggttaaggaagggggcgaaaatgggggtaaattgggaaaatcggccaaaagggggggggattaaaaataaaggggcgggggttaaaaaagttgggaatgggaaaaacctgggggtacccaaattaaagggcttggaaaaaaatccccttttggcaagtgggggaaaaaccaaaagggcccgaacgaatggcctttccaaagggtggcaaacccgaaagggatgggtggaggcgtttttgg

SEQ ID NO: 547220 - DNA, 349 bp, Homo sapiens
cttttttgggtttttttggtaaaaaaaaattttttttagggaaaaaaaaaaagggaaacccccggccccttttttccaaaaaaagccctttgggggaaaaaatttcccccaaaaaccccgttttaaaaaaaaacccggggagggaaaaaatttcccaaggtttttggaaattttgggggaaaaaattatccccgggttgcgcaaaaccccggggttttttcccaaaagggaaaaaaaaaccttttttttttaagggggggagaaaaggccccggtattttttcctcccccgcttttttttaaaaaaagaccccccgggtttggttaaaaaaaaaaattttggtgcccca

SEQ ID NO: 547221 - DNA, 551 bp, Homo sapiens
tggcgacgggaatggagacgctgcagggcgcggaccccccaaagaacacgtgacccaccaccccgtctctgaccatgaggccaccctgaggtgctgggcccttgggcttctacccgtgcggagatcacactgaccgggcagggggatggggaggaccaaactcaggacaccgagcttgtggagaccaggccagcaggagatggaaccttccagaagtgggcagctggtggtggtgccttcgggaagccggtctcccagcccaccatccccatcgggggcatcgtggctggcctggctgtcctggctgtcctagctgtcctaggagctagtgggggctgtggtgatgtgtaggaggaagagctcaggtggaaagggagggagctgctctcagattccgaggcgccagggggtacctttccctgagagcccgtctccagatgtggagaggggggtctcagagcctcgagaggatgttgggctgcagacctggggccggacgggcgcctgctcggggggtataaccagttcgcctaggagggcaaggattacat

SEQ ID NO: 547222 - DNA, 126 bp, Homo sapiens
actctagacggatccccagcgggaccaatcacttagagcattaaaatcttcagactcaacaagcatcttggcagtcagaaaacacacatttggaaaatgagaatcagaaggcggggaacaatcact

SEQ ID NO: 547223 - DNA, 735 bp, Homo sapiens
cggctggtacgggccggctgatgactcggccgaggcgctgctgctctggggagtgccatccgaggagctgacgcagtgcgcaggatgctcagcttgctactgctctggagtgtctcatcagatatgcccatacgaggcagtcttgggatctggaatgttggagctcagctgcatggataggcagctgcgcgtgttcgttcccaaccagtgagctggagaaggtgctccccacagaccatcctgtataagtactatgagcgaagaagccgaggaggaggttgcggcagcctacgcctgacgagcttgtcaggtgcccgtcctgtagctttccggctctgtcggacagtgatgtgaagaggttcagctgtcctaatcctcagctgccgaaaggaaacctgtaggaagtgtcggggactctgggaacacgtaacataatggcctctagcctgtgaagagctggctgaaacaagacgacactcaagtaccgtacctctattgaagaacaacatgactgctgtcccgcattatgaagagatgccagcaagtgtgggactggcctcagtcaagatctgacggctgtagaccgcgatgtccttgccgctgtggtggcctagatgtgctacctctgtcgagtttctattatgggatatgaccatttctgccaacatccccgtcaccaggagcccttgccaggagtgttcaagatgctctctctggaccgatcccactgaagag

SEQ ID NO: 547224 - DNA, 183 bp, Homo sapiens
gaaattagatacatcctaatccaaaagaaagcatattttttataaaagtgagaagattttagaacagatatttcttccaagtctgacgagaaaaaattaaaatacagataaacattgcattttacagaatgtcacagattcagagatagtgatgtcatctgtcctacacatacacacttggag

SEQ ID NO: 547225 - DNA, 167 bp, Homo sapiens
ttcagtactgtatgacagttcatcctgatttccacacagttgttgctgcctattgtggtgccgcctccggttaggggctctcagccatctcttacctctgacctcgctggtcttggcattgcgcccgcagatgctgtctcccttatccaatgagggaggcccagaat

SEQ ID NO: 547226 - DNA, 298 bp, Homo sapiens
tatttcttgtggttggatgaatgataagggttagcatatatgaggtgtttgcagctataccatattgtttctgttattttattatattttgatatattacatatgcagtaattgtactattataggtgagctttatgagtgagtgtcctggtgacggctcctcctggggagcccaggaccagctttcctggcaccttgaggtcccctcacccctgtcccattctcctgcattaccccattctactctgtcttcatattgtatactatagatatttaactcttaaaaagacaaaaaaaa

SEQ ID NO: 547227 - DNA, 220 bp, Homo sapiens
atgggtctttcacctcccaagaagtgtttatcaccccataaggtattgttctaacattaagacaacatatgttatatagtcatcttagtgaccacatcattgaattcaactctgagtgaaagatctgtgtcttaaatcttctacgtaggactggctctcaggaagctatgttcactcgcctggcatgaagacttctccacaattcacacagtctgttgac

SEQ ID NO: 547228 - DNA, 200 bp, Homo sapiens
ttaattgaccaaacacgaacatgatacgagtgaaggtgatcattataaatgactatacttgaaattcatctgaagtagggaagctcgagaacagacaaagaacgctaatttcaaaaatagaaaataataaaaagaaccacctacatccgctgactttctacatcatgccggcagtgctctatactctcctgtcctaggct

SEQ ID NO: 547229 - DNA, 408 bp, Homo sapiens
  misc_feature (7)..(7): n is a, c, g, or t
ggatcgnttcctgttttagctctgatgtatgcacgtcgactctttagatcacccacccatgtgccgttcccaaactctgaatttggagccggcatctgtttatgcctctcctaaggtggctgttcgtttccgggggaatttttcctcctttcctttccagccatttaaatcctgcgtgtctttgaaggtccagccagaaagttttcttcccctatgaaatcatcctgaagtaatcaattccatttttaaggcctaaagcctattggttcctgacctatgctcaaccttgccctttttccaggtaaatgattggctgttggctttaggcaaaacctgggtttggcgataaatcattcagatttaacttttttttatttttcttttttttgaggcatggacccgcccatt

SEQ ID NO: 547230 - DNA, 281 bp, Homo sapiens
taactactgtacactacgaccgcataggtgttcagaaaaatactaagtggcatacaaatccagttagaatctgattttcaaggttatacaactatggtaattttcatttatatccatttagtctacatttcctctatattttgataaatacaaatcttcccatgctttttttaaataagaaaatattataagtctagtcattggtaccataaatattttatacaatttgcaaaccacaaattcatcaaattgtcgattattctacagaggcacacaaagcc

SEQ ID NO: 547231 - DNA, 578 bp, Homo sapiens
ggatctggtccgtcgctttacaagtctgtgactgtgactgacctggtggattgggtgcatgcgcttcacgtggatcatggacaacacactgggaaggtggtcctctcgtggctccatgcgtaacaacaggccgagaaggaggtgaagagagatcccattaactcctccaaatgtggacggggcaacagaaatgggcgtgatccaagccatgactcctaggagcttctctccaaaagtcacagcgacggcgttggatgccaatcgaggtcctgtgggggacattgcagtgacataagcgacattggcaaagagatacacaaatgtgaccagtgggatggagatgaagatggctctgggaaggttcttgtagggagtcaacaagctcctcagtcacgtaattcaggaaagttccagcctccataggcaaaggagccctgaaggaaatccagtgcgatgaggccgatgtcaggttcgctggaaattctcaaatgcatactttggctccagccgagaagtactctcctttgcatatctgtacaatccccatgatgataatcagggccaagggcaggagcttc

SEQ ID NO: 547232 - DNA, 309 bp, Homo sapiens
gctcattcacacagtcttgcagactaagtctatttgtctctgtatcctctacaactatacacgtgtcgagcacatggcaggtgctcagtaaaaaagttctaaatgggctgggtgtggtggctcatgcctgtaattccagcactttgggagtctgaggtgggtggatcaggaggtcaagaggttgagaccatcctggctaacacagtgagacaccttctccactaaaaatacaaaatattagccgggtgtggtggtgggcgcctgcagtcccagccacttgggaggctgaggcaggagaatggcagggag

SEQ ID NO: 547233 - DNA, 281 bp, Homo sapiens
ctcgccatatgtcctcgttcctaaacattttccttatcttcacctcagtagtgcgatcatcatctaccccgtgggctcaggccaaaaatcgcgtctgtctcattcccacatcccacttctaatccttgctctaatccagttctacctctgaaatataccctaagccaatgatgtcccactgtactcactcctacaggcctagccttttccctggttgaaagctgtctcctcctgggactacagcaacagcagattgccaggattcgagctccatcaggaaa

SEQ ID NO: 547234 - DNA, 238 bp, Homo sapiens
  misc_feature (76)..(76): n is a, c, g, or t
gtccccaaaataaatttgagattgattgatgttgttgcatgtatcagcacttcaatcttttgtatgaatacacccncagttagttagccattcacccataaaagacatttgaggtgggcacggtggcttatgcctgtgatcccagcactttgggaggccaaggcgagcagattaagaagtcaggagatcgagaccattctggccaacggggtgaaacccccgtctctactaaaaatac

SEQ ID NO: 547235 - DNA, 285 bp, Homo sapiens
agatgaaaattcaggaccgtggatcagaagcttcaaggtgtgtggctctacttaataataggcacgatcagtaggctaagaacgacgagtgtttccattgagacatgatctaagaatagccttctatagaggcaaatcatgtactgtagaaactagctagccagccaccaagatgttaccattaaaggattccttgtaactagcaactaaccatgtttaaaaggtcttagccagaattacaaaaaacaaagcatttagaagtaataacttatggaatacaaagca

SEQ ID NO: 547236 - DNA, 133 bp, Homo sapiens
agctccgggtacactgggaaagagggggaaagcctagcctgccagccagacagacagactagacgaaagcccccgctacggagcaacggtggccacatctttttaaaatgaacacaaaataacaaagacatag

SEQ ID NO: 547237 - DNA, 726 bp, Homo sapiens
gctctcttcaccctgcgccgtcatgtctaagtcagagtctcctaaagagcccgaacagctgaggaagctcttcattggacgggttggagctttgaaatcaacgtgactgagagcctgaggagccattttgagcacattggggaacgctcacggagacatgtgtggtaatgcagagatccacaacgaccaagcgcgtccaggggcttcgggctttggtcacatcatgccactggggaggaggtggcatgcagttgatgcaatgcaaggtcatgactaaggttggatggaagagttgtggaacccaaaggagagctgtctctcaggagaaagaatcttaaaagagaaactcgaggtttgcccccaagatttaaaacttggttgaaaaaataggactatttgttgttgggtggggcgactttaatatgatgaatgacatggtgagagaacattcaccttaagagcattatcttggaacagtatgtgacacaacatttgaagtgattggaatcagtgactgagcgaggcagtggcacagaaagaggggcctctgccttttgtgaacctattgaccgagcatgattccggggggtcagattgtcgttcagaaatacgcatgactgtgaatgggcacgaagtgggaagtcagaaagggccttgtcaaaggaagaggatgggtagtgctgcaccagccaaagaggacgaatggtcctggaacttgcggtggga

SEQ ID NO: 547238 - DNA, 609 bp, Homo sapiens
  misc_feature (213)..(213): n is a, c, g, or t
gttcttttagcagtttcataattgaggtcttagatttaagtctttaatccatttttacttgattttgtatatggcaaaagatacgggtctgtttcattcttctgcatacaggtatctagtttttccagcaccatttttgaagagactgtccttttcccaatgtatgttcttggcacctttgttgaaaatgagctcactgtaatatatggattngtttctgagttctctattgtgtttcattggtctatgtgtgttttttttttttttaaatgcccagtaccaggatgtttgggtaacaataggcttggcgcgtaattgaagtcccttaatgtgactccttccaggttggtggtggctaaggtccttatagcgtaggacttgcagctaacagttacatatacatgatggaaaaggggaccacgctctagtaggagcccgagggaggagaggtgccaggggacaaattctcaaggacacaagtgggaaaccacaacgccccagagggtcaacacaatacagtggccacagagccccccgggatacggtgcgcaaacagaggggggtggcccccatgacccgaacaaaatgaggggatttaaaaggcagaag

SEQ ID NO: 547239 - DNA, 776 bp, Homo sapiens
agcggagtggcgggaggtggaggcgataacgacttgtgttgtgagaggcgcaagctgcgatttctgctgaacttggaggcatttctacgacttttctctcagctgaggcttttccatccgacccatgatgctcttcaagttcggtgctccgcacagccccagacttggcgtcctgagaaatggatggtcgttcacacataccactcttcaaatcccattcatgacatggattatcagtgcagatggtaactgactgaacacacattcttatggagaaacaggacgtcccagatatccatccattttggatgtaccttctcttctgctcccaatatggaacatgtactagcaagattgccaaatgaacgaaggcttagttcgattgtataagcacagaatcacaaagttgtcagaaagaagtgcttcaaagaatggatggatcactggaatgccgatcttatgagcctggccttgggttcctggtgaacttaaacattgattacagcagcaggatgatcaaacagccaaatttagggacgtaaaagctggtgagctgattggaacatgcaaaggtcatcaatgcagactcaagtcagtagcctattctacgtttgacgaaagctgtatctgtacgggtggaagagatggccaaataatgcgtctgggatagcaggtgcaacaaacacacatgggtcccataggcaagtgcacatcaaatcagcgagagctcacaaacacatcagacaaaaaaacaccattagaaaacccagcacgaa

SEQ ID NO: 547240 - DNA, 159 bp, Homo sapiens
ttcgacgggcttgcggttgatgtgagatatgagcggcttcacctgccacactgcacggagtgcacagcgtcttctccagggcggcggaagtagctggcccagctcgcgggtgcccttcttaggctcgtgccctgaccctggctcatgaggccctggagg

SEQ ID NO: 547241 - DNA, 92 bp, Homo sapiens
ttcccttttccccccccccggggggggggggggtggggttttttttttgggaccgccccatttacttttttttttggggcgggggcccccca

SEQ ID NO: 547242 - DNA, 472 bp, Homo sapiens
ccgccgccatgtccgcgcatctgcagtggatggtcgtccggaactgctccagtttcttgatcaagaggaataagcagacgtacagcacggagccaaataatctgaaagcccgaaactccttccatgcaacgggctaattcaccgcaagaccgtcggagtggagccggccgtcgatggcaaaggggtcgtggtagttatgaaacgcagatccggtcagcgaaaacctgccacttcttatgtgaggaccaccatcaacaagaatgctcgggctaccctcagcagcatcagacacatgatccgaaagaacaagtaccgccctgatctgcgtatggcggccatccgcagggccagtgccatccttcgaagccagaagcctgtggtggtgaagaggaaacggacccgccccaccaagagctcctgagccccacacgcccgaagcaataaagagtccactgacttccaaaaaaaaaaa

SEQ ID NO: 547243 - DNA, 1819 bp, Homo sapiens
  misc_feature (1184)..(1184): n is a, c, g, or t
tttgttttttttttttggtctcaaaaatctgtaaaactttattcgtgttccattctttgcgccattataccataaatctggagaaagcaaaaatgtttcgtgttaacaatagataagagggccctctttacccatgaagatcaagaacctctctaaactgagcaagggggaatgatagaaaccgcctctcccccgaaatcccgcatgtagctgacccttgttcgattctgtagacaatagccttcagctctgatgtggacccggagtgacccctgttcttatgggccaaattgccataaaggagagggacctaacgaaaattcagataccctagagcttcgcaagccgagatacgttggctagaagatattcagccgagttaaaacggcgagcattacatattacgtcaaagtggaactccaattaatatcttagacactcaaaagcggcactacagagtttaccctctaaggggacattcaacccagtcgtcgatatctcttatttccttagaaggtctcgatgtattctagaaccaactagagggtgtttctagcggcacctcccgaaattggttgtgagaaattcgggggtacaacttcccccggaaaatgtggtgttgctcggaaccccgctcgatcttatttccacgaagcgggtttttccggggtctgaggttagtccaacagggcataattcaaaagaagcctcctcagtgagctgggtggcaaactcgtgggaacggattccacacgaaaaccgcgcggagagcactaaacattcccccaggagggtgtggggggatggctaccctaacttccgaacgcttaacgcagaaactattccccttagcccctgaggtgttaggccaaacacctggggacccggacagcgcaaggtaataacatacaggggcgggcccctaatctttgctagcaaaaaagggcgtctacattttccctcccgcggattaaagatgtggcaattaactctcaggttcgtcacaaacttagtgaacgttattttgtatacccccccaaaatggtgtcacaatcttgccacaagttgaaaacgcaggggcggtctcgtgttttctacataacggacaatcatcacaatctgggacacgacggacaatctcaccccagcgtccaaccactcactcaccgctaaatccaaacacncaccgggtgtgggcgcggaccgccatatagataagaatgttcatcgccagccgtggagaggaggcccacacacactttaatgagttgcttacatccgcaggtatttatgttggttcatcgcaccagggtgccccccctttaatgtgtgatagcatccgcacttaaaataaagaatgcgagacgaggtgcagccgacgtcatactaacagatcgtcgtcgagcgcagagacacaacatcagtttcggaggataatctgctgtcagaagcaatccactcctgtgcggtcgtgagcaatcacttgagtagcacccccctctaatcaacaatatagcgacacatgcgggaagcactatcacacacacacggcgattgagtcggatacaccctcacgcctgctcctcgtgcgaacaggtctctgcagtattaacacacccctgtcatgcagaaacagataatcgtagctaaagaccaacatcgataggtgaagtatcattatctactgactcacgtagatcaattactaaggatatctagctatacttcgccccctcctaacaacgtaacatgcgatctctataccgacgtcgcacgagactcctaatacagactgaagaacggcaacgaggaagcagca

SEQ ID NO: 547244 - DNA, 175 bp, Homo sapiens
gatcaggcgaagatatgtgggaatagttcgtcatacaaccgatgactatttcgcaaacttcagccccatatactgggatgagagtgcctcctttctcatccaggcaaaccacacacatgatgagcctacgagcttgcaggttcaggggctgacgggcacgtggctgtgcttgggc

SEQ ID NO: 547245 - DNA, 598 bp, Homo sapiens
ggtatgttccctgtgtggcatatcatacactcgcagctctggagattatgtgagggccctatatgtggatggcctgtggtcagaatttatttatgaacaggccttttgaaagtgtcccacaatcaaagtacccaactgcaccatggaagtggggaaggagggcaccccaaaggacagcgccttattctctttcacccatgcacggtcttgggtgaaggacgctgatttcctgtggatgcgtggatcccatatgatccagcccttctttgtgatgaagcaatgttgtgaatcttcactcttcccttactctggactttctttgtggaatccctactggtcttcttagaaccaggttatgcccgaggcttttatccagactctttttgcgatttgtgcctgagaagaggggggcttcagtggccccagattcataccagcataaccagcatgatcctcctggtctctcacatgccttgctccacacttggtttctatactcaggggtcgaagctcagagcgttttataggccacgagtgggactttgctctctatatgggtaatctattctccatttttcaccccgggctttcctgggct

SEQ ID NO: 547246 - DNA, 500 bp, Homo sapiens
  misc_feature (92)..(92): n is a, c, g, or t
ggaacatcatgtcttctgcaggaaagaaagtaacagtattataggagaatgggggtggataagagcaaattataatgatataataatcgaantgttgtagtaactcttgattactttattattggtaacacgccctaactatcctgtgtgagaatgggaatttcaagtcccatcttgtaaattgtatatgttgtctatgcaggggtctcggcgccaagcaaagcatgcagaacaaaaatgccatgtcgattgtaattactcctgggtattcagaataatactagtgatggggagccagatccgcagtggtggagagttctaatgtcgactgtgtgggcagggccaaagagagtgagttgctgtgtataagtgttgaagcataatcattgtcgtgttgagagtaaacattcgctgatgtcagatggtcttcgtcaaggcgtgtgtcctcttaacttgaaggaacttcagacttggtggaccatcgaggactacaatcgcca

SEQ ID NO: 547247 - DNA, 83 bp, Homo sapiens
aggttccccggtgtcccgacggcggctcaagtcagagtggctgggtttagctcagataggtgtgggaagagcctgcctgtggg

SEQ ID NO: 547248 - DNA, 104 bp, Homo sapiens
ccggggtgaagatggcggccttctccgagatgggtgttatgcctcgagatttccacaagctcgttggaagagataggattggctccttcccaccttgatatcca

SEQ ID NO: 547249 - DNA, 311 bp, Homo sapiens
accttgctcagaggagcgacttttttttcgcgcgtaggcgttttcacgtacaaacattttttcccacctaaattccagactgcgcgttcgccaacttctgaagcgtgtcgcctagattgttgtgtattggcttttttcccttccgcttcaagctcagtgggttgtcgcgcagccaagtaatccagtcgtcctctttgagaagcagaactgcaatgaccgccacgacagtaagaaccgcgccgatcagacccagtacagcagctaccgccagcaacgaggcgtttcctattgcaaaaacggcaacgccagtt

SEQ ID NO: 547250 - DNA, 188 bp, Homo sapiens
cagggatgtcttctcagcagaagctcatcattgtggaaggctgccaaagacagggtgctatcgtggctgtgacgggtgacggctgttaatcactctccagctttgaagaaagcagacttggggttgctatggggattgctggctcagatgtgtccaagccagctgctgacatgattcttctggatgac

SEQ ID NO: 547251 - DNA, 330 bp, Homo sapiens
ccacattttaatctccagacccaacctctttcctgaatgccacatctgtcatacaatttaactaatttcctatgaagcaccttcatttggatgtgtcattggcatctccttgacatgtgtaccaatcaatacacagtattcctcttattcatgggttcattttccttgggtttaggtacctgcgattatctgcagtctacggtatgaatagtgtaatgcactcttgcttcatactgctacaccccacttaggacatgaatcattcctttgtgcaacgtatcgatgctgtgaacatcctttcccttagtcactttgtagccatattggttt

SEQ ID NO: 547252 - DNA, 1326 bp, Homo sapiens
gatggtgttgctggcagcgtgggggtgtgcgaggtgcgtgggggtggcggggtgtggcggtggtgcagaggtgtggggtgtggcgctctcgggtgggccggtggtgtgtgcggccgtaggtggggtgagggcggcggggggggtgccgcgcagttggccggtggcagtgaagtcgcgttggcgggacggggatggtggccgcgcgttgttgtgggggagccgtgttgctgtccgccgggagtagtccgacatcaggtgttggttcgagcgggtgaaggggagaggggggggggagtgcattgggagagggggagcgaagcgcgaggggaacaggggggagaaaggtgcggggagagcgcgaagcggggagggtagaggaggggggaccgggaggggaaggcaagcgtgcccaagggggggggtgtaagtgctgggagccgagcccgggacccaggtgggagagacggggatggagggggcgcaggggagtgagggagaggctggaagaggggagggaggtggggaggtgaagggggttgggagaaagaggcccgcgggtgagcgcgggggagaggccccgctgcaagtgaggaggcccgaggtagccggggggaggtgtgcactgtagggaccctagtcttgaggggtttcccccggctctcgggggaccgacaagggggcacgaccttgaagaatgagggccacatgggttatatgttatacccacgggtccaccgcacggtgttaaagaggctttgtgtcggccctttgtgtagagtgaccactggcacagagaagctcactcgcacaaccacacagcggggagaaggctctgttagacgcttgcgcgacacgcacatagagggctacgaaaaggtgatttgtgaaaatagatcgtgagcacttttctaatgtgcacgtgtctctgggagatgtgtttttttgtgagagaaagtgtaattctgtcacagccacaatatctgttggctgtgaagagctggcgttggtgggagagtggtgtgggtgaaatagcttgtggtggtgtgtttatatgtgaaaataatatgtttctgtaaaccgaaaaatagttgcaaacggaacactgttgcctctgtagtgacacctgaatactctaataaaatatgaatcacttcaagcgctaaaagttctagtaaataagactgtaacttgtgaataagaggacaaccctacaaatatttcacatgcagtaacaaattatgcggtctgttaagaaaaaatgagtaatttagtgttttggacttgaaacctacaacagtgttctgtagataaaaaaggaaaaaaaaa

SEQ ID NO: 547253 - DNA, 339 bp, Homo sapiens
gatccctggcgatgtgcgtgcatgtaaaagagcagtttttttctctacccactgacaaaaaaaaaaaggtaaattggatggtatataatttacttctgggccacgcttaggggcatatgcttgaatccaagtacttggcaaaatcgaggcaggaaatccgttgggccaaggattccgagcccagccggggcaaaatagtaggaccctgtcacaaaaattttaaaaggattccaggtaatcctggagattctgccaagaacagaggcaccaggaaaaaaggataattaattaacccatacaaatggaatattttccattggtaatcaaggtttcatccac

SEQ ID NO: 547254 - DNA, 648 bp, Homo sapiens
ggcgtgggcctgggccgccgtcgtacctgatggtaggaggcagtagttccccgcttcccttccgcgggagggagagttagctagccatccaagaaaacaccatgaaagataacgatatcaagagactactgtatacccatcttttatgcatattttcaattatcctaagtgtcttcattccatcactcttcttggagaacttctcaatattggaaacacacttgacatggttgtgcatctgttctgggtttggtaactgctgtcactctagtactatattagtagtgaacaaatactctctaaagagtctatcacaaaggtaactgatttgaaatgctgtattattcttatgtctgttctcctttcatgtaatttgtctgtatggagcacatgatagagtgggtggaaaatttattgcagttattgtctacttttatatgtgcctgttatttgtaggacaactcaagcatggtaagagtgtcagagaatggggtactcattggagaatgttcagatcatacattctgcttgtggagcaggttgagcaatctatccatggatgggaaagacaaggagaagagatgcaggtatttggggagggtgggtacaagaaggtaaaacttgatttcttgttccataagaaaaggt

SEQ ID NO: 547255 - DNA, 150 bp, Homo sapiens
  misc_feature (29)..(31): n is a, c, g, or t
tctcctataacctttggattttcccacannntaaacttctaatagcctactgttgactggaggtgcttacccaataacataaacagcccaatttaacacatattgttggcatgttgatgtgtattatgtgctgtaattaataatattggt

SEQ ID NO: 547256 - DNA, 523 bp, Homo sapiens
aaacccccccaaccgggccttttttgggtttttggccttttgggggccttttggtcacaagttttttccgggggtatcccccgattttggggaaaaccgttttcccccccttgggtggggggaaaccccttccccccccccaacgccccggggcaaggagttagtgaggggggaaggggaaaagggccccataaccaaacccccttttcccgggggttgggggatttattaaagaaggggggccggcaggttttccccctggaaaaggggcagggggggccccccaattaatgtggggtgggtccctctttaggcccccccgggttttccctttttggtttcgggttgttttttgtggggaaatgtgagggggtaacaattttccccagggaacaggtttggccctgattaccccaaggtaaaaaataaccccccctaaaagggaaaaaaaaggggggtcccccccggggggggccgctttaaaaaaaaggggtccccccgggggcgggaatttgggccggga

SEQ ID NO: 547257 - DNA, 199 bp, Homo sapiens
tgtctccgacatagttgtcgcaagaatctatttaggtaaaacataagaggggctggtcacaggggctcatgcctataatcccagcacttgcgcaggccgagccgggtgaatcatggggtcaggagatcaagaccgtcctggctaacatggtgaaaccctgtctcgactaaaaaatacaaaaaattagccgggcgtggtg

SEQ ID NO: 547258 - DNA, 176 bp, Homo sapiens
atacatgagccggtacccattgaatatttaatgttcatttgcatcttatatgaaagatcattattcatctcacatctaacaatttgtcctgtatgaagttaggatttatgtacttgtatttctacgaactcatgctataatctggtcaagagtcattgagaacaccggtgagacaa

SEQ ID NO: 547259 - DNA, 100 bp, Homo sapiens
tagaatgtttagtgagacctagggtgttgtgagtgtaaattagtgcgatgagtagggagattagtatagagaggtagagttttttttcgtgatagtggtt

SEQ ID NO: 547260 - DNA, 1018 bp, Homo sapiens
ttgaatgtgcctggccagtttgcagtgggtcacacctgttaatcccaacactttgggaggctaagatgggagaactgatggaagccaggagtttcgagaacagccttggctcaacattggtcgataactcccattcttcttacttaaaaattacaaaaatttcgccaggcattgttggcacacaccttgttaattaccagctacttcatgtgtggcttgaggcataagaattgcttgagccttggaggccgggttgcagtggcttacgccttgtaatcccaacactttgggagttctgagacgggttggaaattcctgaggtcaggagtttcaggaccagcctgtccaacatggtgaaaccccgtctctactaaaaattacaaaaattagctgggcgtggtagcacgttgcctgtaatcccagcttgcctgggaagctgaggcaggagaatcgcttgaacctgggaggcggaggttgcagtaagccgagattgtgccattgcactccagcctgggcaacaagagcaaaactccatctcaaaaaaaagaaaaaagtgccgagtggcacgtggctcacgcctgtaatcccagcacttggggaggccaaggcaggtaattcgcaaggtcaggagttcgagaccagcctgtccacatggtgaaacccgatttctctaaggacacaaaaattcagttgggcctggtggcgcgtacctggtatcccagttactcaagagctgaggaggagcactccttgaaccaggagcaaagtttgacgtgagacaaaatacccccatgactcccagcacctgtggcaacatacgggaaatccgtcacacaaacacacaaatccgagctcgttcccaacacattcatttttacgagacaccgtagatggcagcaccactatctgacagagggtcacacaaacacatatgtgttaggagttagaacacgagtgaccatatacatacaggagataggaataaactagtagaaacacagtagcggacacgataccc

SEQ ID NO: 547261 - DNA, 173 bp, Homo sapiens
gcactgacttcaccttcgcgctcggtctggggactctctacacgtcgacctgcctgcgtgcctgctagggatcgccgcgtcggttcacgccggttcgctgcggggtggttcttccttttcccgcccaagactcttgacccctacccactcccactgaccggggactcctctac

SEQ ID NO: 547262 - DNA, 960 bp, Homo sapiens
catggtggctcacacctgtaatcccagcactttgggaggctgaggtgggcagatcacgaggtaaggagatcgagaccatcctggctaacatagtgaaatcccgtctctactaaaaatataaaaaattagctcggtgtggtggcacacagctgtaatcccagctacttgggagggtgaggcaggataatcgcatgaagccaggaggtggagtttgcagtgagccaagatcgtgccactgcactccagcctgggctacaaagccagacttcgtctcaaaaaaaaaaaaaaaggaaaggaaatggaattttgggaatttttctctcgtggacttccccttttaatctcggtatcaccaggtttaattctacaggttttcccatttctcccttttgggcgttctccacacgaggggaattgggaaccaaggggaaagaaggttaccggggaaggtaacagagacgtggcgctaagattatcggaagggtgcaccttttcaaaggtctctggaggagaattaaaaccttggaagattcgggaacaaaacaaacacaaaagaaaaaaaacaacacttgtggtgggggcggcgaggggccctggaaaaagctcttctgaaagaccacaactcgcgcggtgggcagcggggagacccccaatagtgggatagcgcggacaccggtgggcaccaacacgggtgtgcccacagggagaagaaacgcgggggcaacgagagcaaaaggggggcggggggatgttcccacccaacaaataatagaaaaaagcggccgccggggggggggagcaccacaagagcgatggggtgtgtgagagaaaacatctcccaccgaggggggagggaggatcagaagggacaagcaacaacagggggggggaccaacaaaccgcacgaggggggggctccccagaggagaagaggccgcaagaaattacaaaatataagcg

SEQ ID NO: 547263 - DNA, 410 bp, Homo sapiens
tatccgggtacgtgcatccttccgggttagtgcatccttccgggttagtgcatccatgatggtgtacatatttctattatatatgttaagaagtttactggtgggtgcggatggctcacgcctgtaatctcagtactttaggaggctgaggcggatgagatcacacaagtcaggagttcgagaccagcctgaccaacatggagaaactccgtctctactaaaaatacaaaattagccaggcatggtgggcgcctgtaatcccagctactgggaggctgaggcaggagagttgcttgaacacaggatgcggaggtagcagtgagccgagatcgtgccactgcattccagcctgggtgacagagcaagaccctgttccaaaaaaacaaaaaagaggctggatgcacaaaccc

SEQ ID NO: 547264 - DNA, 222 bp, Homo sapiens
tgctcctcctccgaacccactcctagacttcaacatctccctggccatggtcatgagagaggtccatcagacaagcgcatcagcaaacggaccccgcctatagattgtagcatgaaacatgatctctttgcatcctcttagcgccctgtctgccacccagtgactggcagggccgagccagcagttccaccccacctttttccattctccccgattactccc

SEQ ID NO: 547265 - DNA, 516 bp, Homo sapiens
aagaaattgttttttttggactggggaattttcttctgcttcactttaaaagtgggccagggcaattatcatggctgcaagtaacttcaaaaggatggggaagtgcgatcttggcatgtgtcagaagaaatgaaaacatttggtgaagagcattaatgactgtctttacaggaaaaaagcaatcaaatagacatgatttcttgtttcagtttcatcatttcctactgtgttacctaaactttctgagccccagtttcttattactaaaataaaataatgataaagatgaaaaaaaaaaaaaaaaaaaaaaaaattgttggaaaggactttgacccacaacgtaacccttaagaggggccaataaaaagggctcgggtcgggggggtcgcaaagggggaccaccctggtgggggaacggggcattacccagggcacccagtgtgcaatcacccggaagccaagaattaccacaccaaggatacaccttgaagacacacctcaaacattttgaaggtc

SEQ ID NO: 547266 - DNA, 1061 bp, Homo sapiens
gttttgtctgcaggcggttccgcctttgcaacccaggtaaatacctgccgcgagaaataataccgcccgcgatcatgctggcgataataagcgcgacttcttttcatcttcattataacctggagtgactggctgacgttgaatactcctggtaataaagataaggtatgcccatgcgtgggacgaaacaagttaaacagccacctttgtcgcgcggattttgaatgttcagccatcgatttatcgtcgtgcggcggtgatgcgtaaagctgcagtggtcactctccaggccaggttcaacggtgagacaagttcgttaatcgctgaatgggaatggatgagtgttgttagcgtttgccagattcggagtaccgctttgtaccatcgccagatgtttcgcgtaattaactcatgatgggtcggtggccttcggttatcaattgggtctctcacgtgactggaatggctacggttaagtccttgggggccagattaacacggcattaatacagccgggctaaagagcgacggaccttggatacagatttgcgggaccatgtggccatggtttgtcgctgttaatttcgaccttggtactctcattctccctgggaaagctttataaagaggtcgagtatcctccgtaacattaacttttcctgaacgttttggccttgcgaacacgggcccgaaccataggctgagcgtgggagagtccctccaacggagaggcatttaatcactaaaaagtacagagtcgaaacttgggggcggttgaccgcgggacatccggccaagaaacctggcagggcgatccattcgcaaaccttgacgcagtcattgaacgaacgctaatattttcgcgttggttgcaatgcgcagggctacaccagagaatggcgacggaatcaccaaatacgcacacatcttgcgggtgtgaaccgcatggaacgcggggcatgtaatttcccaggcattccaaggtaacgagcataggtccggggcttggccacaaagtcaaaaggaacacgcttcgtgggatcctagagcaccgttcccag

SEQ ID NO: 547267 - DNA, 2633 bp, Homo sapiens
agcggggtggcttccaaggcgactccgtagtggatgcagcgccggacgccacagccgaaaaacagaatcttggaactggtttagtacaatccaggtcgagttccttgttttttatccgagtggccggcaggccatgtgctgtcttgtttttaacacatcagctcttgccggaagccgctaagagataaaataggaagtcccacccttcccttagagaaggaaaacggagagccgaaggagtcaatctaaattcgatgagcgcgtcgggctccaaggcaggcgctgtcagcccgggagggctgtctgggatttctagagggtcccagaacgggttcttcccaggccgatcccgcctgcttcctgccccgtctctccacccgcctcccgccctctgtaagggaccccgagggcggcgccggaaacacggagaaggcccagaacggcgcgggacccgagaggcctacgttggcaaacgcagcccgctgcccctttgctcgcttcccccgggcctggagtggctcctgtcgcttctggcgctccgatttcgagaaatgactttcagctgtgcaaggcgagaatgctactttagataatgagaaaaaatctctcgaatggctcccaaaatgaggtccttgtttaagaggccacaggaagccgccagccgaacgctgataccaaagaggaggccaagaagcggactgtggcttggtgacctgtttggtattgccaaattttcagcttttattaaagctgaaacaccttggctgtttaaaacgttcgacaaggacttttttatgaacgttaacggcacagcatacgggttttttggaaaaaaaaaaaagggcaggacttcagcccgtccgcccccttgtgcaggtccattcatgaacctcgagttagaggcctttcttctgaaactcagaatctagtagggaagacctgtgtagacgaataaaaataaatacatcacagcttgttaagtgctgtgacaaagaggcagtgaaatcctgcttgaggtcatctgccttgctaaagaggtttgactatgttgtaggcacagggttagggtaagactctgtaatgggaagttatgtgatcagatttctgtttaggaggatcactggccaggcggggtggcttacgcctgtaatcccaatactttgggaggccgagtcgggggatggcttgaggctaggattttgagaccagcctggggaaaccgcgtctctataaaaaatttgaaattagccaggcatggtggtgcgaggctgtaattccagctacttggaggctgaggcgggagaatagcttgaacccagtggcggaggctgcagtgagccgagattgcgccactgcactccagcctgggcgacagagcgagattccatctcaaaaaaatcattccaacgagtggataaagaaaatgtgatatatatgcactatggaatactaagccataagaaggaatgaaataatggcatttgcagcaacctagatggagttggagaccattattctaagtgaagtaactcaagaatggaaaaccaaatattgtatgttctcactcgtaagtgggagctaagctgcgaagatgcaaaggcataagaatgatatagtggactttgaggactcaagggttgaaggatgagactacacattgggtacagtgtgcactgcttgggtgatgagtgcaccaaaatctcagaactcaccactgaagaacttccccatgtaaccaaaaaccacctgttccacagaaactatcgaaataacacttttaaaactttactatttctgaataaaatttacatgcatttctcagaaaaaaaaatatttggaattgaggtatctaatagagaactgagttaaattattgccacttaaaaacacaaagtgatatagccactttgtgaattaatcagtcagcagtggctaggttatgcttagtggtttataaccaaatcttagtttataacaacaaatgtgtattgttaattcccactacaagtttataacgacattgctggatgctacactccatgtctctttgtgggacccaggctcatgggacttctgttatctgcattagagagagagaagacaacaaaatatgcactggttcttgaagctttggcccagaagtaaaatatgtcttttacctgttcacattgcattgggccagggcaattatcatggctgcaagtaacttcaaaaggatggggaagtgcgatcttggcatgtgtcagaagaaatgaaaacatttggtgaagagcattaatgactgtctttacaggaaaaaagcaatcaaatagacatgatttcttgtttcagtttcatcatttcctactgtgttacctaaactttctgagccccagtttcttattactaaaataaaataatgataaagatgatattcacttcaaggactttgtgttaactagggtaaaaaaattgaaaactgtagtaagttatgcaaattagaaatgtataatattactgctttgaaagtgatggtgaaatgtagaataattggaaggataacacaaagcacttataccaggaggcttttagctgcagataatagaaatgaacctccactactttaatcaataaaaaagtgtatcagctcaaaa

SEQ ID NO: 547268 - DNA, 558 bp, Homo sapiens
taacgcccaaactcatctatccacttaaaactgaatataggtcaaaactgttttctcaagtactcatacccacttcacaactgcacatttttagtcagaaccaacatggagaaaccacaagagtactcaagtcaaatgctgttcaatgagagagggcttgaacatgtatctggttgcacagcaactgtccacctactgatatttagaggataccactacgccatattacagacctgtcttttgcccatctgtctatccaacactgcagtcctgtttttaccccatatatctatccaacactttacagaaatactgaatatttcagcagggaactggatgttcttcttgcatagctcattttccaatgctccacccaactgaacccaacccccatgagaatctactgaatatttccatgagggaggggggaggaatggaatggctgggaatatagctgaaactgctataaagaaacgtgtgggagtctctatgtgcgtgtgtgcggatatgggtgtgtggctgttggttcttgtctccctgtgtgtagtgatgtgtgta

SEQ ID NO: 547269 - DNA, 117 bp, Homo sapiens
  misc_feature (36)..(36): n is a, c, g, or t
taccatggcattattgttcacaaccatactagtatncttcttcctgagagcaacagctcctgtctcttggaggtggtgggaactgcttttcctttggtacctacttcaacccccata

SEQ ID NO: 547270 - DNA, 1324 bp, Homo sapiens
agcggggtggcttccaaggcgactccgtagtggatgcagcgccggacgccacagccgaaaaacagaatcttggaactggtttagtacaatccagccaacgagtggataaagaaaatgtgatatatatgcactatggaatactaagccataagaaggaatgaaataatggcatttgcagcaacctagatggagttggagaccattattctaagtgaagtaactcaagaatggaaaaccaaatattgtatgttctcactcgtaagtgggagctaagctgcgaagatgcaaaggcataagaatgatatagtggactttgaggactcaagggttgaaggatgagactacacattgggtacagtgtgcactgcttgggtgatgagtgcaccaaaatctcagaactcaccactgaagaacttccccatgtaaccaaaaaccacctgttccacagaaactatcgaaataacacttttaaaactttactatttctgaataaaatttacatgcatttctcagaaaaaaaaatatttggaattgaggtatctaatagagaactgagttaaattattgccacttaaaaacacaaagtgatatagccactttgtgaattaatcagtcagcagtggctaggttatgcttagtggtttataaccaaatcttagtttataacaacaaatgtgtattgttaattcccactacaagtttataacgacattgctggatgctacactccatgtctctttgtgggacccaggctcatgggacttctgttatctgcattagagagagagaagacaacaaaatatgcactggttcttgaagctttggcccagaagtaaaatatgtcttttacctgttcacattgcattgggccagggcaattatcatggctgcaagtaacttcaaaaggatggggaagtgcgatcttggcatgtgtcagaagaaatgaaaacatttggtgaagagcattaatgactgtctttacaggaaaaaagcaatcaaatagacatgatttcttgtttcagtttcatcatttcctactgtgttacctaaactttctgagccccagtttcttattactaaaataaaataatgataaagatgatattcacttcaaggactttgtgttaactagggtaaaaaaattgaaaactgtagtaagttatgcaaattagaaatgtataatattactgctttgaaagtgatggtgaaatgtagaataattggaaggataacacaaagcacttataccaggaggcttttagctgcagataatagaaatgaacctccactactttaatcaataaaaaagtgtatcagctcaaaa

SEQ ID NO: 547271 - DNA, 144 bp, Homo sapiens
agggcggtagtcgaattagcctttatatcgaccgcttcgttaaccgcgatatgtttggttataccgttccgaccgcgatgttccagtcgattaatgccttcgcagttatgctgtgcggtgtgttcctggcgtgggtggtaaaag

SEQ ID NO: 547272 - DNA, 265 bp, Homo sapiens
cccccccccccctttgggggggggcgccaccccgcgcttttttgggtaaatttttttttttggggggggggcccccttggcccccccccccttgggggggggtttccaaatttggtttttttttttttgttttttaaggggcccccagggggggggggggggggttttttttttttttttttttttttttcccccctccccccccaaaaagggggtttttttggttttggttttccccttaaaaattttttgggttttgggggta

SEQ ID NO: 547273 - DNA, 386 bp, Homo sapiens
attctaagtttaaatcttagactagtaactaaacaggattaacggagacaagtcttgaagaagcacgttcaattcagtttggacgttaagcataatcgttaccagcagtaataccagcctcttggctattgcgtgaaacagctagagccccgatctaagtccgtacggagtcggaaacggaaccctaagaacataactccgcaccttactattgggatagtcctaatatagggcttatagtgcggggtaccctttagcgctcacttgatagttctccaaagttatagttcacgcgagcttaattgcctaaggtagtagcaatacgttcccactaaatggtccatagtcgcaccttaatataggaacttttatattgtgtcgtgtcc

SEQ ID NO: 547274 - DNA, 182 bp, Homo sapiens
gatttcttcatatgtggggaactgccaactcacactctccccagcaatacaaataaataagtaggctgggcacagtggcccatgcctgtaagcactttgggaggccagggcagtaagattgcttgaggccaggagttgaagaccagtgtgggcaacatagcaatacctcctctctaccaaaa

SEQ ID NO: 547275 - DNA, 663 bp, Homo sapiens
tgggggagttgagatcattaatggggatcgtaaaataaagggttttcaacactggggaaaagcccggttggatttatagccccaccagatgatgccaaaagtccggggagccctgtttggggcaaatgccaccagaagttttttggactaagccttcagagggtggagctcgtcgtcagctctcctgctgtgatgtggaagcttctgatatttgaagaaaccgaatgtctctgtagcttcctcttccctgccccagtattgctctggatttatcagcgatgcccctctgtcactcatgccctgcctaattgttcccaatggtggaaagcttcatgtaatatgatccgggccccccccccgtttttttgaaagtgtgacagtgtcccaccggtttttcagccctaggggagggggcagatggtggttgcatgggcttcctgggtctcccctctccgtctggcctaaaggtgatgtatttggtgtttggccccgccgtcccccctctttagggttaaggggcatgtggcccccccctccttcccgccgtagtcgcttttctgttacccggttaggcctagaagttttccctcctctgttaatgtggttttaaattttagccctgaatatgctttttttttttaaagagttttgcgggttttatgt

SEQ ID NO: 547276 - DNA, 121 bp, Homo sapiens
tccagtcgtcgatgagcttctgggcagacttggtgacctgccagctccagcagccttcttgtcgacagctttgacgagggcagcgtgtcagagtctgagtcgggctcagtcgaacggactg

SEQ ID NO: 547277 - DNA, 719 bp, Homo sapiens
  misc_feature (41)..(41): n is a, c, g, or t
  misc_feature (579)..(579): n is a, c, g, or t
  misc_feature (656)..(656): n is a, c, g, or t
  misc_feature (678)..(678): n is a, c, g, or t
  misc_feature (687)..(687): n is a, c, g, or t
cattccttctgaaactattccaaacaacagaaaaagacggnctcctccctagctcattttatgaggccagcatcatccttataccaaaacctggcaaagacacaacaaaaaaaagaaaatttcaggccaatattcctgatgaacatcgatgcgaaaatcctcaataaaatactggtaaaccgagtccagcaccacatcaaaaagcttatccaccatgatcaagtcagcttcatccctgggatgcaaggctggttcaacatacacaaatcaataaacataattcatcatataaacagaaccaatgacaaaaaccacatgattatctaaatagatgcagaaaagaccttcaataaaattcaacatcccttcatgctaaaaactctcaataaactaggattttgatggaacatatctcaaaataataggaactatttatgacaaacccatagtcaatatcatgctgaatgggcaaaagctggaagcattccgtttgaaaaccggcacaagataaggatgccctctatcaccactcctattcaacatagtattggaagttctggccagtgcaatcaggcaagnagaaagaaataatggggtattcaaataggaaggaaaggaagtacaatttttttctgtttggcacacaacatgattgnatatttagaaaaccccatcggncttcttcanctcaaaaaacttcctttaagctgattaaagcc

SEQ ID NO: 547278 - DNA, 355 bp, Homo sapiens
  misc_feature (82)..(82): n is a, c, g, or t
  misc_feature (92)..(92): n is a, c, g, or t
ctgttttctcccgatgctcctgttaaagatgccttgtcggcagaaacaaagtggctgccagtttattaaaatgcctgacaantgcaacttcncagtacccgggccttgcatataaataacggagcatacagtgagcacatttagctgatgataaaaacccctttttttcccttttccccctaaaaatggtaaatttgatcaaatttacatgtatgaacttaacatggaaaatgttaaggaagcaaatggttgtaactttgtaagtacttaaaacatggggtatttttttggttatgaaaattttgtattaaaaccattgtttttgtagtttaattaaaacatttttttggtgtta

SEQ ID NO: 547279 - DNA, 118 bp, Homo sapiens
tgggggtccacatccactccaaggggactatttcccccggaccccaccccagtctccccacacggacctttgttgaattaaagtttgtaagtaaatggttttaaagaaaaaaaaaaaa

SEQ ID NO: 547280 - DNA, 122 bp, Homo sapiens
tgcagaccagtgtctcctctccctgcactgccagctcctactgtgcatcgccccatatatactgggtgtgtatgtgtgtgtgtgtatgagtgtgtttaaaaaatctgtcccaccacacctgg

SEQ ID NO: 547281 - DNA, 1405 bp, Homo sapiens
  misc_feature (259)..(259): n is a, c, g, or t
cttggttatgtagtggtaggctactcactcgtgtatcaaaacccggtgttctctcttatattatcgctgccgggtttactcttccaccagtgctcgtgttccctggttgttttgggcacactctaatacacgtgtttgcaacaacacgcagtggttgtccgcgtcccagtttctcctcgggttttttcgtccgacccactggtgctccccgagccgctgtggtataaggttgtcataacccgcctctactcgttgttanacaccgacgtgtaaaaagagtggttccacagcagaaaagatgctcttgttaggagaaaattgcgctcaccggaaagtgtgggcgtccccaaaaacattttggttttttggaggggtgaatttgtccacacgagatttagggagcctccacaattggggctttataatttcctctggggaattctctttgtcaaagggactcccacagagatttaattttgaataagaggagttaccactggaaatctttgtggtctccgtaaaatatgtaccaacccggtagaaggttctcaaggataagggaatgttaaagctccaaaaggaaccttggtgtaccaactatgaggggggaaaaatggggaactctggggaatatggaaggggccccacgagctgatgttatggttttgtttttgcctggtgtcaaagattccaccacatgggtactatgaggaaaattaaagtttaataatttcacggaaaccttcccccccacacccctatgaacactgggagaaacccaagggttacctggtccctactttgtccacgcactcaactgtttcacatcctgtaaaaggtcacctatacttggaacataataattgttttcttttgtaaaattttgcccacgtggagcttttatgaaataacaccacccgctttgttccgcagactttttccacaaaaatttgagatttaaatgggttgttaataggaataaatattttgggagaccccacataaccgcttaggccctctggtaatgttaataacccaccacctgtcccaagagtaaaacacacattatggtcacaggcactggtggctcacggcctgtataatcccacgcctttttgggagggctgagaggcacaagtggagtaaacttgaaggtcacatgagagtttctgaaaaccaccgcctggcccaaaccaccgtgtaaccccgctctttatcttaaaaataccaaattagccacgaatgtggtggcgcaccacacccgtaaatcccacgctactcacggaaagctgaggcacgggaaaatcgcttgaaacctcgggagaggtggaaagttgcacagtgagccgagatcgcacccctgcactcccagcctgggtgacaacagagcgaaactccatttcca

SEQ ID NO: 547282 - DNA, 347 bp, Homo sapiens
aaagtctgatggtagaaatccaatgaaatgggagaaggcaggagagagaggtcatcagtagatctaagtcggcttgtttgggttgaggaggagagaacccgaggaaatgaccatgctctggggacaggggtaccttagattctctgtctatttttcctctagcaagccagctgtgctgaagcccagtagagatgaagagacaccagccagagaaaaccccctctagaaggaatgtatttgttgctaaattttgtagcactgtttacagttttcctccatgttatttatgaattttatattccgtgaatgtatattgtcttgtaatgttgcatagtgttcacttttta

SEQ ID NO: 547283 - DNA, 302 bp, Homo sapiens
ttttggggcggggggccttttttacccccgggcctaatggggggtttcccttttgtttcccccccggggcccccaattttttagggggggggccccttttgggggcccccctttgccccccccttaaggcccccccccccaaccttttatttttcctgggggtgcccccccgggccccccttggggccgggttttttccccccccgcccctttttcggtttttttttcgggcaaatcccccggggggggttttttttttcccctggggggcctgccctcccccttaagccttttagggccca

SEQ ID NO: 547284 - DNA, 210 bp, Homo sapiens
tgcattccagctcacaccctgactccaactccccacaagcatgtagatctcccagactcatccaccttggaatccaacatccccaccaagcatgtagatatcccagcctcaaccaccctgactccaactccccaacaagcatgtagatatcccagactcatccacctaggatccaaatgcccaccaagcatgtagatatcccagactcat

SEQ ID NO: 547285 - DNA, 453 bp, Homo sapiens
tgagtggtctctccccgactccagccggggttttacttgcttggcaactccagttttccctgcctttgatgcacagtatggaggctccacgtggacgtccaaggctccatgcagtgctcctgactgtccgaagtcatagagcagcttttctcaggtggctcctgagacgtttctttgtttttgttttgttttgttttgttttgttttgttttgttttgttttgagacggcgtctcgctctgtcacccaggttggagtgcagtggcgcaatctcgactcactgcaacctctgccccccaggtttaagcatttttcctacttgggaggctgaagcaggaagattacttgagcccagcaggtcgaggctgcaccaacccatgattgcccccctgccctctagcctgggcaccagagtaagcccctgtctcaagaaaaaaaaggaagagagaagcta

SEQ ID NO: 547286 - DNA, 527 bp, Homo sapiens
gttccccgcaggaactgagtcagaccccatctcagggccctgcacaagataggtgcctgctctaaggcgtgcaccctcgccacagccctggcccgtcttgacgggcgagggttacttgtacttgtcccaaccatacaggatgatgaaagctgaagactcaggtggccatgcaaccctgggtcccagctggagctgcccggcacacgccgacacttcatgcaccagtggcggtggccaccacttgtgctgcggagatggctgctgactgcgtgcgcagatctcggatcccgaaagctcccctcctgggccaagaatctgggaccccgaatcgcacccgattgcgtccgtgtttcctgctggcccgctggcccagaggcaattacgtcatggaaggggtccctccaaagtgaatgaaggcccatggcccttggccaccggggacaggccggaacggccctgtgcctttcggacttatacagaagtggccgtggtattttcgcaatggaaccccggattcctccttggtc

SEQ ID NO: 547287 - DNA, 209 bp, Homo sapiens
  misc_feature (1)..(1): n is a, c, g, or t
  misc_feature (24)..(24): n is a, c, g, or t
nttttattactgagaggctacaanatctattacgcgaggaactcctcctcttcctcccaccacaaccttttagaaagtggagtctgtactcacttaacatcagtatgccagccactgtgtgcccacgggaagactcgcactcctcctgcacgagtgggtgcttcacccccaccccacctcctaggtcgggagggcccctcgttaagctt

SEQ ID NO: 547288 - DNA, 796 bp, Homo sapiens
gcgtgtactttcaatgctacgttccccatagcgtggtcctggtcgtgctgcggtggtgcggtggagtgtgtgttgtctggcgccctggagtggcttcattaactatctcaagcctgacatggtcaaagcatggggtcccgctcatggtgtggatagcatgcgtggagacgcgagattttctttgtcttacagccattggcacttgggggcctcgtcaacaagtcctgggcagttacgagcggctttaacaaataactggttacaaggacagccatcaatcctggcgtctcgatcgaacgagtgggacgcagcttcatttagcgtggcttacgtggtcttctcacatcctgggcttcaatggcttgccagagcaggcggcgtgcagcagtctccaggggtggcacgagtcagggccgtggcctgggcttcattcgcctatccctgctgggctgtcacgctgatgccagttgggcccgctctgggctgcccttgtttcttcttgcattgcttgttgcttgcttggtctcgatcagccatgtgttgtaggtggtaggagggcgttcatcaccggcgctcctcgacctcctcccgggctcctactacttccgtttccaaagggagatctctgtggccctctgttgtgccctctgcttttgtcatcgatctctccatggtgactgatggcgggatgtacgtcttccagctgttttgactactactcggccagcggaaccaccctgctctggcaggccttttgggagtgcgtggtggtggtctgggtgtccggagctgaccg

SEQ ID NO: 547289 - DNA, 1611 bp, Homo sapiens
ctagctagcgtctgcaggccagcccgatgccagtggagtagggctccgcagtatgctcattctctaccgacaggttgtacagcctctgtaccccgactgcacagggtctatgccacctatactaccgagggcctagtgaccagactaccctataccctaccccgtatgtacctagtaccaccacatgccatatactaggcgagactaggcgcgcaacctaggtactacaacggcaggaccctagccagtatccatcaaagcaagagtgggcgagcgtactatagccctcatatatggccccaacaccacgatatatcctatcagatccactaagacactcatactaagagatagacacatactaggaggcactaccaacagcccccagcggcacaagacacacatgagacacatatacataccaatatctacccaccacgaaacccaacgcgctctccccacgctctccccaatctccacgaacaacgccgtctacgcgcgggcctaacgcgtttcccgtctgccccaggacacgtcaccttgcgcacgccctggagccccacgaggtcgcggcacctcactagccgctcaaccgcgcaactctcactcatcctcagacacaccaagggatcttccacaccgccacacacccttgacgcgagccccacaccagctccctccgcctggaaacatatccacacctcccgcctcccgcaccacacgtcaactacggtgagcacgaccgacccaccctgcacgcgcactttggacacaccgccggcagccagcaccaatccaacaccacagcggctcggccagccgccgcccaccccccccagccctgtggccggccatcacacaccctcggtatcacacacaacggcacaacacaacacacaacttgacaattgcgactattcaccgctggactcaaactcaggcctcgagcgccgcagtacgggtcaccctccctatggcgtgcccttacttcacacacgaccttcggccacgaaagccggaggcaagcaaaacgggtggcgcccttccgcccgaagcccccatacgcttccacagtccccattcgcccaatcccccccactagcaaaagcacaccaaccgcaactatcacacaaccattgtaaaaacaactcaacagtcacccaaactaaacacaacgcatgaccaataacacctctacaaccaccatacctaccccccatccaacaaaacatccaaacaaaacacaaaacaccccacacaataaaccataaatccacatacaacacaataacatgctaccacgcaccacccaacccgacaccgcccagcacggctactaccactagaccagcgacatacaacaacaccgaaacctggtgcctgacacaccatcatcccaatacctccgccacacgacccctccagatctacccctggaccaggacatatgaccaggagactcccagcggcacacatgacacacgccgacacctccgcgtaatccacaacaacccgccaacccactaatacacccccgcgcagccaaacgaccaaacccatacacatcacttacacgaccacacacacatgcgaaggagactcactagatac

SEQ ID NO: 547290 - DNA, 860 bp, Homo sapiens
ggcgtggtgagcgagaagtgccgttgtcgacacggagatcctgccttccctgttcatgcgctggaccaccgagcttaatacgaaggacaagttgcccggcatcacccacctcaagttccgtgtgcctcgtggtacctgtctgcgagcagcgtgcattatgtggcggcgtccagtgcagtatccacggagagtactctgttggtaggtgtctgtgtgtccctgccgacgatggaaggggcaccatcaccgcgcgatggatagcgaatcgatcttcgcatgcagcatctcccccgtggttggttgacgaaacagtcgccacaattctcaaatggcgtatcctatcggtcaacaacgatctggaccgtgtgtcgggcgtggactgctggccatgacttgcccatcgtacgctcatccagacactcgttgctccaggtggccaagcgactgctcggtattctagccctgtgcctcgaggctgtttcccttggccttccactgaacgtgcgagtcgtccttcgtccgttgcaccggctctcattgcagaccatggccgtcttctacacgctctgctggccccgaggcctgtggatgagccggccatgaatgctgcccccgtccaccgcgtcgccccgtccgtccacttagaggctatgcagctatcgtggacgtcactggccctggtggggattgacagcacgtggcaagctgagcgtgctccgctctcaccttccatgggccacccgctggaacgtgggggtggcgctgcggcgctgctcttctgctgagtactgcatgttgccggtacgactgggggacatctgctggcgtgagccagttggcccagagctggtggaagctgc

SEQ ID NO: 547291 - DNA, 567 bp, Homo sapiens
  misc_feature (363)..(364): n is a, c, g, or t
  misc_feature (372)..(372): n is a, c, g, or t
  misc_feature (454)..(454): n is a, c, g, or t
aaagaagaatcaataaagactcatggcttgaagcctaacaatagataagatagagctgccatttagtgaactgggacaggagcagttttactgagggaagatgagtttcctttttgagtgtattaagtctgagatgcatattagacatccaagtggggatgtcaggtatgcagttggatcaggggaaaggtccaagctggggctatcaatttggaagttgtcagcctatagatgatatttaaagctgtgagactggctaagatcacagatcagagcatgtggatggacagagcagccatcagaggggaccctcatactaggtggtctgggaattcagaagaaccagcaaaggaggctgaaaannggtgaccnctgtgagacaagacctagcagaatgtaatgtcctggaagtcaatgaagagtattccagaagaggtttatgcatttttttttntatgctaagaataaactctttttttttttatcctggttgttgtgtgtaacgtaattagttcatttccattgttgtataatattccagtatatgaataaaccatacttattatt

SEQ ID NO: 547292 - DNA, 137 bp, Homo sapiens
atacatataaattagctcgtaccaggatcttgtcacctcaaagcacttgttatgttgggagtcttagatagcctttcgttggggggttgggggggaaacataatgatcagggccccctcacacctcattcctgcagt

SEQ ID NO: 547293 - DNA, 110 bp, Homo sapiens
ggtcgactcttgaggactccccctttggtacttagaagctcacctgggctctggtgcggctggctcttacggtgtatccccaagtccccggtgaatcccccggtcgaccg

SEQ ID NO: 547294 - DNA, 110 bp, Homo sapiens
gctcttcggtccctcagcacatctccagtccacatctccagtcctccagcacatctccagtccacatctcccagggggggtcaccgcagctcgcaattcgtcaatccagg

SEQ ID NO: 547295 - DNA, 190 bp, Homo sapiens
atcccgagcctccaagcgaaaggaagtgccgcgcgcacctcagcctatgggcctggctgccaagactccgccattggaaaccgagccaacaggaagccagacgtgcgtgaagtaccccattgatcactaatgcgtacaggagatgcaaccaacctgagccccagccagcacatgaaccaacaccccagac

SEQ ID NO: 547296 - DNA, 117 bp, Homo sapiens
ccattctcattcggaagaaaacaggaaaggtgtcccataaacaagttgcagcagaattgctggatagggaagacgccagaaatgagatgttagagggagaaatgatatgttggaagg

SEQ ID NO: 547297 - DNA, 237 bp, Homo sapiens
cctcagctcggtaccgacaccaattgatcctgtagaaagcatacagaaacaaaatggggaaaggacacattatctaataaatggtactgggaaaactggatagccatacgtagaagaatgaaactggatccctagctcccaccttatacaaaaatcaactcaagatggattaaatacttaaatctaaaaccaaaaaccataaaaattctagaagaaaccataggaaaaacccttctg

SEQ ID NO: 547298 - DNA, 176 bp, Homo sapiens
taaatctgtacatcgctgctcttcctcgagcaagagtagaaggtacagctgaagtcgcctcactacattacatcccctcttccctcctggacacagcagtgtgatgcggtcaatgggatattagattttggtagatgtgggcagacgtggcagctaggggcaaggaggacaatgta

SEQ ID NO: 547299 - DNA, 101 bp, Homo sapiens
tttcagcatgtggcaggctggtctcaaactcctgacttcaagtgatctgctcgccttggcctaatctgttcatattttttgtagagacaagatttgccatg

SEQ ID NO: 547300 - DNA, 396 bp, Homo sapiens
gaggatccccactatcatgtggtctacaggaggtggctttttagacatgactgttgtagatgtacctgcgggaaggttagccagcaacttcaggtcctgtgaggtatcctgctgtttgtgactcagaaatgaacaaatcatgtttctgatctttgaaggcactccagactgaagaacggcacaggatttcattacctgttctccatactgcaaacttcgagtcattgccttgagagctttaacaatctgagccttagtggctgctgggctgtccaggttttcaaggccaatgccttcgagtaattttaagaggtatggaaccaaatctgctttcggggcctgtgctactaattcactctgctccttctgaaacattcgattagttgcttcacaggc

SEQ ID NO: 547301 - DNA, 84 bp, Homo sapiens
gttgagatctcagtgtaacaggactctcctggaggctgtctccgggccctccccgcggccgacgtcgctcgcttctctccccgg

SEQ ID NO: 547302 - DNA, 577 bp, Homo sapiens
agaccttgatgaaacataaagagccctatcaaaaaccagatatcaaatcacatcctgcttcaacaaccaaacagaaatacgcagtcgaggaactaggaatgtaagtaactgcaagaagcaagaagtgctgaagaaatataaatgggcctatcaaaatccagacaccaaatcaaataccacttccaaaaagaaaaagaaaaaccagttgaattagtcagcaccactaactcattccaaagcaaggaccacctttattttctcatgtataaggccagggctgaccactctcccttctttgaacccagccactacgcctctctaacccaactcgtactctgcttaagtggttttagtctttaaaagaacttggcttgggaaagagcaataatgatccgaagctaaccacttagctcattagtatgtcatctagacaggcacaatcaattccaacagcatcgagtaagggtattccctccccaaaaggtctgcgctattaatagcaagaaagttcccaggctatggtatattagtatcccaaaagctctgacacagaactggcatctcacttctgagctcc

SEQ ID NO: 547303 - DNA, 173 bp, Homo sapiens
ggccaggctgatctcgaactcctgtactgcctcccacagtgctgggattacaggcgtgagccaccatgcccggccccaagtgtattcttaagtggatctgaaccaagatctaactggtaaaagtccaaattcttaacctacatggctgcccttgactctgcaaggaacccacg

SEQ ID NO: 547304 - DNA, 882 bp, Homo sapiens
  misc_feature (358)..(359): n is a, c, g, or t
  misc_feature (367)..(367): n is a, c, g, or t
  misc_feature (392)..(392): n is a, c, g, or t
  misc_feature (761)..(761): n is a, c, g, or t
  misc_feature (809)..(809): n is a, c, g, or t
  misc_feature (852)..(852): n is a, c, g, or t
  misc_feature (869)..(869): n is a, c, g, or t
  misc_feature (875)..(875): n is a, c, g, or t
gggaagtggcgcctgtctcctggagtggaagaggcctgctccctggctctgggtctgctgggggcacagtaaatcagtcttggcacccacatccagggcagagaggtctgtggttctcagcatcagaaggcagcgcagcccctctcctcttcaggctacagggttgtcacctgctgagtcctcaggttgtttggcctctctggtccatcttgggcattaggttctccagcagagctctggccagctgcctcttctttaactgggaacacaggctctcacaagatcagaacccccactcacccccaagatcttatctagcaagcctgtagtattcaggttctgttgtaggaagagaggnngaggcatnccctgaattccacgcatctgctggnaacgagccgtgtcagatcgcaacaatgcccatgcagcacacacacaatggcacctcccatgccccatgcccctctgagtcacacaggacagaggaggcagagcttctgcccactgttatcttcactttctttgtccagtcttttgtttttaataagcagtgaccctccctactcttctttttaatgatttttgtagttgatttgtctgaactgtggctactgtgcattccttgaataatcacttgtaaaaattgtcagtgcttgaagctgtttcctttactcacattgaagggacttcgttggttttttggagtcttggttgtgactccaagagcagagtgaggaagacccccaagcatagactcgggntactgtgatgatggctgcagtccagttttatgattctgcttttatgtngtcccgttgataacagtgacttaacaatatacattcctcatanataaaaaaaaaacaagnatttgnattctta

SEQ ID NO: 547305 - DNA, 882 bp, Homo sapiens
ggaccgggcggctcggaggacccatggcggattcctcgccgcactgtccctgcggaaggcggccccggcgcggggcctcggcccttcgcgcgccgggccaggggccgggttccgagtccgaggaggcgagctgtcgtggagcgtggccggacaaaagacccgctccgtagggaagcaccgccaagcgtggggggcccgtaggggcgcgggggtatgagaggcgcatggggccgcaccggggctccgggggggaaaccagggtggaggggaaatcccgcgccacaagtaacgggggtcccgcatgggacccagtattaagggggccattacgctgttcaccactggtgtgtatcttgctggacgaacacttgtgaccttccgagtttattttcaggagaacgccttgggggtgaagggactaaccctcattggtttctccagaaatggaccgtggcgtgttaaccgcttctccaggggaagaggacccacggtgggggccgggaagagacactccgttctaccaagtcatcaggaatttggatgtacagcctgtgacagcttggaggatgtgttcagcacaagagatttcctgaagagagattgatttggcagaattagtttataacaccggcacgcaggaggtaaaagagaagagagttgaagatgtccctatggaatttcctttacacaaagtaaggtgattgggggcattattttaccaaattgagatttgttggcctaaggatcacagtggagattaaaattctgggatctatgtgcacttaactcaactggagttactgggatggcgagtaagccgggtataataactataggagaggaggggacaagaactggggggggagaggtaaatgcggacag

SEQ ID NO: 547306 - DNA, 677 bp, Homo sapiens
  misc_feature (358)..(359): n is a, c, g, or t
  misc_feature (367)..(367): n is a, c, g, or t
  misc_feature (392)..(392): n is a, c, g, or t
  misc_feature (630)..(630): n is a, c, g, or t
  misc_feature (647)..(647): n is a, c, g, or t
gggaagtggcgcctgtctcctggagtggaagaggcctgctccctggctctgggtctgctgggggcacagtaaatcagtcttggcacccacatccagggcagagaggtctgtggttctcagcatcagaaggcagcgcagcccctctcctcttcaggctacagggttgtcacctgctgagtcctcaggttgtttggcctctctggtccatcttgggcattaggttctccagcagagctctggccagctgcctcttctttaactgggaacacaggctctcacaagatcagaacccccactcacccccaagatcttatctagcaagcctgtagtattcaggttctgttgtaggaagagaggnngaggcatnccctgaattccacgcatctgctggnaacgagccgtgtcagatcgcacatgccccatgcccctctgagtcacacaggacagaggaggcagagcttctgcccactgttatcttcactttctttgtccagtcttttgtttttaataagcagtgaccctccctactcttctttttaatgatttttgtagttgatttgtctgaactgtggctactgtgcattcctggatggatcacttggaacttcgttggggtgttttggaggtctnggggtggaactgcgagnagctagagtggggggagcgccggcggtggg

SEQ ID NO: 547307 - DNA, 221 bp, Homo sapiens
atctaaggatcccggagccttaaccttatgaaggaatcattagttcagataaaacatctgatgactgagatggaacaaatagagagggacttgcgatgtatatccaggtcaggcactttcaatatctgactttgttgattcactttaagggttaagggtccggggggtaccggagggtcgactacgtacatccatggtgcattagctaggtttcctggtgt

SEQ ID NO: 547308 - DNA, 386 bp, Homo sapiens
agtgcaggtaaggttccccatagaccatggctgaggcacagacaggcaggacactggacacagctgtacaaccacagaggtcacgctcagtgtggtccttgaacagcgctcttcccacttgagaggcgtccaagtaaaggtggcaccaagagcatctctcaggccagacagtgtgcacgtgaagttcacttcttgaacctaagagcaagtcctcgaggtgcctggtcgttgcagcgacagtcagggggtggcaacaataggaggagaggttgagggaactggacaagggcacagtcacatccttggtgggattcgtgtagtgctatcacgtggcatgtcaacggacttgccatctgagacactagtagtagagccggcaaggtcaa

SEQ ID NO: 547309 - DNA, 882 bp, Homo sapiens
  misc_feature (358)..(359): n is a, c, g, or t
  misc_feature (367)..(367): n is a, c, g, or t
  misc_feature (392)..(392): n is a, c, g, or t
  misc_feature (761)..(761): n is a, c, g, or t
  misc_feature (809)..(809): n is a, c, g, or t
  misc_feature (852)..(852): n is a, c, g, or t
  misc_feature (869)..(869): n is a, c, g, or t
  misc_feature (875)..(875): n is a, c, g, or t
gggaagtggcgcctgtctcctggagtggaagaggcctgctccctggctctgggtctgctgggggcacagtaaatcagtcttggcacccacatccagggcagagaggtctgtggttctcagcatcagaaggcagcgcagcccctctcctcttcaggctacagggttgtcacctgctgagtcctcaggttgtttggcctctctggtccatcttgggcattaggttctccagcagagctctggccagctgcctcttctttaactgggaacacaggctctcacaagatcagaacccccactcacccccaagatcttatctagcaagcctgtagtattcaggttctgttgtaggaagagaggnngaggcatnccctgaattccacgcatctgctggnaacgagccgtgtcagatcgcaacaatgcccatgcagcacacacacaatggcacctcccatgccccatgcccctctgagtcacacaggacagaggaggcagagcttctgcccactgttatcttcactttctttgtccagtcttttgtttttaataagcagtgaccctccctactcttctttttaatgatttttgtagttgatttgtctgaactgtggctactgtgcattccttgaagaatagaaggaggataagaaagtggcccgggtgaaggcgctatatgagcaggagagggacttcgttggttttttggagtcttggttgtgactccaagagcagagtgaggaagacccccaagcatagactcgggntactgtgatgatggctgcagtccagttttatgattctgcttttatgtngtcccgttgataacagtgacttaacaatatacattcctcatanataaaaaaaaaacaagnatttgnattctta

SEQ ID NO: 547310 - DNA, 957 bp, Homo sapiens
aatttcggcgcatatcggctcatcggctgcgccggtggttttcccatgtggcgaaaacggttccctccccgcctgtcgtcttcgagtaacccggcatttccgcccactggtttggacgccccaccgtttggggtgaccgctgtggcgacgaaccacgggcgccgaggtgtccgagaagtctcccgcgtggggccccccgcccccagcggccattggtcagccgggcgccgtccacaaccacctctttttgttcgttttattttcgcgcccgataattgtgctctttgaaagccgtggcccccacctcttctcccgatttgtgcccggagaagccccgggcttacggagctttctcccttgagaatccgcaaacccagcgtcgccggcccgccggttttttctccaaggacaatcccagagacgcccccctggaagaatgaagtggggggtaaacaccccccaaccgcgcccccttgaagcccttccccccggcccccctgtgaggaaaagcctgttaccccggcgcccctttggagactcttcaaacccgcggggggtgctgcgccccgaccggacgccccactactctctgggaccctccgctggggagacactccctctccctatataatgaggaagatgaagcgattattccaaagagaatgggggaccaaacaaggagcccacacccccaccagcgttggtgtgcccccgaggcattggctgggccgaatatactttcttcacgaaggcgtcaccatcttccagccccgaccttagaccgcttcttgagaccgccccccgacagttttgtaagggccccctgcccaaaattataaggggttctcttcccctaaactcctctcttcccctcccacaccaccataggcgaagcgcttttttaaatccccccaaccctgggcccaaagggaaaaaaacttttttaagcccaaaaaa

SEQ ID NO: 547311 - DNA, 707 bp, Homo sapiens
gtattcgataccgcatcgccaaaatggattgggtataatgcatgcgcctgtgcttccagcttgatgtgaagctgaggtgagaggatctcttgagttcagaaggttgaagctgcagtgagctgtgactgtgccactgcactccagcctgggcagcagagccgctatgtctggtcatccaggttttgcagtagcgaattctgactcgtctttttaagtgctacgtagtccgtgtgtgagatagagagacgcaggtggcacgaatctcatgatcaccgggcaactctcactttctctgggtacaaagatgatttctcctaacctcagcctcctgaagtaggctgggattaccaaggcacatcagccaaacaaaaactggactacgtctacataagtggtaccttccgcgtaagggaccatgggttttctagcccaagaataaggggcgcttcggctcaggtcctacaaaactgtcctggaacctgcaggagtagaattcttagacttgaagtacgggagacttccacaaaaagttagtcttggagataaacaagcggcataagaggagacaccatacccaccaggtatgacatttacgtatttcttatcgctctacacactcctcattgcgctccccacctcttttcttcttctcgacctcttcgcatcccatgcgaatattccttctgtcaatcttcacatcagataca

SEQ ID NO: 547312 - DNA, 128 bp, Homo sapiens
acgatatacggtcatacctgagaaccaaaatgaacgaaaatctagtaacgcttcattcatatgcccccacaatcctaaggcctacccgccgcagtactagatcatatctattaaccccctactatatg

SEQ ID NO: 547313 - DNA, 121 bp, Homo sapiens
accgcctaagccgagcaccttattctcacaacggcaattattcccagcgaggctcgcgcggcagcaccccatccaccacctcaagctcagtgccgatcaagcggatgccaagccggtcggc

SEQ ID NO: 547314 - DNA, 385 bp, Homo sapiens
  misc_feature (358)..(358): n is a, c, g, or t
  misc_feature (360)..(360): n is a, c, g, or t
  misc_feature (367)..(367): n is a, c, g, or t
  misc_feature (370)..(371): n is a, c, g, or t
  misc_feature (373)..(375): n is a, c, g, or t
  misc_feature (377)..(378): n is a, c, g, or t
gtcgtggtctcgagcgcagaagcgagatgacgaagggaacgtcatcgtttggaaagcgtcgcaataagacgcacacgttgtgccgccgctgtggctctaaggcctaccaccttcagaagtcgacctgtggcaaatgtggctaccctgccaagcgcaagagaaagtataactggagtgccaaggctaaaagacgaaataccaccggaactggtcgaatgaggcacctaaaaattgtataccgcagattcaggcatggattccgtgaaggaacaacacctaaacccaagagggcagctgttgcagcatccagttcatcttaagaatgtcaacgattagtcatgcaataaatgttctggtntnaaaaaanaannannnanntcgtagc

SEQ ID NO: 547315 - DNA, 734 bp, Homo sapiens
ctctgcccagctgggcccagctgggtctgccacctacctgttcagtgtcccgggccgtgaggatgaggccgcatagaggcctgaggatgagctggcaaggcagtgagaggggacaaaacccaacctgtgttgggagcctgcagggtggtgcttgggactgagccagtcccaggggcattgtatggcgcctggaggtggggttgggaattgggggctggtgccaagcctttccttcttgcagtttggaaccctcttgtgtgttccctccccctttgtgggccgggcttgaagaaggccccccaggtgtggacctatggggagaacttcaccaggtttggtgtgggcccttcgcggggcctttccgcccccaaagaaatagacaaacagcacaaggggcagccaacatacaacacaccacagagacacatttttttttgctggagcacaagacgtaccgacgacggccccttatcagcaacaaaaccgcttttcggctaaagaccacaccacttcctcgatgaggcaggcgcgcgggggtacccccacagacaagcgctttacaggccaggaccaatggtcgcgcacacacgcggggttccccacacaagagaacaccccgggggcaacaaaaccacaaaacgcgcgtggggggaatcctcccccgaaattatagaaacacggccccggtggaacacccgcgagcggcctgttctgagaaacaaaactcgcgaagc

SEQ ID NO: 547316 - DNA, 603 bp, Homo sapiens
tgtccccgggaggcggaggttgcagtgagccgagaccgcaccatgcactccagtctgggcaacagagtgagattccgtctcaaaaaaaaaaaagaaagggaaaaaaaattagtttttaccttcctttccttgggttctcaaccggccatggaaatttcttggaacactctccaaattccaggtggattacttccaaaacaaattttatacaggtattaaaataattttcactttcttaatagtaataggtatcacttaaaaaagcggctcggggtaatagtaaatcttctaaacaggctacaattccaggtgccagcgttacattaacccacacttatggtccttctagttggaagaacacacttagggcctatatttacacttggcctggtgtacgccttcaggtggccttaacgtgggggtggccaaattaaatttttccggtagaaatttaccctggacttgggtaaaaccccactccggtttgggtttacattggccaaaaacttcttcaaaagggcctcggtattcatctgtacgtccttggaaactcatcactataacttcgggattcctcaggtaatgggactgctgggtggtgac

SEQ ID NO: 547317 - DNA, 129 bp, Homo sapiens
atgcaatcattttctatttttgtatatagagacacagagtctctctgggttcgccaaggctggagtgcaggggcataagcttggctcacggcaacctcgtgcctccataaattaaagtagattctccgt

SEQ ID NO: 547318 - DNA, 244 bp, Homo sapiens
ctcgtccaagaagaagatcttcaatgggcctcatcccctacgaccagagcggcttcgtcagtgccattccggcaggttcattcaccacccgcaagcaggcagttgggaccttggttggttgtcaactcaagggcccagttccagattcgtcaacaacaagtttcttggcatggagttggtgtcattggagttggcaggagcccaggcctgagccaacagtcggtccaagaggtggcttccattc

SEQ ID NO: 547319 - DNA, 1115 bp, Homo sapiens
  misc_feature (5)..(6): n is a, c, g, or t
  misc_feature (50)..(50): n is a, c, g, or t
  misc_feature (701)..(701): n is a, c, g, or t
cgtcnncggtcatctccggcgcttctagggctggttcccgtcatcttcgngagccgtggagcgtggggcgcccacaatttgcgcgctctctttctgctgctccccagctctcggatacagccgacaccatgggtttcggagacctgaaaagccctgccggcctccaggtgctcaacgattacctggcggacaagagctacatcgaggggtatgtgccatcacaagcagatgtggcagtatttgaagccgtgtccagcccaccgcctgccgacttgtgtcatgccctacgttggtataatcacatcaagtcttacgaaaaggaacaaggccagcctgccaggagtgaagaaagctttgggcaaatatggtcctgccgatgtggaagacactacaggaagtggagctacagatagtaacagatgatgatgacattgaccctctttggatctgatgatgaggacggaaagtgaagaacgccacagaggctaagggaacgaaccgtcttgcaccaatatgaatcacagaaagccaaaaaacctgcacttgttgccaagtcttccatcttactagcatgtgaaaccttgggatgatgagacagactatggcgacactcagaggacgtgcgtcagaagccattcaagcagacgggcttagtctggggctcatctaacactagttccagtggcgatacggaacttcangaaacttcaaactaccagggtgccagctcgcacgcatgatcaaggtggccacacactatgcctggccggtgacgatccctgcgctgcgaggacccagtgcaccagtgacgtaggcgcgaaccacacagacctcacatcacgccggaatcagggccgtcacacacgctcgcccacccacccatacaaagaggcgaccgcgcaaaacccaggggagaccacatacgcgacacccaggcaagagggtcacacggcgagcgtaaacaaaagaacgcgcgccacacccgggagaggaaacgccaagacacgggacacgcaaccgtgcgtatacaaacatccaacgacgcgataaatcatgagagacagacgcgagtcgagatccctgaaccaaaccagacaacgacgaggccaacagca

SEQ ID NO: 547320 - DNA, 1111 bp, Homo sapiens
  misc_feature (697)..(697): n is a, c, g, or t
tacttattgtggttctgacggtagctgaggcgtggcatggtgatgatgtgcgaggtccacaatatagctcggctcgctttcttgctggatccccagactctcgagactgcagtcgatcgaaccactgggattcggagacctgaaaagccctgccggcctccaggtgctcaacgattacctggcggacaagagctacatcgaggggtatgtgccatcacaagcagatgtggcagtatttgaagccgtgtccagcccaccgcctgccgacttgtgtcatgccctacgttggtataatcacatcaagtcttacgaaaaggaacaaggccagcctgccaggagtgaagaaagctttgggcaaatatggtcctgccgatgtggaagacactacaggaagtggagctacagatagtaacagatgatgatgacattgaccctctttggatctgatgatgaggacggaaagtgaagaacgccacagaggctaagggaacgaaccgtcttgcaccaatatgaatcacagaaagccaaaaaacctgcacttgttgccaagtcttccatcttactagcatgtgaaaccttgggatgatgagacagactatggcgacactcagaggacgtgcgtcagaagccattcaagcagacgggcttagtctggggctcatctaacactagttccagtggcgatacggaacttcangaaacttcaaactaccagggtgccagctcgcacgcatgatcaaggtggccacacactatgcctggccggtgacgatccctgcgctgcgaggacccagtgcaccagtgacgtaggcgcgaaccacacagacctcacatcacgccggaatcagggccgtcacacacgctcgcccacccacccatacaaagaggcgaccgcgcaaaacccaggggagaccacatacgcgacacccaggcaagagggtcacacggcgagcgtaaacaaaagaacgcgcgccacacccgggagaggaaacgccaagacacgggacacgcaaccgtgcgtatacaaacatccaacgacgcgataaatcatgagagacagacgcgagtcgagatccctgaaccaaaccagacaacgacgaggccaacagca

SEQ ID NO: 547321 - DNA, 690 bp, Homo sapiens
  misc_feature (5)..(6): n is a, c, g, or t
  misc_feature (50)..(50): n is a, c, g, or t
cgtcnncggtcatctccggcgcttctagggctggttcccgtcatcttcgngagccgtggaggtacgagcttaagacatgcctattttattaatctacttccaaacgcaacgaaaggtccatggacaaatttttttggggatttgggggggggggacacccccaaattttatttgttaaggattttcagggggcccctcaaagtttccggttacggcttgggaagaaaggtgggaagtgcgaaaaacgttactttgaaccattttttagaagcaacccgtttttttccggggggttccccggggaccgtgcggagttgggaaggggaaagacctgctctttcccgttgtccttctatttatagaggaatcttttgcccgggtcgttctttctagagggttttccccccttttgtgtgtccccgttcctcggtatcaggccgtggggagcagctccaccacatatatttgcgtgccgcaatcctccgatattattccctttgtggaccccttttgtcggttccccaacaccagatgggcgatctgtccgggatctaactaaggcctgaccgatccccgaattggcgtggggttattaccttcccgggaggaaagggaaacccgtgggaataagaaaggggcccaccttgtccccggctctcgcatgggttgcttcaacgaaattaacccggt

SEQ ID NO: 547322 - DNA, 1639 bp, Homo sapiens
  misc_feature (5)..(6): n is a, c, g, or t
  misc_feature (50)..(50): n is a, c, g, or t
  misc_feature (1285)..(1285): n is a, c, g, or t
cgtcnncggtcatctccggcgcttctagggctggttcccgtcatcttcgngagccgtggagcgtggggcgcccacaatttgcgcgctctctttctgctgctccccagctctcggatacagccgacaccatgggtttcggagacctgaaaagccctgccggcctccaggtgctcaacgattacctggcggacaagagctacatcgaggggtatgtgccatcacaagcagatgtggcagtatttgaagccgtgtccagcccaccgcctgccgacttgtgtcatgccctacgttggtataatcacatcaagtcttacgaaaaggaacaaggccagcctgccaggagtgaagaaagctttgggcaaatatggtcctgcctgcatgtcggcacagcaccactcaccaggcaagttggcagctcacagcatcagtccaagcatgcatgcatgcaccattagcacctcatttgcgcatcttgcatgcatgcacggcagtgcaacagttgcacagccagccaactgcagtgctcaagtgtgcaagcacactgtcatgtgccaacacatcattgcaatcaacacagcacacagcccaatacaaacaccattggccagatcttgtcaagcccacagtcgtatacccatcgtatcacctcaagcattgttgcacacaactatgtgggacattgcatcgcaggcaaccaggcataattgggcgtgcaaaatataccacccagggaagatcgcatgtcacatggcaacagacactttacccactcgacgaccgacacacgggaatctaaccacttcattgcggagtgacatacaattcctcaaaacaacctacagcgttacccccaagatctggcagacataacaccgcgcaacattctcacacagcaccacacccttgtacaccaaattcaacacacgcttgtttgctcaagctcatcgccccacgcactagcaattccacaacaagcgcatcaggtgacaacacccaaggcacattcattggcacctggcgacaaggctgaacagccacgacaactcaagagcaatatgggacatataacatggccacagaggcacacatacagttgacgtgccacaagaatgcccaacaattggtgacaattgtattcgtgccactaggcgattattagaacaacacgaaacagaaaccacccctaccaaacaaatcgccacaatacatcactgtgaacacgacaacaattgcgcacaacttactcgcacaagctcaaacacacagaaacatatgaaacaacacnggcaacacaacaccacagacaaccagacaaagcacacaaaaaccagaccacaacaccacgaaaaaagaaacacacaaacaacaaaccaacacgcgcatagagacaccaagatatacgacgaagagagagagcgacggcaaaaagcatcgagcgaaaagaaagcacagcagcacaaagacgcgaccacaagacgacaggacggaacgagcaagagaaaccacaacggtaggcagaccaacgagcaacgaaggcagaacaccatagacgagaacacaccaacaaagagccaggaccgagaaaaaaaaggaaacgacacagaacgagagaagacgaagcagaacgaacaagaacagc

SEQ ID NO: 547323 - DNA, 121 bp, Homo sapiens
tttagatcacaattgtccgcccatgggctgaagggactgaggagggtgcacgttggctagactgatgaggacacgagaaaacctcaagggagatcttcttcaatatcttggtgccgggagc

SEQ ID NO: 547324 - DNA, 695 bp, Homo sapiens
taaaaaacaaaaaaggagacattacaactgataccacggacatagtcatatcattagagattattatgaaacaactgtatgccaagaaattggaaaagctacaggaaatggatacattcctgagcccctataatctatcgagattgagccaagaagtaactagaaaacttgaacagaccaataacaagtaacaagattgaactggtaataaaaagtctcccaacaaagaaatgtccaggaccacatggcttcattgctaaattctgccaaacagttaaagaagaattaagaccaattctcaaactgttccgaaatattgaagatgagagagttcttccaaactcattctacaaggctagcattacccttatacaacaacaaacagacaaaggctcattaaacaacaacaacaacaaaacctacaggccaactgtattctacaaaacaatccttaacaaaaataccagcaaaaccatatccaagagtacatcaaaaagattatacatcatgaacaagtgggatttatcctagggatgcaaggatggtgcagcatacacaaatcaataaatgtgttacatcatataaacagaaggaacggaaaaaaaccatatgatcatctcagtaaatgacgaaaaagcatttggtacaattgaacaccccttcatggtaacactcccaaaagttaggggtagaag

SEQ ID NO: 547325 - DNA, 602 bp, Homo sapiens
  misc_feature (46)..(48): n is a, c, g, or t
  misc_feature (50)..(50): n is a, c, g, or t
  misc_feature (52)..(52): n is a, c, g, or t
  misc_feature (55)..(55): n is a, c, g, or t
  misc_feature (63)..(64): n is a, c, g, or t
  misc_feature (67)..(67): n is a, c, g, or t
  misc_feature (74)..(74): n is a, c, g, or t
  misc_feature (76)..(76): n is a, c, g, or t
  misc_feature (100)..(101): n is a, c, g, or t
  misc_feature (106)..(106): n is a, c, g, or t
  misc_feature (120)..(120): n is a, c, g, or t
  misc_feature (127)..(129): n is a, c, g, or t
  misc_feature (313)..(314): n is a, c, g, or t
  misc_feature (341)..(341): n is a, c, g, or t
tcatacctgactcttgaggatccacgacgccccgtgtagggctgannntngncanaggtttgnnccnaggaagngnagactgcagtgagccgatatcgcnncacancgctccagcctggncgacagnnngagactccatctcaagaaaaaataaaaataaagttgttctctgaagagcaaatgtctcattccagtaatgacccactcagcaggaatatggtggagttcagtccaattcaggtcagccatatccaaaagaccacaagtcattactaagttgagcaaaagagtttttatctattagcagaaaggnnctctctggcagcagagattaaaaactngcccaacttcatttccatacttcagggaacagcatattgaggatttacttatctatgacttgaattccttctttgttaccaagttaataaatgaccatgaaactcctgattaaactggataatgaaggattctgtagacttggctgcacgtatcggctttgtttgacttctctcctctctgttaacatctcagatcttgaatattccacattccccagcagcgtttgggggctgactataagtctatcaattccaactaaa

SEQ ID NO: 547326 - DNA, 309 bp, Homo sapiens
tcttctggccacgccgcacaccactggactggacttgggcatgatcgtcaacttgggacattgcagcacttcacgcactttaaacacgttgatgccatacaactgtttgccatccaggcggaaaagcaacaatctccaggcgattctgccctaccagctgtgtgcgctggtttactgaatccatcacacctgccatgcccagactcctaaatcctaggggtacgacgcgtacccaacactaaacggcacgagctttgctatttactgagtatggatattaaaacgacagtttcccgacaccctggccgc

SEQ ID NO: 547327 - DNA, 2016 bp, Homo sapiens
ggtgtctacatgcctgtcgtgttgtgatttgtgttcttgcttgctgtctgtcctgcttcgtcagtttgccggtgtgtgtgggcgtgctctgcgtcttcgtttgtgttgttggctgcttgctttcgtggtgttgtggtgtgtccctgcgtagtaggtgtgccgcccgcgtggtcgtgatcttgctttcgtttgggtgtgtgttggggctgtccttgtattcgctctgatagtgcttgtctagttctgctgtgcgttgtgtgtgtctcttaagttgttgtagttctctccccctgctgctgtgttggttttgtggttttgtgttttgctgtcctagtgtgttgtcgttgtctgctctgcgtgtgtgctcgcgtgtgtgtgtctgttgctggcatgccgcattgttgtggttgttttgtctggttcctacactgcctgagtgtgattgtgatctgttttgttgtgtcgacagctagtgtggtctgctctccgtttgggtgtggtaggaggtggcggtgcgtcgtgtgttgttgtggtggtgttctcttgtgtttttggtgttgggtgggtgtgtcgtgtgggtgtgtggttgttcgttctgttgttgtgtgttggtggatgtggtggttgggtgggtacgctacctcgcatggggggtgtgtgtggttgcgttccttactgctagttgtgtggttggtgtgtcgtcgtggttggggtgtggggtgtggcggctgcttccgctgttggtggtggggtgttgggttgggtgtgcttgtgtctgctccgactccggctctctgattggtggtgtgtgtggtgtttgtgtgtctgcgcgtgtcctcttcttcttacgttttctctagtctgttgtggtgttggtttttcaccatctgttgtgtggtcgtggggtggtcgctgtcctgttgtctctttctggttgattttcactcgtttgtgtttcgtctctgcgtgctcgcgctacggtctacggggtaggggtggtgttggtctgtctcatgctgtagttcgtttccctgctcgtgcttgattgttgtggttcgtgctcagcgtgtggtgtttcacgtctctcttctcgttctttgtgtgtgtcggtgtgtggtctcccccgcgcggtgttcggcgttgtgtgtggtgttgacggtcccaccccccccgtctgcgcgcgtcggtgcgtgtgtggttactcgtcgtttctgtgcgccgctgtttgcgttgtctgttggtgtgaggagagaggtggtgtgtgagtaatctcgctgcgttgagtgggttctgctctggttgtgagctcgacgccctctctgtgtgtgtgttgtcgctcgctggcgggtgtgtgatatatgagagtggggtggtgtgtgtcgtctcttcctactccccctgctgcgctctgttgtgtgtgatggggtcgtctctctctgcgtcacccgtgctgtgtgtgctctcgcgcgcggtggtgttgtgttcctagcgcgtgtggtgtcgcgaccggcccgctggtgtcctcccgcgctggtgtgtgtctcactgtggtggctgtctcggtgtgagtttgtgtgctgccgcgcgcgtgtgtgtgtgtgggcctcccgtcgtgcgtgtgcgcctcgcgtgtgtgtgaggggtgttgtgtgtgtgtctctctccaccacacacgttcctgtgtgtgtgtgtgtgtgtcgtcctctcgtctcccgctcccccctccactcaccaccacaagacggtgtgtggtggtctcgtgtgagaagacacctcagtggagaagagttgcccacacccccacccaggactccacccctgtgggggctcgagcacacacaccaccccccagtgccacgttgacagcagagtcagacagtctgactcactccacagagagacacacccccccccccccccccgcgggtgtcccccctggcgtgggtcccctcgccccctttcccccttatgtgtgtgtgtgtgtgtgtgttttaaaaaataaaaaataaaaaataa

SEQ ID NO: 547328 - DNA, 246 bp, Homo sapiens
gacgaggctcccagccgcgaccgcaaccctgggcctgtccatgccccggcgttggacgcgggcgggtaggacagacagatggacagacactagcacaggctacgagggggctgcctcagagcggagggaagatctcgggattgtggagaaggagtctaaagacagccgtggctctggtggacggggcaggaacagggacagaattgtgctgcaggagggagctctcctggctccctacgcctatgt

SEQ ID NO: 547329 - DNA, 691 bp, Homo sapiens
tccagatggccctggaactggattggctattgcagtgggcacagggggacgccctgtgtggaagaaagctctggctacaggtcctgggctggaacttcgagggcttgacgcaaggcgagggctgggccagtgttcccacagaactggtccaactggtggtggccaagaacgaactggcggtggccaacgagctgggcctactgagagggcgtggacacctggaagctggggggaacgtggctcccatgaagaggtggagggcttggtggagaagaatcggttccccatgatggtccctgaagaactctttgaactggagttcaacctggtcctggtactggagccacgaaggcctggttccagaagaagaatctggagggcctggaattccacactggggccttccagttgctgggccggtacaaagggctgctcaacgaggatacctaccaggcccggatttacaactcggccaactggagtggctttgtgaccgacaggtcctggagtggacgggagtcacaactggtctatcaggcccaacggggggccttggtccaatattctctggatgacttccaagccccttctgactacagatactaaccctaccagtccttccagaatccaccccaagttctctttcaggacagagggttctggtcctggttactccccacattccgtgtgg

SEQ ID NO: 547330 - DNA, 1105 bp, Homo sapiens
gctgagctttgctgggggtacacttcaggtcctactcatctggttcactactgcacctggacgatgacactcgaggaggctggagaacagcaaagatgggtgcctgctccttcctctgggactccctgacctcgacgggacacctgaccctgactgccagtacggaatgctcacatatagggtgtctgacaagccctgctggagagatctcacccagtcgggtggcaagagatgcaggaggacctgtttaaccaagcactttggctgtcccttggtggacgggtgtatgccgtgctcggggtgaacacccactatgtctgggcctagcctggattcctgcagcacacataggcatggatggcaaagcacataatgtctagctggtctgtgcgacgaaaaactgtgctaaccccctcccactcaaaggcttccatggccaggggcatcatctagcagattctagtccctagagacccctatggctggcagttgagagtaccatgccagggtagcgccccagagccagttgcagcgagggcatagtgtccagagctccacggcctcgaccatgccagcgcaccatctagagcccacaacgccttggccaccagtctgtgagttgcctagcgagttcgtctgcgccataccctctttagagcacccaacaaccatcccaggcctaccctggactcaggtggacagtgccgcctgcgcagcctaatgcgaagatggacttggtatgcacctatccaccatgcacatgaggaaagcttatacacgcaattcagtgccaacctaaggtaagtccccaaatgataaggattgcaaagacacaatccacacatgaagtcttcatccacgactaagactataccacagtcatgtatcaacatgagcaaatccgcagcccaaaaccactcaccccccaacgaactcctgcaacgctatcgcactatcctaagacaagtcgcaaaacgcgaatccctccccggggcgcccgaagataaacgcccaacgcacggcgccagcaagaccgacacgcacgagacacccgaagagccactagacgccagacaccacacacaccgattcacacgacggaacg

SEQ ID NO: 547331 - DNA, 330 bp, Homo sapiens
  misc_feature (166)..(166): n is a, c, g, or t
aaacgggcaactctggaccccataatatcaaaaactttcactactggaatgcctcatagcatttacagagatccagaaatggaggctgtaaaaattatgactaggtaagagttggctagagacaaggaagcatttccttggccaaaaatagagctgaactctcctngctgttgccagcattacaccacatacatttccaccagttatttgaagaccccttcacaaccaaagacagccagggcttcgcaaggcccagacaccccgctgactcatcccatctgcagcgtgcaaagtgctatttgtcactgcctagttatattccactctgcc

SEQ ID NO: 547332 - DNA, 476 bp, Homo sapiens
  misc_feature (20)..(20): n is a, c, g, or t
  misc_feature (98)..(98): n is a, c, g, or t
  misc_feature (197)..(197): n is a, c, g, or t
  misc_feature (204)..(204): n is a, c, g, or t
  misc_feature (261)..(261): n is a, c, g, or t
  misc_feature (340)..(340): n is a, c, g, or t
taaattcgcggccgcgtcgncaccgaaggttctacggcaaagactcccccgcctgccctcaaggtgaggagatgctcaccgtgttgtctggtgcggtngccgacgccaatgacgagctggccgacctcgtcgcgtgggattcctcccttgagggaatgggaacgaccttctgcggcgcgatgttctctggccctcanctcggcntcgttcacatcggtgactcccgtggtttcttgctgcgccaaggccggatgaagcggntgacccgtgaccactcatgggtgcagtccctccttgtcgatgggcggtttacccctgaggaggccgctgtgctcctgcnccgctccctcctgctgcaggtgctcattggtcaacctcagctcatcccgggcacccaaatcgtggttcttcggctgggcggccgctttctcttctgctccgtcgggctgtgcggtctcgtcgttgtcgactcggtc

SEQ ID NO: 547333 - DNA, 1266 bp, Homo sapiens
ggacaaagcagaaacagaggcatccatgagccattgcataaggatcgtggagactgtcaaaccactctaccggtggaaccaagccctagagaagctgggtcggcatggaccaggctgtcgcattgacctgcagagatgtgtgagcttggatgcccaacgaagcaaagtattccaggaggccttctgcggaagcatcgcgagggccaagattcaggacacggtgcgatacatgtcactcgtacagaaatgcccaataggtggaacagcatgtttctcgatactgtgggtaccccagtacagcagcaagcgggccactggagtagaacagaagcgacacacagggcttctacaccaacctggctgcgtagcgtggccagaggaggctgcttgggaagcaggaagcaaggaatctatcgccggaagtgaaatcggcggtgccaagcctcctcctgccgcccagtccctagcttggcgacccattcgcgactagcacgaccctggcctctcccatcgtctcgagagcggctaacatcgtcgcttccggccacggagatatggccactccgtgacctccctggggacatccatttcaatctcaccacgctgagctcacggctgcgctaaaccccccattatggcacttctcattaatcagccggaggaaagcgcctgacgcccgaccattaaggcaccctcccaataccatatgaagcacggggaggggacaagcgggccaacgaggccatgtagataccgccgtgtggaactggtccttggacccaagcctctgccaggcaaagcaaatataactgctcgcacgaccttgttgcccttcagacagggccacggcgtgcgtcagacgtcaccgagggcctctgccccggaaagcgacccaggacccactctcgcttccccccacttgcagatagtaagcgaaggcggacgtacgcgtatggcaccataagcagtcacaagggcttgaaccggagacttcgccctgctcactagaatctcacgtacagacggacgactcttcaaccgccaaactccctctgcgatagcacaccagcgaacactagtactctgacagctcataaccactcgaatgcgagtctccagacggcggacgcgaccatgggcactccaaacttgagcctcgacattcgacccccacataccacctgtgacacttaaagacaagacagtggaactgccacccgcagggaataagtggtgcactcgatcttcaaaaatacggaagccccc

SEQ ID NO: 547334 - DNA, 183 bp, Homo sapiens
taaaaaaaagagtctgtttcctatggtgaaaaacttggtttaagactctatagccttggaacaattcctaccctgtcacttaatttgtccagtttaatacccttggacgagtttaccttaattatctgaaaattcagatttttgcatcgtattaaaattattcatttgcccctttagaattta

SEQ ID NO: 547335 - DNA, 231 bp, Homo sapiens
tgggcgcggcgcggcggctggctgcctggacctgatggtggacctgggcctgccggctggaaaacatctgggtgaccgatatcgaaggcgtggtctacgaaggccgcaccgtgttgatggatccggacaaggcgcgcttcacccagaagaccgacaagcgcaagctggccgaggtgatcgagggcgcggacgtgttcctgggcctgtcgtgcggcggagtgctcaagccgg

SEQ ID NO: 547336 - DNA, 464 bp, Homo sapiens
tctggacagcagatgtcctgggttctattaccagtagcctgctggtcacaggcgcactacatgctgaagccctgggagcagacggtgttcaattccatgctaatatccattgtggagatggcactatacacaggatacgtcttcatgccccagcacatcctggcgatatggcactacttcgaaatcgtacaatgaacaagatgcgatcaggatcggaggttccttggggaagacccagcctacgaagtcggaatgagaccatcagatgtgataagaaactcttctagatgtcaacataaccaaccttataaagcataaaattcatgagtcgaacaggaaaatcatcctgactcatgtgttgtgttctttatttttaattttcacagaggctcttgtatagcagtttttgtctattttaacatcgtagtcatttgtactttgatatcagtattttcttaaccttt

SEQ ID NO: 547337 - DNA, 165 bp, Homo sapiens
tactgacgatagggcgactcccttcaaagctgaaggactttgtttagctgagcaattccagcccgtcgctctggcaacagtctttgggtggacttacatctcatgcatcactaaacagaggaatagccattcagcaagtaatgggggtctcataaaaaaaccaca

SEQ ID NO: 547338 - DNA, 168 bp, Homo sapiens
tgacgaggaggagctggaactggcactgctagagcgcctcttccgtttggctggggttggctccggaggacgtccctcctctgtgctgtccacctcctctgtgctgtccacctcctctgtgctgtccacccctctgtgctcctcctctgtgcctctctgtgctgtcca

SEQ ID NO: 547339 - DNA, 500 bp, Homo sapiens
  misc_feature (5)..(5): n is a, c, g, or t
  misc_feature (81)..(81): n is a, c, g, or t
  misc_feature (90)..(90): n is a, c, g, or t
  misc_feature (92)..(93): n is a, c, g, or t
  misc_feature (106)..(106): n is a, c, g, or t
  misc_feature (119)..(119): n is a, c, g, or t
  misc_feature (122)..(124): n is a, c, g, or t
  misc_feature (147)..(147): n is a, c, g, or t
  misc_feature (163)..(166): n is a, c, g, or t
  misc_feature (168)..(169): n is a, c, g, or t
  misc_feature (211)..(211): n is a, c, g, or t
  misc_feature (213)..(214): n is a, c, g, or t
  misc_feature (238)..(238): n is a, c, g, or t
  misc_feature (240)..(240): n is a, c, g, or t
  misc_feature (260)..(260): n is a, c, g, or t
  misc_feature (288)..(288): n is a, c, g, or t
  misc_feature (302)..(302): n is a, c, g, or t
  misc_feature (306)..(306): n is a, c, g, or t
  misc_feature (319)..(319): n is a, c, g, or t
  misc_feature (327)..(327): n is a, c, g, or t
  misc_feature (335)..(335): n is a, c, g, or t
  misc_feature (342)..(343): n is a, c, g, or t
  misc_feature (349)..(351): n is a, c, g, or t
  misc_feature (367)..(367): n is a, c, g, or t
  misc_feature (370)..(370): n is a, c, g, or t
  misc_feature (380)..(380): n is a, c, g, or t
  misc_feature (395)..(395): n is a, c, g, or t
  misc_feature (399)..(399): n is a, c, g, or t
  misc_feature (403)..(403): n is a, c, g, or t
  misc_feature (407)..(407): n is a, c, g, or t
  misc_feature (412)..(412): n is a, c, g, or t
  misc_feature (430)..(430): n is a, c, g, or t
  misc_feature (440)..(440): n is a, c, g, or t
  misc_feature (478)..(478): n is a, c, g, or t
gacangtggtcacagaacacacacacacacacacacacacacacacgtgcacacacacatccccccacaactacagccgcnaaaataacnannatggtgttgtaanatccccccagtgnaannnaaaattccccatggtgacctgtnacctgctccctgaaannnnannggccaggcaggtcacggtggggacgcagaaaaaaattatttntnnatcttgctgttttctagccttgantnggggacatgagtgaaaacanggggttttgaggagtaacccttgtaaanacatgtactccaanagcnaggaatcccaaanctcctgtncaaaaagntactggnncccctnnntccccaaacccccccngcngacccccagncccctagctcatccntttntctnttcntcttnttccagtgttcaaagagnacccccagcngggcagggaaggcccctcccggggtttacatgactgantccttctcagaggcgaccgtgg

SEQ ID NO: 547340 - DNA, 440 bp, Homo sapiens
  misc_feature (21)..(21): n is a, c, g, or t
  misc_feature (294)..(295): n is a, c, g, or t
ttccatgttttacttgttacnagtgtggcctaaacttttaacaatacccattttacatttgtattatttgtgtttagtagtatattttaataaagggggccacaatatactaaaaaattaaagacattgcttgcacaacctttcctcacctgtgaccaggctatcagactagatgacatatttagaggtaagattaaagttattacaaaaattgttaaaaaaaattttttttaagttctccctatgagctcagtctaataaaatgtctcaagaaaagcattttacaaaaagaannccttaatgggcataattttaacaatgcaaatcacctttaaaagactgtgtgcctgtaatcccagctattctggaggctgaggcagcaggactgcttgggcccaagtttgaaaacagcctgggcaacacaggctgttaaagaaaaa

SEQ ID NO: 547341 - DNA, 475 bp, Homo sapiens
tgccgagtatgcattaaaggcacagaaactttacattttgggggtcatttgttgagtatggtgaagtggttccttggtcgacaatggaaccacttggtgcaggtgccggagtcgaacgtcctgcactgggaggacaccaaagtattccgacagctgtgcttcgaacgcctgcacttttggcccgctggtgatccagcctgagcgcagtacatcgccgaccgccgagatggtggcttcatcaatggtaggtttggaaaacggcagaaagggctgttggctcataacgacgaaggcatccgtttcagataggcgatgagtagtagacgtatcagtaccgcatggttgcacggttcaactgaatatagcctgtcacgcgtgaatgaatcgtcatgttacgagcaaaaaaaatgccgctgcaaaagcggcatcttcggtgggtgcttcagaaggaagtggttccttgtcgggtaccgag

SEQ ID NO: 547342 - DNA, 638 bp, Homo sapiens
  misc_feature (9)..(9): n is a, c, g, or t
  misc_feature (63)..(63): n is a, c, g, or t
  misc_feature (83)..(83): n is a, c, g, or t
  misc_feature (124)..(124): n is a, c, g, or t
  misc_feature (154)..(154): n is a, c, g, or t
  misc_feature (163)..(163): n is a, c, g, or t
  misc_feature (223)..(223): n is a, c, g, or t
  misc_feature (253)..(253): n is a, c, g, or t
  misc_feature (274)..(274): n is a, c, g, or t
  misc_feature (281)..(281): n is a, c, g, or t
  misc_feature (299)..(299): n is a, c, g, or t
  misc_feature (307)..(308): n is a, c, g, or t
  misc_feature (332)..(332): n is a, c, g, or t
  misc_feature (338)..(338): n is a, c, g, or t
  misc_feature (344)..(344): n is a, c, g, or t
  misc_feature (354)..(354): n is a, c, g, or t
  misc_feature (402)..(402): n is a, c, g, or t
  misc_feature (415)..(416): n is a, c, g, or t
  misc_feature (423)..(425): n is a, c, g, or t
  misc_feature (428)..(428): n is a, c, g, or t
  misc_feature (430)..(430): n is a, c, g, or t
  misc_feature (432)..(432): n is a, c, g, or t
  misc_feature (439)..(439): n is a, c, g, or t
  misc_feature (461)..(461): n is a, c, g, or t
  misc_feature (484)..(484): n is a, c, g, or t
  misc_feature (491)..(492): n is a, c, g, or t
  misc_feature (505)..(505): n is a, c, g, or t
  misc_feature (534)..(534): n is a, c, g, or t
  misc_feature (546)..(546): n is a, c, g, or t
  misc_feature (574)..(574): n is a, c, g, or t
  misc_feature (633)..(633): n is a, c, g, or t
gcatcccantacagtcctggtgtggggcctcacctcagctccttcagcaagctgttgacagancccagctgctcctggaagtngccctcgtcctcaccatcctgcagctccaggctggccagcncctggtactcagcctgcaggctggccagtntcctgccgngctgggggtcctgacggtagcggtcccggcaggtggtcaggaggacgcccagtgtctgcngcaccttctcacgggcatgatgctcgggcngcgccagggggtgggccgtgntctcgcnccagccctgttccgcacnggcctggnngggggtgtgcgctggggatactgntgcggnttgctntggggacatntcctgggtcagctcagcctcctcctcggcgaacatgcttctccgtgancgggtcgtggagnngtgtgannnggngngnggggagngcctccgtgccgcttctcctgngccagggtcgctcagggcctgcngccgccnngagcttcaggaantgccgctgggcataggggaagtggcgcanaggtgagcacantgcaaacaggaccttcttctttgcagtnagcggctgctccgtggccaggatgaccagcagcttctgcagggctcccccttcgatggncttca

SEQ ID NO: 547343 - DNA, 262 bp, Homo sapiens
attctcgtttatcgccgacacccttcggagtaaaagtatggctagctctgagatatttaaagggcgaccctaaaaacgttcgcgaaaaaatgcgaaaggcgttttcctgggagaaatgttattccgttcaaaaatctacaacaaaaaccggacccgaagcaaaaagtgcaaacacctcggtccctcaaagagcggcctccacccaaaataaatagcgcggcgaccaaacgggcgcgttacaaaacgcggaatacccttcccg

SEQ ID NO: 547344 - DNA, 472 bp, Homo sapiens
  misc_feature (345)..(345): n is a, c, g, or t
  misc_feature (347)..(347): n is a, c, g, or t
ggagactaagcatatgggtggtagggggtatgctcctcagcggatttttcatgagaagtatttatcctagaagcgagggcttttgattttgagtttcccgcatctgaggtatctgtaccttcttggagaaaaagccaacgcctcacatcactctgtgtctctacgtggggcagggaggcgaggcttgctaacacccctttagattctgtggtctagaaggaagaaatgaggaaaacaaacattattccagacttttctgtcatccaaaaccaataaaacacaattctgttttttatacagtactagccaaagaaaacaaaaattagagcttctaagagcagtctngngctcacctttatacttttacacctgcgtgtatataagtataaaataatgacgtttggacaaagaagctttgtagttatttattttaaagttacagtactttaaaactcctcgataataaatagcg

SEQ ID NO: 547345 - DNA, 551 bp, Homo sapiens
attaacctaggactaggaaatctgactagttcaggtggcataactagtgctaaagtcatacatgagctttatcatcacaatgctacgaacccttatataagaaaatctagagaatcattaacaagcaaataacagaatagagtaggggatgagctgggacactctggggtcagactgcctgggattgacctggccctactacttgctggtggtgagatgctggccaattatgagtactcacctgtaagatgtgagcagtaagaaagtgtatctgcctcactgggttgtcagaacagacaatcccggtacagttctcggagcgtcttggaccatcactgtatagctagttaatactttagtaagtacaataaatttcagtcactctatctgaacatggtaactgcaagatatctcccttatttcctgtacttaactttaacctccacttcactgtgtccctctgatagggacacaagtgggttctgaagtgccctaagcctgtgctggtggcagatctgcccatgtgggtcctgatcctgcgtatgagctga

SEQ ID NO: 547346 - DNA, 292 bp, Homo sapiens
tacctgtatctagctactaaattatcaacaaacaattaatattactgttcactatttgtcactgctaatacacaggtttttcattatctgctctgggtttattattttatatttatataaaagaaagtattgccctgtcaccccaggctgaagtgccgtagtgataatcttggttcactgcagcctcgacctccggggcctcaggcgatcctgctaatttcagcctcctgagtagctagggactacaggcttcacactaccacccccagagcaaaaatgagatgttggacgg

SEQ ID NO: 547347 - DNA, 452 bp, Homo sapiens
ggctcgcaatgtgaggacccaagtctaaaattagacatagtaacacatatgtggtctgggtctgctgttctaccagcccgtagcctctacgatattcatgctacagcaatccccagctgtcgtgagttcatccaatagatgcgctctcagctctgcctctgtattctacttgagtaactcttacccatccagtcacctcttctagagaacctccttgaatattcccatgaaatttcacacctgcaccaccaaccccagctgcccatgcttccatgtcccaggcacctctctggccttctccttcctatgtatcattttagtgtctgtctgtgtgtttttcttaactctttgaactcccaagggcaaggatcatatttatcttcaggtgtgtgtgtgtgtgtgtgtgtgtgtagtgtgtgtgtgtgtgtgtgtacttatatatatacaggcat

SEQ ID NO: 547348 - DNA, 154 bp, Homo sapiens
  misc_feature (10)..(10): n is a, c, g, or t
tatcaagtantaaaaggcaagcataggatttcacgcatcatatttccaactccctatcaacattgcaccatggatgaactgtttctcagcactgtgctgcttcacttgtgacttcaaggatgcaattgtggaggcagcacagtatgcacatcag

SEQ ID NO: 547349 - DNA, 382 bp, Homo sapiens
acgcgtccgcccacgcgtgcgaattgagacattttactttaatctttaaaaaaaatgcattaaaaacacactcaaaaaaaaaaaaaaaaaaaaaaaaccagactgggggaaaaaaggtttggccttatcacagaatttttactgtgctgtataaatgtttgcaaatgcgaaaagtgtgcattaatagtgtgtttccacattaattaatgccgccttcaagagcaatattgtgcaggtaaaacgctgtttgtggttttctgttgcacagttaaagctgacccaccctatgcacaagacaatcaaatataaatctgtcctcctcaggatgcagataatactcatgtaaattatggagcacaatgtaagacaaaaggagacactt

SEQ ID NO: 547350 - DNA, 823 bp, Homo sapiens
agggaattaccgtcttgtttagcccccccctttgtggagtcccgcccctggttgggccatctcgcgcccccttctgtttttgggagaggagatattaatccattccgcccccccctggtttcaatggcgcgggtcctatattcgctcccgccccctctctcgggacgagaggaaatcctctcgtactggagtcggggaaatactatgtggcgcaccctcccgtgcggacgcgacaaccgcactcttctcctctgggatgataactaaaagtatcttggcgccccacactagattgtattggcttctctggataggtcgcaactaaaatatggtggttaccccacgtgaggttaattttctatagcgagaggcgcgccaaattgttaccatttgtttgtaagatacgcggtgctccactccccactgagctacttcgccgctatttgattcggcgagagagagcatcacccccctccagagagcgaaatgctatggatttagtagacagtgcgagataaagaggggtctatatcataaaagccccactgtgggtgtctaaccgccttatatactcctccatagaaagctttataaacactcctcagacaatcatttcctgcgttcttcactctctttttgcagagtcctcgcttgttcttcctcacgactcgtcttaatttcttcttcacgtgggactcagcgtcgtacttcggacgaagacaaaaaacgcgcccccaaagagcgtagttcagggacccaccacgttcctccacactcaatttgaaaagtcaaaaaaacatgtcataaacgacccacaaaacgc

SEQ ID NO: 547351 - DNA, 246 bp, Homo sapiens
tgcagacttgccgtcggccacagcaaactgacatcaaaaccccatgttgcccagcctgaccccacagaggctcacggtgacaaccaccgaacggaaaaactcaacttcgtaaacagataataacgaagtcttagacgtccccaccttaaaaacgcgaagcgtgaacaatccggcgagcccgacagtgtaaccgccacagcccccgcacgcggggcgggctgggttagcgggagatttgagcggccg

SEQ ID NO: 547352 - DNA, 843 bp, Homo sapiens
ccgactgacgtgtgttggctgctaccaccagtatttatatagtgtctcgaccacttctgggttggcgaagtgcggtgacaaaagaggtgcggtcggagggtatgtacccgccccccgttttgtatgagatgctcgcctggtcagtgatattggggcgtcttacatatatagtgaccctctctggtgggtgcagacgccaaccaggtgcccccgcgtgggtagggggtctcataaagaataggcccggcctttggagggtaggagtagctacaatagatatgatagagccctctccaatatgtattcttttccctcccagcgagtcacaacacacaatttgtgttttttttacacccccagctatatatatcgaccactatatgtacttccttattatatacaatgtgcattatatatggtaaatttatatttaggacctataataatcagtaatagtagatagagatcttcatacagtgtgtaagcgactcgattacgagttaccctatgatagcgtacctcgcactcccgtttttcaaagttttccttctatcttgtcctccctcgtgttgttacatctaaagaagccccctattgtgttttgcacttcatgttatgcccgctatcgttctgggtgtaagtggtaacaccacggacggtggtattttaagtctgtagaagtgaggtggccgttccgccaagaaagagatttttagagacgcccgtcctctactccgcctggaagtatgtaccagtaagtcattaaagtaagacgaacagttaaaaaggaaaaattgacatttgtaggacgtaatcaagcatatataaacaaataatagaata

SEQ ID NO: 547353 - DNA, 109 bp, Homo sapiens
tggacctagattatcccctacttcaaagtcagatcgctctacctattaactcttcccactatttgctacatagacgggtgtgctcttctagctgttcttagcgtagctc

SEQ ID NO: 547354 - DNA, 630 bp, Homo sapiens
  misc_feature (104)..(104): n is a, c, g, or t
  misc_feature (200)..(200): n is a, c, g, or t
tcttaccacaaagaatcttgtgtggggttctggaagaaatctcaactgggttatcatttcacactaccttgtggggtcgccagtgatggagcaaatacccaggnaggccttgggctcagtctgggcattaaagggacagagtcagttcacaccctgtttgtgattaaagagggcacagcagggccagtgtgagtttacancaacgtaagcccaggggcaatggtttgggtgattcattttcccctttaggtggtgccaggggttggaggcccctaaaaaaaaatcagtaagccccagtgtccccccagcccccatgtttatgtgaacatgcgttgtgtgctgcttgttttggaaattgggcctgggtccaggcctagggtgagttccctgtccgtacaaacccaagatcagggttgagggtaaggaaaaaaaaaaattaggaaagttgggcccaaaactggagactgttttttttttctggaaatccaaaaattgggcccgtggagcaccagtgtcagcatcaggggggaacctttaaaacagcagggggggggcccaggcccccaaataattcttatggccccagccaggaaaaatggcagtttttaaaggaaaaaatgtttgggccca

SEQ ID NO: 547355 - DNA, 103 bp, Homo sapiens
gcaagacagagaattggcacgtggccaagggatcgggctggaaggcccaacaaggctgtccatatacactcggtctggaggcagcccacgtgtcaacacggag

SEQ ID NO: 547356 - DNA, 343 bp, Homo sapiens
aaaaggaaaaaaaaattgggattcccctggcataaactttagtttgcccagttcccagctactacttgggcagtaattgctttatgcggctgtaatccataacctgtgaagacagcccatcatttaaatccccttccaaataatatttgggtagtgttagctgtgaatttcccctggccagctgtatctctataaaaataattccatgtattaatagtcccagaaagcctgtaagtgagcaactatttttatgaaacggccccctatggataaattaacttttccaaaaatcttgtttactgtatgatattttaaaaccctgtcaaataaaatatatatccca

SEQ ID NO: 547357 - DNA, 121 bp, Homo sapiens
gtacgaggtcgagcgtcggacctgatatatatgtaccatactttctttatcaatccaccactgatgggcacctaggttgattccatatctctgctattgtgaacagtggcatcgataaaca

SEQ ID NO: 547358 - DNA, 922 bp, Homo sapiens
  misc_feature (619)..(619): n is a, c, g, or t
  misc_feature (682)..(683): n is a, c, g, or t
gcatgtttaagggagggggaagccttcctctcaattgttgtcagtgaaattccaataaatgggatttgctctctgccaaaaaaaaaaaaaaaaaaaaaaaaaaaaaaaaaaaaaaaaaaaaaaaaaaaaaaaaaaaaaaaaaaaaaaaaaaaaagaaggggggcggggccgcgcttaaaaaaattatcccctcggaggggggcgcaccatatttgttcgcgccaaccccgtttttttgttgaacaaagggggccaccataatagggagggagtcgttttattattataccgacagcagcgcgcgggcggcgcggtctatttaaaaacacagcgtgggtgagtgggagacaacccgttctgtgggtgcaaggtaatcttcttgaagaagagagcccccactatctcttgggggggggcgaacactattgtgggggacacacatcatatcctacgagaggatttattaagggggctcagtgggggaggaatatatatacaaacaatttgagagaggtggtattactagtgtggtggtaatcacaccggggcatctatatggtgtgaggggagggagagaagaaaactttgtgggctctcgagagagagattattaattatngctagtcatcatatttctttctccctcgcgggggcggttcttgtttgttgaaaataaactatnngcgaccgtcgaggatacgaatgcgacagacaaggaagcaaagccatcatcacgacgaacgacagaacacgccgacagcggcatgagacatagtaacgactcagcaacggaacgaacagacgaccaacacacaaccgagcgaagaaggcatctgaagagacagcgaagcagatagccagctagatgagcagacagcgagcagacgagcaccagagcaaatacgaagcaagaaagaacagt

SEQ ID NO: 547359 - DNA, 178 bp, Homo sapiens
ttaactaaaggccgacaaagatgatcactttagggtggatattattaaaaatgaaacagttatctttaagaacggtcagctcagtggctggtgcaaaggatgaactgcacattgttgaagcagaggccatgaatgacgaaggcagtccaatcataagtcacactcggcaactttgaaa

SEQ ID NO: 547360 - DNA, 231 bp, Homo sapiens
taccacttaagtgaatatacatggaagaatatatatatatacatatatacataatatacataaatattcataaatatatatacacattatatataaatatatttatcattaatatgtatataaatatataaaatatgtacacaaaatctatacataaatattaatatatatacataaatataaatatatatacacacataaatgaaaggtattaccctgggtagtcacaga

SEQ ID NO: 547361 - DNA, 703 bp, Homo sapiens
tgccacgtgaatcgaggcagtgtaaaagagacgcgcaatgtcaaacagaggaaatatccaaagaagtgcatagatgcatactaactataaagagatatagcacacgtatgtaaacagcggcactattcacaatagacaaacaattggaaccaaaccaaatgtccatcaatgatagactagggtaaagaaaatgtaggcacatatacaccatggaatactatgcagccataaaaacagatgagtacatgtacctttgcagggacatggatgaagctggaaaccatcattctgagaaaactatcacaaggacagaaaaccaaacaccgcatagtaactcactcaaaggtagggactttaacaatgagaacatatggacacagtgcagggaacatcacacaccaggacctatcatgaggtgtaggggctgggggagggataagcattaggagaaatacctaatgtaaatgacgagttactgggcacagcaaaccaacatggcacatagtatacctagtgcaacaaacctgcacattgtgcacatgtaccctagaacttaaagtatagtaataaaaaaaattcaccaaacaccacaaaaaaaatcaagattgtcaaagacaatttccacgtcacccgaaatccaaataatattagacaaagcagggagtcaaccagatatggcccaattggcaaacgtccaggacaa

SEQ ID NO: 547362 - DNA, 147 bp, Homo sapiens
actagaggaccctcatttacgcaggaactacacccttatcccatactagtaatatcgaaaccatcagctactcattcaaccaatagccctaggcgtacgcctaaccgctaacattactgggcaggcactactcatagcacctaattg

SEQ ID NO: 547363 - DNA, 278 bp, Homo sapiens
ataaatattgtgctttctgactgctacaccaactggttgttcccctgtccctctccctccctttgggcttccctattccctgagacacaacagtactgacattaggccaatgaattaccctacaatggcctctaactgttcaggagaaaggaagaggctcacgtctttgactttaaatcaaaaggcagaaatgattaagcttagtgaggaagacatgttgaaagctgaaacaggccaaaagcgaggtctctttctccgtcgacgcggccgcgaattta

SEQ ID NO: 547364 - DNA, 150 bp, Homo sapiens
gacttaataagataataactatactaggaagattgagatgaactccaacgcttattctcatgctacctatatcgcatgtgttgctgattgttttatggctcgatgaccctactcatggttttgtactaagacttcatttacttaacgacg

SEQ ID NO: 547365 - DNA, 374 bp, Homo sapiens
tgggctggatataggtgtgagccagtgctgcctgggcatattccaactctttctaacagacactcttgtcccttgacattctgctaggtgaacagaagtgtgtaccgagaccagtgagagaactctccccggagctccaggagtgggcacctttactcgcctgggacattccagcctggcacagcaatcccccctcgccttcataccctaactaccgccgtctgttgcgtgattcagccacgacctaggggcgctggtggctgaaggtcggtgtatactcgggatgcctagtctccagggagaggggaggcagcatttcagagagctgccatgtgttttcagccctgaggtccagagaactgggaaatgctgtc

SEQ ID NO: 547366 - DNA, 337 bp, Homo sapiens
acattacctgatattgtttatttttaaaaactcttatgagacgtcagtcttatatatctcaggctgcagatcgttggcttacttgcccagcttggacccttggcagctctttaatgttactaaatccgtgactcctctaattctgaccctaatccattggattccttctcctcccccaggctgctggacactccggaaatggcaacttgcttcattacaaatgaatacttgatctcagctgggctctgaacttaggtcttatgtcttttccttcctcaaagtcttccatcttttcccacctaaatcaattcaagagtagtttccaatgttatccttt

SEQ ID NO: 547367 - DNA, 612 bp, Homo sapiens
gtacagcgcacgcatgaagctgaattgggctgtggagctggagcgaggatacaggcccgccgtggcgggcatctctccatccagaacatgacgacattgctggccaatgcctccttgaacctgcattccaagaagcaagccgaactggaggagatatatgaaagcagcatccgtggtgtccaactcagacgcctctctgccgtcaactccatctttctgagccacaacaacaccaaggaactcaactcccccatccttttcgccttctcccaccttgagtcctccgatggggaggcgggaagagaccctcctgccaaggacgtgatgcctgggccacggcaggagctgctctgtgccttctggaacggtgacagcgacaggggagggcactgggccaccgagggctgccaggtgctgggccgcaagaacggcagcaccacctgccaattgcagccacctgagcagctttgcgatccttatggctcattatgacgtggaggactggaagctgaccctgatcaccaggctgggcctggcgctgtcactcttctgcctgctgttgtgcatcctcactttcctgctggtgcggccatccagggtcgcgcacgggga

SEQ ID NO: 547368 - DNA, 790 bp, Homo sapiens
ctccagccgcccggggaatacctctagttcttcccggccgcctgcgccttccgccccgccggctttcctcctccgccctgcgggtgcctcctttcggcccccgcccggggtccggcgcagtggcggtcgcgggcccggcccggaaggggcaagatttcctcctcgggggagcctttcccaacccagggcgctatgtgctccagtgaaaggccaaggaggggaagtgagggcaaggaggccggccagacgagtgactcccccgggtaccgggcacacaaaaggcccgggccgtggtctgtggggagccccaggtggaaggtaaacaattggcaaaaacacccctattaatttcccctgtgcgtgggcgtggatacaggcatttgagggactgtcgcaccttgggaagacaaaaacattttatcaaaggaaggacccctataaaggagcccttttttttcaccccgagggaaggcaaatgcaacgaacagtccttttacaccgagggggtatggtttcacccaaggccccccattaagagggggccctccaaaatatgttacacctcgtttttacaacacctggggcaaacctaatagcacccacgcgtttttgtccacaaggcaaacggagggacacagcggcgcatgaggcaacccgttatggtggggaggggccccaacaactttcgtaagcagcaaccacactcccgtggtgggacctccattaagcccccaagaaagaaatggccccaccaacaaaagatgcgctacaacttctcccagtacaattt

SEQ ID NO: 547369 - DNA, 132 bp, Homo sapiens
tctagcaggatctgaggtctttacccctggcaggtcgatacactccagtggtgcagccgcctttgaatagcacgacgcggtttgatagtgacctgcacaccactctctttaagttctcgcgaagccccaaat

SEQ ID NO: 547370 - DNA, 116 bp, Homo sapiens
cggcacgaggcctacctaacaagggcagtggctttttatttgcaggaattgttgcccaattcgggctccccgatgcaatagggtctcacctggaaacatgatcaccctctcaatca

SEQ ID NO: 547371 - DNA, 105 bp, Homo sapiens
ggatttgctggtgcagtacaactaggcttaatagggacatgtccctattaagccattcaagcttctaacgttagaagcttgaattcgagcagtagtagtagtagg

SEQ ID NO: 547372 - DNA, 1876 bp, Homo sapiens
  misc_feature (1840)..(1840): n is a, c, g, or t
  misc_feature (1869)..(1870): n is a, c, g, or t
tgatttggggcgggcgggggagtctccaggggaacctcgaggttgcccccagcagaacccatgcaccgctaagccacccgagcaccgcctccttccgctcgggcccgccccggagctgcgggtcgctccgagcccattcccgccggaagtgcgtcaccagcttggcgctccgcctccctcggccttagctagaagtcgaaacaaaacaagccgctaaggcggtggcggcggcgccgggacgggggaggggcgcgccggaaccggaaccgacctgcgccggaaccggaacggagagcgggttgccagggcccgaagagggctggctgcggcggtctcgctcggctgtccgttccttgctggagaatttggccacaaagagttgccaagatagctgggccaggaagaaagcgccgcagccctgacccagacgctgttgccgaccccggggcactctggctgtcgaccaagcggctcaagatgtctggcggggccagtgccacaggcccaaggagagggcccccaggactggaggacaccactagtaagaagaagcagaaggatcgagcaaaccaggagagcaaggatggagatcctaggaaagagacagggtctcgatatgttgcccaggctggtcttgaacctctggcctcaggtgatccttctgcctcagcctcccatgcagctgggatcacaggctcacgccaccgtacccggctgttctttccttcatcgtcagggtcagcatccactcctcaagaggagcagaccaaagagggagcttgtgaagaccctcatgatctcttggctactcccactccagagttgttgctcgattggaggcagagtgcagaagaggtgattgtcaagcttcgtgtgggagtaggtcccctgcagctggaggatgtagatgctgctttcacagatacagactgtgtggtgcggtttgcaggtggtcagcagtggggtggtgtcttctatgctgagataaaaagctcttgtgctaaagtgcaaacccgcaagggcagtctcctgcacctgacactgcccaaaaaggtgcctatgctcacgtggccctccctcctggttgaggctgatgaacagctttgcataccaccgctgaactcccaaacctgcctcctgggctcagaggagaatttagcccctttggcaggagagaaagcagtgcctcccgggaatgacccagtctctccagccatggtccggagcagaaaccctgggaaagatgactgtgccaaggaggagatggcagtggcagcagatgctgcaaccttggtggatgagcccgagtcgatggtgaacctggcgtttgtcaagaatgactcgtatgagaagggcccggattcagtggtggtgcacgtgtacgtgaaggagatctgcagggacacctcaagagtacttttccgtgagcaggacttcacgctcatcttccagaccagggatggaaacttcctgaggctgcacccgggctgtgggccccacaccaccttccgttggcaggtgaagctcaggtgggtggtgcccggccccaccactgtgcctgtcctacaccgtgggctccatctccctggctcatctatcctgatgctcattcctcctaagtccctgagttcagcccccacaggaatctgattgagccagagcagtgcaccttctgtttcacggcttctcgcatcgacatctgccttcgtaagaggcagagtcagcgctgggggggcctggaggccccggctgcacgaggtctgcacacgagctcccttcattgcccagttccacgtgaccaggacccaaacccctgtcacatgctgctaaccaccagccntctcattccccctttttaaggtgcagtgnntggtgc

SEQ ID NO: 547373 - DNA, 142 bp, Homo sapiens
gatttctagcaggatccccctccagacaggactaaggagaaggtccagatgcgggttatcttgaaagaaactaagtgacattctacgcagagagttgtctatgttgtctgaggttcagcagctgttaatctccttcctttgg

SEQ ID NO: 547374 - DNA, 168 bp, Homo sapiens
gggccgcgaggtgatctgctactcaagagcaagctcagtagggtccccccccacaggaaacttcgcagtgctgcaccaggcgaggaaacgagacctctttcgttccttctagcaaggtctggacggacgtagaggttattgaaacctgcagacttgttctgacggagg

SEQ ID NO: 547375 - DNA, 720 bp, Homo sapiens
  misc_feature (98)..(98): n is a, c, g, or t
gaaagtggaccgaccccgtggggcgagctgatgccgtcagatgaagagtcctctgaggaatagcaggaggagtagagcgacgaggagtacccagacanaaccggcttcttcactcgtgcagacagtcacagtggtttgatcactccagacggcttctcctctgttcctgccggtatggagactccagagctgattgagctgaggaagaagaagatcgaggaggccatggatggcaacgagactcctcagctgttcactgtgctgccggagaggaggacgggacctgtcggagctgctatgatggcgtccacacacatctacgacatgactacgacggtgacgagtcgtaaggtgggcgtgtctgtgctggacggagactctcagggtgtggaggtggccctggccccagaggagctggagttggaccccatggccatgacccagaagtacgaggagcacgtccggagcaacaggtggaaaaggaggatttcagcgacatggtggccgagcacgccgccaaacagaagcaaaagaagcgcaaggcgcaaccgcaggacacacgcggaggagccaagaaatacaaagagttcaagttctagagctgctcgtccttcagtcttttattgtgcgggagcacacatgtttgtgcgtcaccttacagtgagccatgtttttcatttacggtcaatgtttttgtaaataaaatcccagtccatgcca

SEQ ID NO: 547376 - DNA, 654 bp, Homo sapiens
gggcagtgaaaccatcaggtcctaggcttttctttggtaggagacttttcattacagcttcaatctcattacttgttattgttctgttcaggtatatttcttcatgattcagtcttggtaagttgtatatgtccatgaatttatttgtttcttccaagttttataatttggttcataattgttcaaataagtctcttataatcctttgcatttctgtgctatcagttgcagtgtctcctttctcatttctgattttatttaagtcatctctcttttttcttattccagctaaaggtttgttgattttgtttatcttttctaaaaatcagctctttgttgcattgatcttttgcatttttaagtctttattttgtttatttctgctcttatttttattatttcttcccttctacttaatttgggtttagattctgtgtgctgtattccaaataatttatttgcttgtgtattctagttgaataattctctttatatttaactgtatgtaatttacctcttatttaactgtattcaatgttttgtttaacctgtttaatttctaattttaactattatatcttttattgttataagttccacttggtactttaaaaaatctgcctgtcaattccaatgctctattgtattttaatt

SEQ ID NO: 547377 - DNA, 636 bp, Homo sapiens
cagtctgatctcgtactcctggcctcaagtgatccaccagcctcgtgctcccaaggtgctgggattacagacgtgagccacgtgccgagcaggttccttctttaccttctaatgaaacatttaaactataagtgtgcctgagaaggttaagtttgtggagctctgtagcatgtcagagaagagtagtttttagagatctgggaggaatattttgagagatacatattcttttctaagtatgttatcacccgtgtggtgttgagcatatcgtcccaaaaacctgcttcagcagagcatgttctaggccaggcatggtggcttcacacctgtaatcccagcactttgggaggccgaggcgagggtggatcacgaggtcaggagattctaagaccagcctgtgctcaagatggtgaaaccccgatcgtctgctgtaagatcacgaaaaattagccgggcgtggaggtggtgcgcctgtcagtgtatctcgtgagagctgaggcagagattgcttgaaactcaggaggtggaaggtgataggtagagctgagatggcgccaatgagatcgaacccgagtcgacagagcaagattaccgtcccatatagaaaaagcagtttatggcatacagcagggatat

SEQ ID NO: 547378 - DNA, 148 bp, Homo sapiens
gtacacggtccccatgagcttcagcacgacagtgcctgcctttggtcccctctccaacctgctccccctacccatcgtgaagtctctacatgacagatgctgggcggcttcagctcacctgtgtgcaacagtgtctagctagagaaac

SEQ ID NO: 547379 - DNA, 184 bp, Homo sapiens
attcgcggccgcgtccacatttttacagtttctggtttcacatgaaattgtttgcactactgagactgttactacaaactttttaagacatgaaaaggcgaaaagaaaaccataccgtccccattcctcctcctctctgagggactggagggaagccttgcttctgaggaacaactctaattat

SEQ ID NO: 547380 - DNA, 572 bp, Homo sapiens
tgtggctaccatgtctctcgcgcgggatgtcgctgggctgtcggacctgggagcctgtgcagccgcaatggattcaacgattcgaatatatgggcaatcttctgagagatatcaccagggagactaataggtccatcaacaaagcatccagaaaagttaccaagtctatgaaaatggtagcggtcggcaaaatatgcccgagctgagagagagctgaaaccagctcgaatatgtggatgggatctttagctctgtatgagaaagctgatatcaaggggcctgaagaccaagaagaaacgacctccttatgggtgtgtcctcagatcgaggactgtgtggtgctattcagttcctccattgcataaacagatgaaaagcgaggttgcatacgacttaacagtcacgctgggcaatggaacgttatgcttgtggacctggtgaccaaaatcagaggcatactgtataggactcattctgaccagtttctggtggcattcaagagaagtgggaagaaagcccccatttgggagatgcgtcagtcatggcccttgagttactagattcgggatatg

SEQ ID NO: 547381 - DNA, 260 bp, Homo sapiens
ggggtgggggtgccgctctaatcggctccatatcattggagtttacgggttctcggtgttgggtttctgcattctttactgcgctcagatttaatgccttacaaagggaaagcctctggccgtcacagcgtaggacgcatgaaggtcactcgtggtgaggctgacatgctcagacattacaagagtagagagggagaatcctaggacagaggaactccgagagatgagtgtctggagcgcttcattaacaggttaccttt

SEQ ID NO: 547382 - DNA, 419 bp, Homo sapiens
  misc_feature (68)..(68): n is a, c, g, or t
  misc_feature (149)..(149): n is a, c, g, or t
ccaggagaatggtgtgaaccccgggaagcggatcttggctcaactgcaaccccttgccttcctgggcnttggacagtccttccccactctagccgcgcaagtagctgggaccaacaggcccgtccactggcctgctaatttttgtattntgggagtttttttgtagataatggggtttcgccatgttgcccaggatggtgaactcctgggtagattgcctgaggtcaggagttttgagaccagcctggccaacatggcaaaaccttgtgtctactaaaaatacaaaaattagccaggcacggctgggcacggtggctcaatcccagcactttgggaggctgagacaggcggatcatgaggtcagaagatggagaccatcctggctcatatggtgaaaccccatctctactagaaaatgt

SEQ ID NO: 547383 - DNA, 171 bp, Homo sapiens
cggtcgcctctcgaggctccccgattcactggttgatatatagaagcttatatcatttttgaataggggacgtttttattttgttacttcttctctctccttttcttttctttattttttgttctttgggaaaagggtgctcctcttttcccccgggtggagaggcggggg

SEQ ID NO: 547384 - DNA, 956 bp, Homo sapiens
  misc_feature (751)..(751): n is a, c, g, or t
  misc_feature (792)..(792): n is a, c, g, or t
  misc_feature (816)..(816): n is a, c, g, or t
  misc_feature (819)..(819): n is a, c, g, or t
  misc_feature (826)..(826): n is a, c, g, or t
  misc_feature (859)..(859): n is a, c, g, or t
  misc_feature (867)..(868): n is a, c, g, or t
  misc_feature (870)..(870): n is a, c, g, or t
  misc_feature (873)..(874): n is a, c, g, or t
  misc_feature (876)..(876): n is a, c, g, or t
  misc_feature (878)..(878): n is a, c, g, or t
  misc_feature (884)..(886): n is a, c, g, or t
  misc_feature (896)..(896): n is a, c, g, or t
  misc_feature (898)..(898): n is a, c, g, or t
  misc_feature (914)..(914): n is a, c, g, or t
  misc_feature (924)..(924): n is a, c, g, or t
  misc_feature (926)..(926): n is a, c, g, or t
  misc_feature (928)..(928): n is a, c, g, or t
tttaaatcaaccagtgatgcccccccagacccaaaggcgggtcaaagccgcctttccgtccttacttaggctgcaggataaatgtgttaacttacacaatttttgcacacttctaagttgatggtgctaagtgatggtacaaatgaagcaagtttaatattgaggggctgtgagcacctccctccatgtgaatcataaaactggtgactttcctggtatttatttacaagagtagcaaaacctcgttagtgtcgcctctcagatttaaggctttctgatgacactattcttaagaccagcattgatccgttatatacaaatatatgttttccatcgtttattattgctattgtcagaagaaagatgaacctgtattatttatgcatctacccgagtaactgcgcatggatacatagacgcactgtagcaaaacaaactatgttgtaaccacctctgactactatttgtatatcaaagttgatgtacttttgaaatatttggatctagtttctaagttatgtatagtgtttctatatgttccccagaaattacttctgaatctgtcaccacgcataatgagttcttggtgatacaatggtgagacttgtaatgagcaaaaagctagccgtggacgtagctcctcttttccttctttctgagtaacctgttttgtgattaccgtaagacatcacagattacctgaaaccccttccagtataactaggccctccttccttccacatttaattgnttaatagtttgaagaaactattggaaatgggcattttatangacatgtatggctttacaatattnaanatgagcnaaaagaaaaaatatgagaaggtttatgtgggtntgtaaggnnanggnngngnaagaannngtagtagttnanaagaggggaaaaaccnttaaaatcantnangcaaaaaaagggtggggggaaaaaaaaa

SEQ ID NO: 547385 - DNA, 481 bp, Homo sapiens
aaaaaaactctgccatttctcctgctgaactgttgaaagaaaaaatatagaatgatctattgctcaccagctttattttttaaacaacgccttattttgttgaaattgtcaaagactggatttagatctcataaagctttgttaaatgtttcccagtaaaaagtttgaattcagtaaaaattattgggtgttgtattgatcaaagcatgttaccccttccccccttttatagaccccccattttttttatgttaactagaaagcttttgttaaaaggtatttgttccttatttgggccacccccttgattatgcagacaacctcatcagctgcctaacttatccctctttgaacttttgaccccctgttggatttgctggaaatttagttcccctggaaagttttttttacttctctatggggatttttgtgaaggattcccaaaggttaagtttaaataaaacccagggattttttgcca

SEQ ID NO: 547386 - DNA, 113 bp, Homo sapiens
  misc_feature (106)..(106): n is a, c, g, or t
ctgtaagactaacagcaaggattctgggcgaacagaaaatccacccagagaagaacaccttcggaaaaattgttcgctgtgaaagagtttgaatcacatctggatnagttaga

SEQ ID NO: 547387 - DNA, 347 bp, Homo sapiens
  misc_feature (29)..(29): n is a, c, g, or t
gacatgatcacggctcactgcagccttgnctctagagctcaagtgatcctcccacctcagcctcctgagtagctgggattataggagtgcatcaccatgcccagctaacttatttgtatttttggtagagacagagtcttaatatgttgcttcactggtctcgaactcctgggctcaagtgatcctcccaccatggcctcccaaagtgctgggatgacaggcatgagcaccgcacccaaccaacaacacacttttgagcatgctctttttcaagggttggaagacataacattgtgaagatgtccatgctgcttaaagtgacccacacattcaacacaccgtcgacg

SEQ ID NO: 547388 - DNA, 381 bp, Homo sapiens
catgttatgtgcaattttagctttagttttcttacctgtaaaatgaggacattaagatttaccttgttgcattaaatgagtaatgattatgggtaaactacctagttcacagaaggaattcaataaagcataatttttttatttttcctttttctggaatcctcagtgtcttccttgctactatttctgtaatttcaagaacctgacctcatggtttaaacttcctgccctccctagttatggctaactgagagatagatggtggagtaagcacaattttctgtgcaattatattttctacaaaatcagagtattttattaaaaataagtaagccaaatattagacacccctatatttaaattgaataaaacatttagaac

SEQ ID NO: 547389 - DNA, 601 bp, Homo sapiens
accatgtgttggtcactttatagagaggtacaggcagtgtttttcccccatgctggtgactatacaatggtgtggcgtcagtgggtgttttgtgtgagatagtggatgacacaagtgtgggtcttaatttctttctggttatataattggggggatacttttttttttgtggttcacaggccatggtgtccacggatagatgtaaggggtagagtttgtggtaagagtaaccccaccggtaggctgtgttgggaggatataattgaagcttgattagacgcctttgtttttatagggtgaatgagtcacgcactcttagctgattgtttgcttcgtggggtgaaatacaattagggctgctgtgttgagtcctatgcgactccgcgccagttagtagtttcttcatgaatttagtttttatagcggcttaccccttaagagggggttaaagttatgtcatttgtgggcaacaagttgacaaagtgattgtcattgttttgattcgtcaacacagggtatatgggtttcccaggatattctttagggtttttttgaacaagttaatttaaggatattaagggttataatttgttattagata

SEQ ID NO: 547390 - DNA, 441 bp, Homo sapiens
  misc_feature (7)..(7): n is a, c, g, or t
  misc_feature (20)..(20): n is a, c, g, or t
  misc_feature (169)..(169): n is a, c, g, or t
  misc_feature (173)..(173): n is a, c, g, or t
  misc_feature (433)..(433): n is a, c, g, or t
aaccaantgggaaattaaantgaataagatggaaaatcctccctaggttgtttaagattgcctgttcttggggtggagggaattaaaagtacgtggtgtgacctgccattttcctgtatcctcttattcattctgtaacccttaaaaagtaagaaattatcccgggtancggntgtcacgccctgtaatccccagcactttgggaggccgaggcaggcagatcacaaggtcaggagttcaagacaagtctgaccaaatggtgaaacactgtctgtactaaaaatacaaaaaaattagccaggtgtggtggcaggcgcctgtaatcccagctactcgggaggctgaggcaggagaattgcttgaacccgggaggtggaggttgcggtgagctgagatcgcaccactgcactccagcccaggtgacagtaaaagnctctgtct

SEQ ID NO: 547391 - DNA, 971 bp, Homo sapiens
  misc_feature (1)..(1): n is a, c, g, or t
  misc_feature (486)..(486): n is a, c, g, or t
  misc_feature (488)..(488): n is a, c, g, or t
  misc_feature (901)..(901): n is a, c, g, or t
  misc_feature (903)..(903): n is a, c, g, or t
ntccttcgctagagctcagccacctgaggcaggatgctagatccatgagcagcatttacagagggaaataaggacactcaccaaatagggctactttgaagaaggacacagctgtcttagtgggacgaaggcagacgaattatctcctggtgcttaagactctgacactgtgacttgggatcaaagactgggtacctgcttgaaccgcgctcttactcatttcctcctgcagatcgtgatttttgctttttgtgtgccctcgcacggtcttttttcccttttgccacgtcgctaagctgccctcccggcgcgcctctctcgcccgacggccctccggggtctccgccgggggtgctctccgcgcccgtcgctccgccgccgcgtgtcctctcttcccccgctcccctgcctccccccgccgcgcgtcgctttccccggctccccgccgcccaccctttttttcgtggccgacctcgtttttttttntntcacccgtggcacgtgctgctgtgccctttgggggtgtcagtatacgtggtctccgtttcttctggtgttccccggtgcgttagcgtcggggtggctgcttcccgctccggccggtcacgctaatctgtgcctgtccggcgtgtcaagcgcgccgaggaccgccctccgccgtgccgtgtactgtagcgtcgcatccctctctctcccggcccgctgtcgggcctgcttctctaccgcgcggtgcgcttccccccctcccccgcgcgtacctcgcgcttcccctccggccgcgcccccgccccccacccccccgccgcgtgcgcgccgccgccggcgcttcccccacccgccgcgcgcgagccggaaggatcggtcttctgtcccctacaatcctgttcgtccccccgtacgntntcccgacaccgtctgtcgtggccgttggcccggtgcgcaccagccagcgcaacagcaagaagatcaag

SEQ ID NO: 547392 - DNA, 297 bp, Homo sapiens
gtgtcagctctggtgcatccacagaaatgagcaaatgggtagaaggtgtccatttcatggtgcccagcatggccgtggatagtgattaagaagctctgccctcttccatatgcagtgagactatgtgctccaactccagaaggggctgtgtaggaggcagcgcacgacgcacagggaccttaccggtagcttcccgtcaggaagctaatgaggagcaggagggcctactctcttgaaaagaagccatatgtgcccattgtttcccctccatgccacgaataatgggacattatcctg

SEQ ID NO: 547393 - DNA, 232 bp, Homo sapiens
  misc_feature (15)..(15): n is a, c, g, or t
  misc_feature (22)..(22): n is a, c, g, or t
  misc_feature (42)..(42): n is a, c, g, or t
  misc_feature (64)..(64): n is a, c, g, or t
  misc_feature (82)..(82): n is a, c, g, or t
  misc_feature (97)..(97): n is a, c, g, or t
  misc_feature (121)..(121): n is a, c, g, or t
  misc_feature (129)..(129): n is a, c, g, or t
  misc_feature (153)..(153): n is a, c, g, or t
  misc_feature (155)..(155): n is a, c, g, or t
  misc_feature (193)..(193): n is a, c, g, or t
  misc_feature (204)..(204): n is a, c, g, or t
  misc_feature (206)..(206): n is a, c, g, or t
  misc_feature (217)..(217): n is a, c, g, or t
  misc_feature (222)..(222): n is a, c, g, or t
tttagggtccccctnatctgcnttacaccctggtagaaacanaggcctcttacctcattttttnctaaagagcagctctttnaatcaacagactttnactggaacacctaccttgcaccanctattctnatttcagagtccatcttttctctntnggaatgtacaggctaccgagacagaaccatggaaacanaactggaatgntntatgatactgnaatanagatccccca

SEQ ID NO: 547394 - DNA, 595 bp, Homo sapiens
cgacatttagttcagggtagaatgactcatcttaggtgggtacaggctcaagaccgatacggtaacgcatatagagtcttcaaaggagaaacagaatactgtgacatagaagagtgctgaagcgttatcaatggatactacaacttgcgagacctgccacaattgactattgagtacaaagatcctagcaaacgaataacctcttctagacgagccttaaagacaacacctgagaagtatgttgcgacacacagacatagcattggagcaccggggatgttaaatgatacagatgtaggagcagctctatcgaccgtcaaaggtctgagatacgtagcagggctcaattctcagtgcgagtcgactataaagcagatgcacaactagttacggacgacaaggggcttaaaggagtgttaacccgttgagtatcaggtgcatacgtccttttgaaattgggtctaaatgaacccgacgtatttatcaggaactgattaataaccaattctgcacccaagaataggctctatgcccgtcaaataggaatcctaaaccccggggaggtagaccactaaggtcatagggataccactaa

SEQ ID NO: 547395 - DNA, 936 bp, Homo sapiens
caccatagcctaccccttccttgtactatccctatgaggcataattatacacagagctccatcgtgcctacgacaagacgagacctagaaatcgctcattgcatacgtcttcaagtcagccacatagccctcgtagtagacagccgattctcatccaaagccccctgtaagcttcagccggcgcagtcatcctcataatcgccgcacgggctgacatcctcattactattgctgcctagcgaagactcagaagctacgaagcgcactcagcagtgcgcatcataatcctctgctcagaggatcttcaaatctctgagtcccagctaatagctttttgatgacttctagcaagcctcgctaacctcgccttaccccccactattaacctactgggagaactctctgtgctagtaaccacgttctcctgatcaaatatcactctcctacttacaggactcaacatactagtcacagccctatactccctctacatatttaccacaacacaatggggctcactcaccaccaaattagcaacataaaacctcattcacacgagaaaacacctcatgttcatacaactatccccatctctctattccttgaaccgaatcataccggtttctcttaaaaacaaacaaaaacaccttgtgggcgcgccgcaccggaaaagtttaacccattgtggggcgggcccaatatatgaaaagtgcaagtggatccagaaacgtgccacaacggtggtctccaaaaagcgggggcgagtctcaccaaggtgcttgtttcgacacctcactcccccgcgtcgtgataaacgcggagcagcacaacatgcaccaacacacaatcgcgctcatctattcattagtacacctcaaaagacaaaaacaaatcagcgaaaaagacacaagaattcgacgagggaaaaagaaaaat

SEQ ID NO: 547396 - DNA, 548 bp, Homo sapiens
ggaacccccctccgttttgtggcgaagcctggctcccacccaaggtgtttattcttccccgccccgcggggaccattgggggacccttttgtggcatcacgaaaccacaagtccccggtcgggcctctttgggaggcccccccaccagtgggttggaaggccaaaaatccttcttgtttgttctcccagccccccccccccaattggggttcatcagggttggttttttttagggcccctagttggggggccccccccaaagtggttttggacccacccaagcgggggggccccctgggggtttttttcttttcccaggaaaaatttatttgggcccccctgggtttccggtgcaatgaccccctccccaggggtttttagccccctccgtttgggcaaccctagggaccagggtgaggaccccccggatgacaccccccccccccccgggtggatgggggttttgccccccccccccagggggggccctccttagggggaagttaaaagggctcaaaaaggcccaaataaagggtgtgggccgggga

SEQ ID NO: 547397 - DNA, 104 bp, Homo sapiens
tcgacagcatcctaaccagaaaagggatggaggggactggcaggatgaacagcggtatgaacatcactagcatctggacattttaagtacgtggttgtaaatgt

SEQ ID NO: 547398 - DNA, 333 bp, Homo sapiens
  misc_feature (70)..(70): n is a, c, g, or t
gggggaaaggaaggggataaaccaggaatttttagggcagtgaaaatgccttctaaggtgatatgataangtgtatacatattcattatacatttgtttaagcccacagaataatacaatattaagagtgagccttaatgtaaaccatggaatttggatgataataatgcatcatgtaggttcatggattgtaataaatgtaccactctggtgggagatatgataatggggcaggctgtgcatgtgtcggggcagagagatatgggaaataactgtgccttctgctcaattttgctgtgactctaaaactggtctaaaaatatgtagtctatt

SEQ ID NO: 547399 - DNA, 406 bp, Homo sapiens
  misc_feature (135)..(135): n is a, c, g, or t
  misc_feature (183)..(183): n is a, c, g, or t
  misc_feature (269)..(269): n is a, c, g, or t
  misc_feature (274)..(274): n is a, c, g, or t
  misc_feature (339)..(339): n is a, c, g, or t
  misc_feature (399)..(399): n is a, c, g, or t
ggatgaagccctgatgacagccctcaaaaacccatgtttactctgagagaagagctggtcaagccagagtttcagcagctcagtgggcctctgaagacaaagcatgttcccctctcacttgcaaatctccagccntcttgctgccctgaagattgcacaggtttggcagagatggccctgccnatccttggcaaagtgctcccttgtcccaagctcagcttctccaaccagaaacagggctggagccccacaaactactgcacaaagtnctcanctgggtgggccttacaggggtgggtcaaactgtaatttgacctttgacccccccacttttgcagnatatgtgaccttgggtcaggttactaaacttttctgggtttccttattctggaaataagnaaaagta

SEQ ID NO: 547400 - DNA, 1692 bp, Homo sapiens
  misc_feature (290)..(290): n is a, c, g, or t
  misc_feature (420)..(420): n is a, c, g, or t
  misc_feature (1350)..(1350): n is a, c, g, or t
ggcgcccagccctgttattccacttgcagactcccatcagattgtatagagcgagcagtgcggatgccaaggagaaggcattccagatagcgactcgagggaggcagcttcgtaggcgaagttgctgcgcctgttgcacatgagtactgtggcccctagcgacgggggtcgcaggaggtgcccaagctcaccacgataccggggactgcacagtgagtgcataacactcactacttcctagctgagccatgttgcttcctagacaaccatgctgcacttggcgctttctntgactggtttctgcgcttcgcgtggtggtgcgatctagctctcagtttcgtgactcagcctccttgtcctgagttagagctcatttgtcgcgcgctggtctgccttgagaccgtcgggcattcatacgantgtctggtttctagttaaaactaactccttggatagacatcataccgaattcacgcgagtggacaccggcttgccgcctgctcgtacgatccggattggacgactcgcgtcacgtgcacccattgaacggggggctctcagctcctcgttaccgtagacttgggacttgattgtgcgcgtagttgagttgcagcctatttcgatgaaattcggttgccatcgccgattccttccttgtggatggatctatactcacctggtttgctcgccctccttgttgggggcacccctttcaagagaactctgtgcaccaatgtcgagtatccgaagacaaaccgtatttgactccgggggatcaacgactttagagagggagttgttcgagtaaggaaaggccgcctataataccatacatggtaggccttccccattgggaggaaggccccacgtacacatggtaataccgactcgtccttgcgtgttgaccttttggtggactcgacgtttacaaggctccagagagcctacgtggtgggcacctggtggccgaagcgaagcggccacttgttggcgccgagcccgtactccgttttccacccttggggtcccccggccagtttcttggacacacttccagagttgccccctctttggcgtttcacttttcgccgcgagactgggggcatagtcggccatttttttgcccaggacgttgtggcccttgcaagggaaccggacacgttccccactcgttggccattgtgcctggtgtttggggagccctttctgggtggctggggaccccccgaggaggggctccacatccggacctttgatggttcgcgcctttgagacacagggtgtcagtcctatgggggcggatataacacccttttcgggggcttccacgtgtgccttcccccaaggaanggccgagacggccgttccagctaccatttagccatgggcggtacccgagcgggaacttttcacactccttgttaaccagtctttggggatggcatctccacaaagagcccccgcaacactgggcggcacagaggtatctataagttactggcgcatagcataacccccgcgggttagaatgcatctagtagcagtcggaacatatcgaacacagagacaactgtgtccgtttgttcgcacaccacgactcaccgctcgaagtgaaaccccagaacactagtggatataagcgccggtacattgagttactactcagatacatcggagcacaaaccaacatct

SEQ ID NO: 547401 - DNA, 393 bp, Homo sapiens
cacggtggctcacatctgtaatcccaggacttgggaggccgaagcaggtggatcacctgaggtcaggagtttgagaccagcctgggcaacatggtgaaatcctgtcactattaagaaatacaaaaaaattagcctggcgtggcggccaagcacctataatcccagcttagttgggaggcctgaggccaggagaatcacttggagccaggaggcggacggttgcagctgagccgagatcgcgccagcctgggccactagagccaagacgtccgtctcacaacagcaccacaacgacgccaacaaacaaaaacggggggggcgcacagggccccgcgggaagcgtttacaaacagcggttgggggggggggcccgaagggaggggaacacggggc

SEQ ID NO: 547402 - DNA, 651 bp, Homo sapiens
  misc_feature (25)..(25): n is a, c, g, or t
aatatgctgcagaaaatgccagtgntcttacatatcagatgggagatcggctctcccatgccaagatgtctgctcttaacatgggcttccttcaaacactctgcattgcatttgtttgcatttgttttgagacatcacaacagtaaagagaaaaaaaactcccatttgcatagagcttctgagtcttcagagactcgtgtgtctcctctcactgggcattcacttccatcttgggaggcgcaccattttactcctctcacagaaaagaaacagaagcaccgagcggttaaacaacttggtccaaagccacttggtatgtcatgacttggtacgtcatgaagttgggctggaatttagctggaaaagtgcaggatgagcggctgcatttgtaagtgcataaaataactatgagctcaatgagtaactgacgtacaccatcacactcaccctgggtgctgccaagcgtggaagctatttaaccacagctcactctaagcacgacgatggagtttatctataaacacatttttcattattaatcaagtattggctttgctggcatcatttttccaacagaactttatgcaataaaatatccttcaccacaaggttgagtagcacagagctatcctgagaagagtctttttggga

SEQ ID NO: 547403 - DNA, 931 bp, Homo sapiens
cggtcacgccgagccagcgcctgggactggaaccgggccgtagcccccccgagtattcgtccatccatcgtcctctaccagtggatcccctcggcagaagtgaagcgagcatgtcgggctcgtttgctgcaagaatggtgtagagctaggatcctgacgcggttctgctagcagcctgacggaaagtgcggtcttccgtggagaggacgtggggtggcagagcaatgcggtgggtaaacgtaccgaccgtgcgtactctagaaacgctaaagtcagaaggaagaatactcacagggaagaatagatagcgcttgatatgtagatgaacggtgcgagcgaacgaccttagcacggcagacagaaacctagtcaaagtgatggataacgtgcatctacggaacattgtgatcatacacgaaggggtgttgacttcgacatcgcaagagctagctgactgcgtcctctagaggataactggagcaggactgaataactgcgtgtagagtactccgtgaggagcatgactggactcaaggcaagactgatacctatgaacgctggcctgcgtagtcgaagtcccgtagaatgaggtggtgtaactcctagacatgccaattgaccttgatccgacgatgatgcgcatctaaggctggaatccatcggcttcgggccatgattggcttatagccaaaaggaaggggcccaaggatggtcctttcgtcaccaagtttacagaaagccaaatgcttgccatccgagaactgtgagagtagccatcgagagataaaatcctgagtcagacttcaagccgttacaagatgggcgtgggggaacacgcacacgaagacttcttaagggccaacttgggacagaacgcagacccattgaatcttggcccctggcctgtaacgtgggacttatgatggaagat

SEQ ID NO: 547404 - DNA, 83 bp, Homo sapiens
agaaggcctagagaaggctgtgagccaaggagggagggtcttcctttggcatgggatgggcatgaagtaaggacagggactgg

SEQ ID NO: 547405 - DNA, 437 bp, Homo sapiens
tctccaagacattttctatggagtacagctacaggatatcaatcatatacagagaatgcacaaatatggaatgaaacctcagcaagtaaagtggtggtaatgaaccaaggtatagaaatcgttgatttagctatgagaatagttggagctaagagcctagaaatgaacagacctcttcagcggtactatagagatatacgtgctggattacataatccaccaatggaagatatggcttacactaatattgctaaaagtattacaaacaaactctaatgtcatattgatattctttaaaggaatgagatggaatttaatattcttcattgcaacgcatataaattttaaaaaagcgcaatgtacattaataatttaatttagtcattgatagacttgtcgacgcggccgcgaatttagtagtagtagtaggcggccga

SEQ ID NO: 547406 - DNA, 289 bp, Homo sapiens
gcagcgtgacggtgagatgtgtccccgcgcagtgactggccatggtgctgacgcggggctgagcctggagcacagagagggcgagcggagactcgctgccagtactccagctggtacagaacgcagaccagcacgccctcctgctctgaggacaccatcccctcccaaggctccgactacgactgctactccgtgactggggatgcggacagcgagggcccgcccgagttggacaagtcatccagcatcccgcgcaacagcaacatcgcccagtacaacctgccggtgg

SEQ ID NO: 547407 - DNA, 214 bp, Homo sapiens
aggacacacaacgagtagtcgtcacagcacacacaaacccacacaacacacaacacaacaacacacacaaaacacaacacacacacaacatacacaaccacacaacacacaaccacacaacatacacgaccacacaacacagtgcacacaaacatagcacacacaacacacaacccaacacacaaccacactatacaccatatcgcgtcagaat

SEQ ID NO: 547408 - DNA, 351 bp, Homo sapiens
ccccattcacgttcgtgggagataatgttttttcttttctttcttttgttttgttgtttctgagatcatgccattgcactccagcctgggcgatagggcgagactctggctcaaaaaaaaaaaaaagaaaagaaaaagaaaaacgaaaagaaaatgcttcggggacttttcaagtatgcctggctattcagacatcctcagagattaaccccaaaagtgagtgattatctcccgtgagacccaggtttagaaaaataacttcacaagtacaaaagtgggattatggccctaatgtgagcccactttaaagcaactaccataaacaatctaaagcagagtctgcaactgtgc

SEQ ID NO: 547409 - DNA, 159 bp, Homo sapiens
gagaaacctacccaaccaagaggcgccctgctttgtaatgacctttacgaagacacgtctgatacccaacctgacagaggaaacaacagtagtctgaaagggacagaatgagagagggggctggagaaagaaatgaataaacatgaatgcatctggaga

SEQ ID NO: 547410 - DNA, 179 bp, Homo sapiens
tggactgcgggcaaacacaatagcatgtgtgcagttggacaaaatcctgggttactaggtgtcttcagaagctgatggcatccaaagcaaatgaccaccaaggtattgtatcttctaaacatgtataattagagcacagtgcctccgtgaagtcaggttgaccaagtatagggaaacga

SEQ ID NO: 547411 - DNA, 181 bp, Homo sapiens
atctcgccttgtagccagatgatctcaaaataataataataataaaatatataatatgtatatatacaatattgattactgcaaaagatagtcatgacaaagatgaatcctttatcagacacccttgtagtggagcatctctccccacgacttttttcttttagttatctttttttgggaa

SEQ ID NO: 547412 - DNA, 187 bp, Homo sapiens
acttagaggatccgcgggcgaattctactactactgtgaggagggctacgtctggccggggaggacgggactcagtgccaggacgtagatgagtgtgtgggcccgggtgctccttttgcgacaggttgtgattcaacacacaagggtccttccattgtggttgcttgcaaggatggttgctgccccc

SEQ ID NO: 547413 - DNA, 1469 bp, Homo sapiens
  misc_feature (859)..(859): n is a, c, g, or t
ggccggacaggaggctgccggagggcgggaggcaggagcgggccaggagctgctgggctggagcggcggcgccgccatgtccgacagcgagaagctcaacctggactcgatcatcgggcgcctgctggaagtgcagggctcgcggcctggcaagaatgtacagctgacagagaacgagatccgcggtctgtgcctgaaatcccggggagatttttctgagccagcccattcttctggagctggaggcaccccctcaagatctgcggtgacatacacggccagtactacgaccttctgcgactatttgagtatggcggtttccctcccgagagcaactacactctttctggggggactatgtggacaggggcaagcagtccttggagaccatctgcctgctgctggcctataagatcaagtaccccgagaacttcttcctgctccgtgggaacccacgagtgtgccagcatcaaccgcatctatggtttctacgatgagtgcaagagacgctacaacatcaaactgtggaaaaccttcactgactgcttcaactgcctgcccatcgcggccatagtggacgaaaagatcttctgctgccacggaggcctgtccccggacctgcagtctatggagcagattcggcggatcatgcggcccacagatgtgcctgaccagggcctgctgtgtgacctgctgtggtctgaccctgacaaggacgtgcagggctggggcgagaacgaccgtggcgtctcttttacctttgggagccgaggtggtggccaagttcctccacaagcacgacttggacctcatctcgccgagcacaccaggtggtagaagacaggctacgagttccttngccaagcaggcagcttggtgacactttgactcagctccccaactactgtggcgagtttgacaatgctggcgccatgatgagtgtggacgagaccctcatgtgctctttccagatcctcaagcccgccgacaagaacaaggggaagtacgggcagttcagtggcctgaaccctggaggccgaccatcaccccacccgaattccgccaaagccaggaaatagcccccgcaacacctgtggccagatgatggattgattgtcagaacatcatgctgcatgctgcggggggtcacccgacccctcaggccaccgtaggggaacatgagcctcggcgaatccctacctcgcgaacatgaatcatagcaagggcacccccaggatgttcctgccgccgagggtacctgaccaggacctggggccagccgcaccgcaccggcgccagccgggttccaccccgtgcccaggcgcaccggacgggcaccctggccgacaaggcacgcctccaaaaaacaacaaaggggccagacacccggccccagcacccaagacaaggacaacccacgacacacccaccagcggacacaacgacagccgccaccacacccccccacc

SEQ ID NO: 547414 - DNA, 182 bp, Homo sapiens
cttgcggtgggcggcgaagtcccgggcaaaagcccgagcacggtgtccgcccgcaaactgatcctccaccatggtgaggcccatggcgtttaccgacatgtaagtgcactgggtcagcggcgggaaaaccagcgccaagaagcaggcgatgcccgccacttagctcagcacgcacaacggcg

SEQ ID NO: 547415 - DNA, 167 bp, Homo sapiens
accagggtctaccctcgaaggtagacagaacaggtagtcctgcacaccctccagcccgctcacttgctgcttcaggtgggccacggtctgcgtcagccgcacctcgtaggtgctgctgcggcccttgtttattcctcaccaggtatgctcagacggttcatctatat

SEQ ID NO: 547416 - DNA, 504 bp, Homo sapiens
gcagtatacaatcgtacactagaatgtgaccaaggagtgaccctggtccgaatctcattatatcttgaataggatgcaagcgcctgcatccttccccgagaaccaatctatagaaatgtactgttggcattgctgctgtttataaacatctgcgatagcttaggggtgtctagccctgtcaatctggccaaactctgtggctaaaaatcagaaagctcccctaatgggaaacttggtcactctacccccagagcttgcaaggctgtggcctaacgaatgttctagaagttcacagcttcctccctcaatgtcttccacttcgacattttccccagagttcatgacatatgataaatgccaacttataaaacaccttaagacagttcactgtggctgcattccatttttagaaaaatgcaacaaagagctggatgtggtggctcatgcttataatcccagcactttgggaggccaaggtgggaggactgcttgagtccaggagtt

SEQ ID NO: 547417 - DNA, 227 bp, Homo sapiens
gaagcgagctcggtacctgtaagcattcgtgatccgaatgaagaacgagttggggcttccacagccctccgtctcccaagaaagtcctggctcctctcccaagaaatccaggtgctttccagcactccaaagggtatcttaaatgcaatctcgtctctcttagcccttggccactttctcccggatcctgccctgtgctcagttgttgtacgagacacgaatgttca

SEQ ID NO: 547418 - DNA, 119 bp, Homo sapiens
tcttacactgagttttgtctctaggtaagcacaactatgaatttctgaagggtagggaccatatgccccaccccagttctggccttcgtgttctacaattacatacatgccgggctgct

SEQ ID NO: 547419 - DNA, 623 bp, Homo sapiens
  misc_feature (7)..(8): n is a, c, g, or t
  misc_feature (12)..(12): n is a, c, g, or t
  misc_feature (21)..(21): n is a, c, g, or t
ccaattnnactnggtaggagncgactcctgtgaggtatggtgctgggtgcagatgcagtgtggctctggatagcaccttatggacagttgtgtccccaaggaaggatgagaatagctactgaagtcctaaagagcaagcctaactcaagccattggcacacaggcattagacagaaagctggaagttgaaatggtggagtccaacttgcctggaccagcttaatggttctgctcctggtaacgtttttatccatggatgacttgcttgggtatggagagtcggcttgactacactgtgtggagcaagttttaaagaagcaaagggactcagaattcatgattgaagaaatgcaggcagacctgttatcctaaactagggtttttaatgaccacaacaagcaagcatgcagctttactgcttgaaagggtcttgcctcacccaagctagagtgcagtggcctttgaagcttactacaggcctcaaacttctgggctcaaagtgatcctcagtgctcccagatggtcttagtagactgctgatggagtctcatggcacaagaagattaaacaccagtgtctcccaattttaataaatttttgcaatccataaaaaaaatctaaat

SEQ ID NO: 547420 - DNA, 567 bp, Homo sapiens
  misc_feature (12)..(12): n is a, c, g, or t
tacatataaatngagctcggtacctgtaacattcgtgtcccaaggaaggatgagaatagctactgaagtcctaaagagcaagcctaactcaagccattggcacacaggcattagacagaaagctggaagttgaaatggtggagtccaacttgcctggaccagcttaatggttctgctcctggtaacgtttttatccatggatgacttgcttgggtatggagagtcggcttgactacactgtgtggagcaagttttaaagaagcaaagggactcagaattcatgattgaagaaatgcaggcagacctgttatcctaaactagggtttttaatgaccacaacaagcaagcatgcagctttactgcttgaaagggtcttgcctcacccaagctagagtgcagtggcctttgaagcttactacaggcctcaaacttctgggctcaaagtgatcctcagtgctcccagatggtcttagtagactgctgatggagtctcatggcacaagaagattaaacaccagtgtctcccaattttaataaatttttgcaatccataaaaaaaatctaaat

SEQ ID NO: 547421 - DNA, 689 bp, Homo sapiens
ggggtttgcttgtcactcaggctgcggtgtggtggcacacctggctaatttatgtatttgttattttgggtagagatggggtttcgccatgttgcccaagctgttctggaactcccgggctcaagtgatccgcctccctcggcctcccagagtgctgggattacaggcacggaccaccatctctaccaaaaaaaaaaaaaaaaaaaaaaaacaaaaacgaacgaggggtgggccccaacaagaaaacaatcctccccggggggcgccaaattcttatcagccgctgacccaccatgttgtcgtggaagcacaagggggcccccacataagtggaggggagcagctaaataaaccaggcaacagacgggacggccgggttttaaccacaccgactcggttcgacgtgggaaaacagcgggaggcagcggagggacaccctgtagggagggcgacaccacccaaaccatcggaggggggggccaacaatcagtggggccagcacaccactctagcaggaagcatgtaaagagcccgcagggggcgtagataaacaacaactcgacagcgcatcatcgggtgggcaacaccacgcggcggccaaacgcgtgtcccggtgcgacaacaaactgaggcaagcgagacgtatgcacccgtcagacaattatttagcgcggagcggtaacacacga

SEQ ID NO: 547422 - DNA, 304 bp, Homo sapiens
cctgtgagactgagctccctctctctccatttatacgttctctttatgccctttgcttctctttcagagcaattcacgttgacctgggtcaccctcaacttaaggctcataactcccctagatcctcagggtccacactaaatgtgatgaaatatgatggaagccacatacttacttttgcattttgtagtaaccacattttaaaaagtaaaacaaaagaagtgaaggtaattggaataatatcacagatttaaacaaatctatccgaaataccaggtctacaagtataaaatattttaacatt

SEQ ID NO: 547423 - DNA, 226 bp, Homo sapiens
  misc_feature (7)..(8): n is a, c, g, or t
  misc_feature (12)..(12): n is a, c, g, or t
  misc_feature (21)..(21): n is a, c, g, or t
ccaattnnactnggtaggagncgactcctgtgaggtatggtgctgggtgcagatgcagtgtggctctggatagcaccttatggacagttgtgtcttggggaaagtatggtgggaagaatgaaatctaagaggtggtctcagcctgtgatgctttaagagtagtggacagaagggatttctgaaattctattctgaggctttaatgttaacagcattaatatttaac

SEQ ID NO: 547424 - DNA, 156 bp, Homo sapiens
tatggtatttcccataaacagtgcagctaagaaacagtttagcagcaaaatttaaccaggattcagattatatcccattcttgtctctcgggcctgagaggtaataaattccccatatgggtcctagatcctcccccaaatggttttcccccatct

SEQ ID NO: 547425 - DNA, 964 bp, Homo sapiens
gcatataaacaaggtaaagaattaagtgctttgcttttgatgtgcatacacataaacatctcaatgccttgaagagcaatattgctgcccgcgtgtcccacctccagccctaaggcggtttccccctatctcagtagatggaacatacaatcgggttttacacgagacattccattgcccagggacgggcaggatacagatgccttcctcttgtctcaactgcaaagaggcgttccttcctcttttactaatcctcctcagcacagaccctttacgggtgtcgggctgggggactgtcaggtctttcccttcccacgaggccatatttcagactatcacatggggagaaaccttggacaatacctggctttcctaggcagaggtccctgcggtcttccgcagtgtttgtgtccctgggtacttgagattagggagtggtgatgactctcaagggagcatgctgccttcaagcatctgtttaacaaagcacatcctgcaccgccttaatccatttaaccctgagttgacccagcacatgtctcaggaagcacggggtaaggttacagatttaacagcatctcaagggcagaagaatttttcttagtacagaataaaatggagtctcctgtgtctacttctttctacacagacacagtaacaatctgatctttcttttcccccacacattactgatagaacgttgttgatggtagatttcccgggtcgctggggtggtggtcaccccgttatcccaagctttggaggccacgtgggcggttcacttggcccgggttggaatcgctggcactttgtgggacccgctattaacgcggcccacttgctggggggggcggaacactggccaattacagcgggcggggcccctttttttatccgcttagcatggcccccgccggacgtctcgtatgcaccatcctcccggagcggccgcttcgctgcgggg

SEQ ID NO: 547426 - DNA, 241 bp, Homo sapiens
gtctctagcaggatccccgtaggtaagttttgatccaagaggatcaattacgcctactcgacaatacagttgcaaaataaggtttggaaccagtggtagctagtctacacctacaacagcgatcttgcttccctttagacccctgtacatgagctctcctctccccgcttccttcatccccttagcaaccactatatctaccttctgtctgtgtggatttgcttgttcctaacgtctcgag

SEQ ID NO: 547427 - DNA, 283 bp, Homo sapiens
gctcaagttgatccttctcctcgtcacgtagcctctcctccggtttcacacagcctctcctcaggttcaggtagcctctcctccggttcacacagcctctcctccggttcacgtagcctctcctccggttcaggtagcctctcctccgggccagggttaacccccatgaacagcatccagacgggaaacacattatgttcatgggcatcggcaaggtgatgtcccaggggggatgctccaggtggacgggatgacaccggctcacacgggtcaccatttcctt

SEQ ID NO: 547428 - DNA, 1307 bp, Homo sapiens
gcagcgggagggcgcgcggccgatgtgtacgtggtctcggcgccgggaacatggctggagagccataggtcgtggccatgggactcgtgtggcagggccaaggcttataggtagtcatctcagacttctacgagatgcagcttgggcgtacaagtttcgctgtggtacctgcatccacgagtacaacttgacatgactcgcgaccactacaggccactggagaggggtggggtggccgctggcgtgtccgctggttgcacgttgcatgtcgagttctgtgaggtaccatcagctgcagaaggtgctagggatgtctggacatggcccattcgctgtctagatggagtgctctaggaggtatgaggctgtagtcgactcacgctgttccatcgtttgctatgcgttggaaattgcccgagggggggaagacgagaagacgatggggggtgtccttctctcattccttgcagagggactatttagactaggccgtgggagggggtcgcgggggtggatctccctacacaagtccgaacaaaacttctggtggaactttgggtagaaggcaaagggggaccaaggcatgcaattaaactgggggtttacgtaggcgggattgtcgtttgtaaaaccagagtgcgctttgtttctggtgcaacccgtttggcattagagtgaatcttgttgagcctgggggaaccaaggaaacgaagaaggttagattcggcgtgactcactggtgggtgaacacttcccctgcaccgccaatcaccggtttaccccattggtggaacaaatgccgaaattacgcatggaacttttacccgttaggattagccacctgttgatgttcatcacggaggggggactcatgggtttgtggtcccttttaaggaccggtccgccacattcccttagaactcaacgaagggtgacccttgggctcaggttggtggagtgtgacaggttggtgcttggtgggagtgggtctaacagttcttacatcacgggtggggtttcctatttaaaaactttgcgaaggtgtgaggaacaacacttgattttttaaaaggaatatatataacaaactcgagaaatgtaggatgcatgggtcgcggggatcgcaatttcacaggggtgtttgggcgaaaaacagagagggcgaacatttgtgggcagttgatgtaaagtgtcggggttgtttgagcagcaatatttggtgttaacacagggggggatgaactaggagaggaaacaagatgaagtggatttcgtgttagatggagacagacgaggcttgaggtata

SEQ ID NO: 547429 - DNA, 1570 bp, Homo sapiens
  misc_feature (31)..(31): n is a, c, g, or t
  misc_feature (706)..(706): n is a, c, g, or t
  misc_feature (892)..(892): n is a, c, g, or t
  misc_feature (1118)..(1118): n is a, c, g, or t
  misc_feature (1350)..(1350): n is a, c, g, or t
gcgtgtggatattgtcttctgtcgctgaagncccaccgctttgtggatgaagagttgcgttcctttccgccgtcttatggagtggtagcccctcgctctgtgtggggtattcgtgcctccttttaagagggagctcttttctttatagactctgcaccaccggttattgttatgtaaatagttgtggtgggaaaccacaccccgcggtggaatgtttatagcggggtctttttcctccccgtgtgaagcggccaccacgcgtggtgggtttggtgagcacccttttttttttgctcgtgggtgaggtgagtgacaacacccacgctggtggcccacacctctggtggagaaaattttttgtcaccaacaaaacaggtgtttataaaagccttcttgggttaagaccccactctgttccaacacctgtgccccacattatctttataaaaaagacgcggggttatcttttaatgcccccctccacgctttaaattgtgcgtgtttgtcacccaagaggttaacacccggtctctcgaagagggaattttcctcattgttctacccacccgcgttgtcctttggttgtcgtcaaaagacctcggttgttaagggctttgggagagttgtgtttggagaaaaccacacgctggtcctttttgtgggtgagacaactcacaggggcccctctctctgggtccaccacgcncgccgttgttgcttttgagaagacctttctcttgtggtgtttcccacctttccccgcggcgtaacttctcttcaccccccggtggagatttttttctcccaccacgtggtgcgcgacgcccacgcctcgtgagtgggtctcccacaaaggacacacagcttttctgggcgcccacccctctccagnggggaccctcccctcggtcactgtttgcctcggcgacactctttataggccaccggccagaggccccccctcgagacgctgtgtctcccccacacacagggtctttttcgcctctcacacggtgtcctccactctctcccctctttggcgctcgctggttataaagagaatatggcggagataaaagggggagatacacagggagtagagagaggccccctctctngagagggcccacacttggacgccacatatattccacgctctttatatattatctcttatatgtctgtgagagatgttggtctgttctgttttctccaccacgtttccacccccgcttctctctgagaacatttatggaccacgctatggccgcgctatatgaggagtatactccacggccctctaatccactcgtttggtgagtttcttctcttttctctataggtggaggntgtgagaatgttcttctattccccccacccacgagaaggagttattattcttatatgagctctgtgtctctgtgtcacgatgttctgtgatttacccctctttattgaacacacactatgactaacgttcccactcgtgattttttgttacccaattctttctgagaaaaaaacccacaacccaatgtgaaacctttaaatttaaaggcctttataatta

SEQ ID NO: 547430 - DNA, 450 bp, Homo sapiens
ccttacggtgctagacagaaaaataaatcccaataagtgtctctacctatactgcccctccatgatggaagagcccttcttaatcaacaatctaccggataatctgattgaactatgtgatatgtatcaacttttagcagctcgaggaatagcaatcctgcagaaaaatttggtgtttttacttttgtaaggagagtctgggtgggccttagtgaaggaaagttcatgtggcagatccagtgtggccaatgtgtagcctccatccttgccactgtggcttcctttttaaataaatattggataaacattagactgggggcacccgaaagccatatgtggcctataaacttctgtgtttggcccttatacgtttcaaaaattggaacatttcatgtcaccatttggttttatggcttctcttgagaaacaatgaaggaccatctgacaaca

SEQ ID NO: 547431 - DNA, 268 bp, Homo sapiens
attggttttaaacaccttcacgacaagagatcggcgggtcgatgcgccgtgttcaagtgcaagaacgagtcggacgtggcgtgcatttgtccgcctgcgaccatgttctgatagtagcgctgggaatcccgcttgaaccaaagcctggtgaatggccagaccttttccagtgaaatcggcctctatcagccgccctatttgcttgcggttgacatacttcggtacggggtaattcgcttttacttccttccggatacttatccgtgtc

SEQ ID NO: 547432 - DNA, 300 bp, Homo sapiens
atatatttgaatggatatatgatagtacgagaaatagtggaagtagtgataggtatgctgggagatatacccgagtctataatgctataattaccgtttgatattggaccatatgcatagtaccgagaaactagtgcgacagaagtgatcagagtattgcctgcttacgactatccccgacgctccttcaagctgcctactcacttccccttcgcatactcggcacccactactgcactagctaccgcacgcaaaccctagctgccgaagctacctgactcaagcgctactcgcctgctc

SEQ ID NO: 547433 - DNA, 350 bp, Homo sapiens
tcaaggatcgtggtgtatgatttgattctacctcttggttatgtgagtagtgtgtagcagcatgggtgtatgaatgctcttccagaccttgccttcagttcctttggatatgtggccaggagtgagagtgctggatcacgtgaaacagaggaagctccgtattgtctactacaggagttgcactgctgtacggttttaccaggagtgcgcaggtttccagtttcttcacatcctcatcagccttgttgctgtctgttgtatttttctgaatacgtagccataaataactggatatgaccgtgatcttccgtaaggttaaccaaccacagtaacggggggtaaccgaagcc

SEQ ID NO: 547434 - DNA, 572 bp, Homo sapiens
caacgatggtcctcagctactaggaggctggggcacgagagtcgcttgaatctggaaggcggaggttgcagtgagccgagatcgtgccactgcactccagcctgggcgacagagtgagactccatctcaaaaaaaaagtgtatgtgagtggtttccttcatgacagtaacacagttattatctaactgggtcaagtagagaaaaggcataatcctgctcatctttccttgtgccccttggcttgattatgttctttctcattaccttggccttctatcccagaccgaatgttttcagcttaaaactccattcaaacttgacttgaatttagcagctgaactgtgtggggaaagaagtttcactgaggtacaagaaaggaaggcattgtttaatctgtagaaagattaataaagcttttctaggcctgtgctcttcagtcacttagtggagttttggaaaatctatctcggttataaagtggtgcttgtcccaaggggtaagttgaaggagattacatgaaagtgttctctctgctcttagaatatcagcatgtggtcatttggggtcacctt

SEQ ID NO: 547435 - DNA, 490 bp, Homo sapiens
  misc_feature (142)..(142): n is a, c, g, or t
  misc_feature (240)..(240): n is a, c, g, or t
atctgatatcagacaaggtgtgctggagtaatgcaggtgctctgtcgtatgctcgatattggcggatcctatctgtgtcatgtcctcctgccactgctctgtctactacctgctgtcttgtcaggtcccagccctagctgtnctgatgcctgaccagcaggatgcaagctcaggagtgcatccaggataccaggactgcgagagatatgtggtacggggaatactctgcctgcttgcaanaggttttactagggtggggagtttctagaaagtagaggggctgtgggatcagtggtagtggtgcgtggcttttcttgagggcagaagatgctagaggaggttgaaccttataggggatgatctagggaatgggggaacttggggatgctggagtaagagggctgcctgcgtagggccaggagttgggtcggcagagatggtgctgtccatgcggaagtgctagtcccaccacacgccatctcacttacct

SEQ ID NO: 547436 - DNA, 254 bp, Homo sapiens
cgtaagtagttccgtgtggctcagtggttaaggaatctgactaggaaccatgaggttgtgggttcgttccctggccttgctcaagtgggttaaggatctggcgttgccgtgaggctgtggtgtaggttgcagacatggcttggatcccacattgctatggctgtggcataggccagcggctacagctccgattcgacccctagtatgggaacctccatatgccacaggagcagccctagaaaaggcaaaagacc

SEQ ID NO: 547437 - DNA, 259 bp, Homo sapiens
  misc_feature (1)..(1): n is a, c, g, or t
naccccccccccccccccccccatcttggggccttgcctggcagataacccgggttggccccaaaagctattaatacccgccagcatgtggggaaggacttatggtgggccagggggccctcatcctgctttttcccccctctggtttaaaaagaaaaataaactaatttcccataatttgggggggcaggggattggtttttacataagtcctatttaacccttttatatgttccagaaataaaagttaatttatata

SEQ ID NO: 547438 - DNA, 669 bp, Homo sapiens
atacacaagaaatatttattaatgctgtgttgaattgacagggttaacatatcaaaccaagatgaattaccacgtgggcagaaaggacatcattctacattataacccagtggtttctgctaccacattgggcatgcgcgcggggcactatgttagggagcatttcatatgaagcaagctacttctctctttgctgctacgaacctaacccttttcttgttgcctgacgtagccctagtcaccaggagacaacatgacaataatgcgggcccggcccgggacggggttaaatgctaccaggatgacctttgtctcatgtgcacatatattgccaagcatttatttccatagggtaggaggaccttgacacccatgcaattcccatagaaatcttaatggggaaaagagccgtacccatccccagctaaagaacccgttcctttgtctcactgaattttctacaggcgaatgaggaagagttaggaactcctccctgcttgggtggcgaaggggccttttatgagggaaaacaaagcggggggtgagaaaaacccacacttcacttgggccggcccctgtggccaaaaaccttgtgaaccaaagcgaatccaagcgtctttcttaaacaaatttgttgaatcctattccagcccccagcacttggttttg

SEQ ID NO: 547439 - DNA, 130 bp, Homo sapiens
acccgcgctgtaatcgtcgaactcggagccgtcgacgatgcgcgcgatgacctcgcgcacgtcatacggcttgcgcgtgtcggcggggatgatgccgttcagctcggccgggtcgtagcgcggctcgcgc

SEQ ID NO: 547440 - DNA, 1029 bp, Homo sapiens
  misc_feature (40)..(40): n is a, c, g, or t
  misc_feature (69)..(69): n is a, c, g, or t
  misc_feature (71)..(71): n is a, c, g, or t
  misc_feature (89)..(89): n is a, c, g, or t
  misc_feature (96)..(98): n is a, c, g, or t
  misc_feature (112)..(112): n is a, c, g, or t
  misc_feature (145)..(145): n is a, c, g, or t
  misc_feature (200)..(201): n is a, c, g, or t
  misc_feature (258)..(258): n is a, c, g, or t
  misc_feature (273)..(273): n is a, c, g, or t
  misc_feature (278)..(279): n is a, c, g, or t
  misc_feature (289)..(289): n is a, c, g, or t
  misc_feature (292)..(292): n is a, c, g, or t
  misc_feature (297)..(297): n is a, c, g, or t
  misc_feature (299)..(299): n is a, c, g, or t
  misc_feature (305)..(305): n is a, c, g, or t
  misc_feature (321)..(321): n is a, c, g, or t
  misc_feature (337)..(337): n is a, c, g, or t
  misc_feature (345)..(345): n is a, c, g, or t
  misc_feature (347)..(349): n is a, c, g, or t
  misc_feature (362)..(362): n is a, c, g, or t
  misc_feature (369)..(369): n is a, c, g, or t
  misc_feature (377)..(377): n is a, c, g, or t
  misc_feature (386)..(386): n is a, c, g, or t
  misc_feature (395)..(395): n is a, c, g, or t
  misc_feature (399)..(399): n is a, c, g, or t
  misc_feature (451)..(451): n is a, c, g, or t
  misc_feature (460)..(460): n is a, c, g, or t
  misc_feature (464)..(464): n is a, c, g, or t
  misc_feature (489)..(489): n is a, c, g, or t
  misc_feature (555)..(555): n is a, c, g, or t
  misc_feature (564)..(566): n is a, c, g, or t
  misc_feature (586)..(586): n is a, c, g, or t
  misc_feature (706)..(706): n is a, c, g, or t
  misc_feature (845)..(845): n is a, c, g, or t
  misc_feature (862)..(862): n is a, c, g, or t
  misc_feature (1028)..(1028): n is a, c, g, or t
tcttacatgtacagtcatcttaaaaagacaaatattaacnaatataagataaaaacaacacaatttatnangacatgttattttgtgantttcgannngtaaaagggagcgnaacttctaaacggatctataagaagacaattcnactttttaagacacttttacaccagacagacagtgagatattactaatttaagtnnacactaaaacactctttactgacgctcgcgccgaccctatactatctccgctccganccttcatctacccanctttnnataccctccncanaatcntncctagngcatgctgagactgcnaagaagagtgcttgantggggggnannnggcatgtgctagngtgtganctcctgangagctaganatacatttntttnttctttatccctggattcctaacacaatgcctggttcaaactaaaatgcttnaacaacgtntgcngctttgaagtgaactggggcaaatncatctttccacctctggtccagttttcactccatattaagcacatctgaggttcctgggttgtttntggttgttnnnttttgactttaaattgagtnaggtaagccaatatgcatacattttttacatcagctttctcacatcagcctcagaaccaaatcatcactgggctgggaatattctcacgtactccgatacttatttgttggacaacagtnaatatcaatgtgcaaaagtcatgcattttcaatgcaggataaatatgctcttatgaatatgaatggaataaaggccctgtttctccatgttttaaataacagatacatagcatcttaaattatgacttaattagcagtntttagacactgaacatnatacactgtattacaatgcaatgtggtaggcttccattttaggaaccaaaataaatttcacatgaaaaaatatttattttaattcacatcaaatacatttagaataaatctaaatttttagcatcataatacttacaaacaaacacagataaactttgggtgtatna

SEQ ID NO: 547441 - DNA, 871 bp, Homo sapiens
cttcggagttcgcccccttcgggactcgcctccgggagaccccgagggggagagggcgcttcctccgcgtccatcgcccttgccgccctgggagagctcttgtcagagctattagctctgctttctaagcagaagtttctgcagacagagacggtacctctactgctgagtccaaagtcaccgcggcatacccagctcggcagactccccttagtacgaaactgcttccatcagtaaaatattcaatgtccaggtccccgaggggccaatctgttaaatctttccagcttgagaacactttatctaccacgtccacacagcaatgaaggggacttcctgtgtagggtccagccctacgggggcttagcgggtgttctccccgtgtgcagagacaagagatcgtaagaaataaagacacaagacaaacagataaagagaaaacagctgggcccagggaccactaccaccaagacatggagaccgctagtggctccgaacggctggctgcgctgatatttattgaatacaagacaagggggcaggctacggacggtgagtcgtccaagtaattgataaggtgaagcaagtcacgtgatcataggacagggggcctttccctcttagggtagccgagcacgagagagaaggcagcatacgtcagcgtttcttctatgcacttataagaacaatcaaagactttaagactttcactatttcttctaaccgggtatctactaacgaactttcaaagaggaaccaggagtacgggaagagccttgaaagtggaccacgcagtgtgatcattcaagcccacaggagggggttaaggccccggatgactgccgccaggcctgggagatatccgctccaa

SEQ ID NO: 547442 - DNA, 225 bp, Homo sapiens
ctgttttagtctggattggtcagcgtcatttacaagacttaggcccagccttagacagccttacagcaccaaaaccaaccaaatccaatgctgctttatctcagcagtaccaaaccattggggtgggcgcacaaattttacgtgatttaggcgtagaaaagatgaagcttttgagctcacctttacgctttaatgcactttctgggtttaatttagaagtggtgg

SEQ ID NO: 547443 - DNA, 279 bp, Homo sapiens
cagcgctcccctgtgagccccctcgcttcccgacgttccgtgtcccccctgcccgccttctcccgcacaccgcgccgacgccaattccgcaggccgatgccacgcgaggaacaaggaatcgtatcgtatgtccgatatcccagaacctccacatctattcgacccgcttagctgatgcaagtaagcggtgatgagcctgattccagatggcacgtgacggattatatccatataagaattcacacagagaaacgggaggaagacccttactactgtcca

SEQ ID NO: 547444 - DNA, 468 bp, Homo sapiens
  misc_feature (189)..(190): n is a, c, g, or t
gaccacccatacgtagaatgtatgcacacatgactgtaagtcgctttggataaaagcgtctgctacatggcatatattattattatatattataccgctcaggaagcagacgcgttctgtctcctagagatgaacgtactttggtgcgaaagtgcaaatcaatcccagaacaacaacaaaggaccttgnnaagatgctggaggaaacaggtacaaatgtatctatatccacagtaaaactaatcctatattgacatatcctgaaaggccgctcaacaaggtagaatccactgctccaaaaccgacataataaagccagacaacggtttgtgactagacatggggacaaagattgtactttttggagaaatgttctctggtctgataactgtttggccataatgaccattgttatgtttggaggtaaaagggggggtactttgctgtcgacgcggccgcgaatttagta

SEQ ID NO: 547445 - DNA, 221 bp, Homo sapiens
tccaaaaaaaaatttttggttttgggccccggactgttttacccctaaaatttggcaattttttttccccgcaaataaagggctgggccttatttattgaactttatcattgaaaaccggttggaaaacctaaaaaaaggtggcccccctttgttttttttacctgggccctaaaaaaaagggcccaaccccttttttaaaaaaaaaaggtttagggggga

SEQ ID NO: 547446 - DNA, 336 bp, Homo sapiens
tgtttacggaccagagtaagtatagcaaaagaaagtaatcatagctaaacacacactcacaaattcctatcctttgaatgtcttacagcacccaacttcacctctcaaccagatcacagacaaatgatgtctcacagaagtctccctgatcccccatattactctctggtccccaatcatctctctgatccccaataatctctctgatacacccatattatactccgatcctcaattatctccttgggtcacctaataattttctctggtccccaatcctcacactaatccccaataatatctctgatcccaatattataccctaatcctcagtca

SEQ ID NO: 547447 - DNA, 933 bp, Homo sapiens
gctctctctctctctctctctcttcgggtctcctctctctctctctcctgagtgtgagcctcaggagaaaaactcagtctaaccccctttgttcttctcttgagagcttggcctgcaaggctgatctgcaacacagtgggtgttgggccccgtaacaggctccatggttctgtacccgtaggggcacatgtcttcctctgctaactgctgtgtgctgctgccatacagaaatcgacgccgtggttgataagaagatgaagatgctgagggacgaactcgatgtcgcgaagagaaagactgcgctccacgatgtgacggagaggaagactggacagacacacggcgctgatgcagcgacaagaggaggccttacaccgaatttaagaactactaacaacgatatcaccctcaaaatggctggccctcatcatctctctcaacgccgcatcgtggcacgacactgccgaaaaaggacgcccactggagagggagaatggcagaggtgtcggcccagaaccgagcgtctggggaaaacctctacaaagaagggctcgggccagatcatgagcgaccacgcaacacagcagcgccgcaacgctaacgagagggacaagcaggatcgtgcttgggcaccaaaacgcgcgtgagacacgtcagcggagaaaaaggagcttgaagagcacctggcggggcgaaccaatgacgttgtagacgcaggcgactaccaccgggggcggccacaaaggacgcgggcacgcgtctctctcgacaacgtaccggggcagccacccacggggtggctggcacagaacagacagggtccacaacaccgcggctagcacgcaggtgggccgctctgagcgccgctgtacaacaaaaggggggcgcaacggagccgcggtacctacgcggccctgtcccctgggggtgccc

SEQ ID NO: 547448 - DNA, 486 bp, Homo sapiens
atccggggaatggggcgggggatagacacttttgagctgctgcccatgtttgggtcccccgagtttttccgctccaaggtggatgaagctgtagccgttttcccgggtcctcatgccaagaaaaaagctgccccgaaggggggggctgttgttgttgttccctttttgacaagggaaaaccggttccaaagcccaataaccccttttgggattcaactcaggggttgaaggcttcctgggttgtcctttgggcccccccccccggggtttccaattgccaattttatggggccttttgggtccaaggggccattttgggggccctaggatttttccattatacggatatggtttttggggtttggtgggggcccgccgggggtaacttttttttttttggggggtttggttttttccccccgaaattgggtttttttggggggccccggtttttggttttcccataaagaaaaaaattttccctta

SEQ ID NO: 547449 - DNA, 792 bp, Homo sapiens
  misc_feature (25)..(25): n is a, c, g, or t
  misc_feature (87)..(87): n is a, c, g, or t
gcgcttatgttggcagaatatatcnggtgaagtggaatcgctgggtaaaaagggttaaatctgttaattggctttccacttaaatanaaaaaatgaagcgaagacaagaggatatttgcaaaacagccatgttcgggaatcccagttactgcttttatgtacatacctagtttaatttcagctttttattatttttccatttgcaacaaatctttctagatgagtaattctcaaactttttgatgctaggaccccttacattgtcttttgtatatgtggctatctgtattgatagtatattaaaaattaaaactaagtaaagaaaaatttttttgagacatggtcgtcactacgttacccaagctagtcttaaactctggcttcaagcgatccttctgcctcagcctcaagactgagaaattttaaaatagttatttattcatttaaaaagcaaaaataaggcgattacacgttaacattaaaaaaaaaaatgttttgaacgggcgcagtgactcacacctataatcccagcatgttgggaggccgagctgggcagatcacaaggtcaagagatcccgaccatcctggccaacatggtgaaacctcgtctctactgaaaatacaaaaaattagctgggtgtggtggtgcacgcctgtagtcccagctactctggaggctgaggcaggagggtcgcttgaacctgggaagcagaggttgcagtgagccaagattacgccactgcactccagcctggtgacagagcgagactccatctcaaaaaaaaaaaagtc

SEQ ID NO: 547450 - DNA, 399 bp, Homo sapiens
  misc_feature (8)..(8): n is a, c, g, or t
  misc_feature (215)..(215): n is a, c, g, or t
  misc_feature (259)..(259): n is a, c, g, or t
  misc_feature (276)..(276): n is a, c, g, or t
  misc_feature (361)..(361): n is a, c, g, or t
  misc_feature (389)..(389): n is a, c, g, or t
tgaacatnaaaaaaattgttcctcaatgacttttgagtaaacaatgaaattaaggcaaaaataaaaaaaattgaaataaatgcaaacagaaacacaacagattaatatcccaaggatgcagcaaaagcaatgttaagagaaaagtttatagcactccaggtcaacctcaaaaagctaggaaggtctcaaattaatgacctaacatcacatcttgnggaactagaaaaacaagagcaaactaaacccaaagctaacagangaaaagaaataactaanatcaccccgggggctgaacaaaaatgaaaccccaaaatttatggcaaaaaccccccaaaaccacatgttggttatttggaaaggnataaaggaaaatcagttggatcacttgncttggattta

SEQ ID NO: 547451 - DNA, 85 bp, Homo sapiens
ggatttgctggtgcagtacaactaggcttaatagggacatgttaacccctccactctttctttcaataaaacgcagttgcaaaca

SEQ ID NO: 547452 - DNA, 774 bp, Homo sapiens
ccactcctcatcctccctgagtgctgatattctctctctctctttctcttcctcttctttctctctcttctcctctctttctctcctcgtctctcttcctctcctctcttcctctcttctctcttcctctcctctctctcttcctcttctctctcttcccctccgtctctcctcccctcctctctctcttcctctcctctctcttcctctcctctctctacccctccgtctctcctcccctcctctctcttcctctcctctctctcttcctctcctctctcttcccttcgcgttctcttcccctcctctctctcttcctgtcctctatctcttcccctcctctatctcttcctctcctctctctcttcctctcctctctctctcttgctttcttctctctctcctgtctcggctgttgtgggttgcaggtgggtgctgctgttgtggtccttcccagaaactgcagtagagggcagctgggatcctaatgttactctggttgttacaccaaagaaaatatcggggtcactggcgagcccacccacactcacagaaatctccagtgtaagtccccctaaaaaacagcccttcattcctctcccattcagccatttgtattttgatgccatggcctcaagatcagagtgtggaaactcatcacgcctgggatatcctggtcgagccggacacggggtcttcgaggggtctgaaacccttttctcttggagattgtgttttaatattaactttaatctcacctgttctggtccacag

SEQ ID NO: 547453 - DNA, 178 bp, Homo sapiens
gatcttaggaaattataggtgtattatctgggggacaaaaaaaactttggctacgttttttaggaaacaggctcaaagctttataaatcaatatttagaaattagtttaacgatttactattatacctgctagtgatatttatgtgatatttataaatgaaaataaatgcaaaactat

SEQ ID NO: 547454 - DNA, 301 bp, Homo sapiens
atctttctacctaaccccaaattaactcccttccactattttattaaagctgctttcttcttgattcatttcagaaaatttatcattgtttgaaaattacaaagctgcactgagatttcaaacaatggcatgtatcacgcttgctctagcagatcactgatctttgtgggaccgcttgtaaactgcacatgctgaggaggcaacatcaattatgaggggactcttgaaccgttggtactagtgattatcttttccccatgtcttcctgtctctttacttacactgttattggagctacacc

SEQ ID NO: 547455 - DNA, 82 bp, Homo sapiens
gaatttaataatctgaataatttttaaaatttaaataaacagaaatgaagttaatttaaaataaatacctcagaagtgaaaa

SEQ ID NO: 547456 - DNA, 116 bp, Homo sapiens
gtctccctggataacttcgtgatctcgatgatggtgtcccaggccggcaccaccaccctgccgatcttcatcttcggcctgttgcgcatgggcgtgacacccgacgtcaacgccgt

SEQ ID NO: 547457 - DNA, 138 bp, Homo sapiens
ctaagatcaccttcttgagctctgtctgtacatgtgaccatgcacgaatggcgcccccacatgccccgcaggatgttggaccacgcacgccttgaagaaagtgcttcgccccctacatctcgtgaagatcttcctcca

SEQ ID NO: 547458 - DNA, 248 bp, Homo sapiens
gcaatcgatgagtatatcggcaaaacaaaaagataagatttttgacaattattgtaaaaataaaactcaatgcctggattttgcaggtagagagattattaaagatcacaagaaaaattcacaagtacaagaagaaaactctgatcaatttccaggtttttgagatattgatcatattattccacaagatatatttgataaaatagatcactccaaaatatctgttattaaaaagtatctcaattcac

SEQ ID NO: 547459 - DNA, 669 bp, Homo sapiens
  misc_feature (1)..(1): n is a, c, g, or t
  misc_feature (61)..(61): n is a, c, g, or t
  misc_feature (64)..(64): n is a, c, g, or t
  misc_feature (138)..(142): n is a, c, g, or t
  misc_feature (174)..(174): n is a, c, g, or t
  misc_feature (194)..(194): n is a, c, g, or t
  misc_feature (221)..(221): n is a, c, g, or t
  misc_feature (224)..(224): n is a, c, g, or t
  misc_feature (229)..(229): n is a, c, g, or t
  misc_feature (237)..(237): n is a, c, g, or t
  misc_feature (245)..(246): n is a, c, g, or t
  misc_feature (248)..(248): n is a, c, g, or t
  misc_feature (259)..(259): n is a, c, g, or t
  misc_feature (263)..(263): n is a, c, g, or t
  misc_feature (296)..(296): n is a, c, g, or t
  misc_feature (325)..(325): n is a, c, g, or t
  misc_feature (532)..(532): n is a, c, g, or t
naaaaaacaacatatcaaaagcaaaatgaaacaaataatccaagttgatgatcataaagtngantgatctaaagagagaaaatctgaatttaatcaagcttctagatctaactaccatactcacaggtaataagaggnnnnngggacatgtgaaacaatactacataattcagnctacaggaaattctagaagncgatctatttagtacaacaaattacanggngtttnataaagangaggtaanngngggcctatgangggnactgtaagtgatgcgaacattacagtacatganttggatcagattcaaataatctgtgaaanaattaggggccaatctagaaaatctgggcaccgggtatatggggataaaagaattactggtaatttgtttagctgtgataataatttttttaaaaagagaatatttacatttcagaaatatgtgtgtctgtatgcacacacacacacacacacacacacacacacacacacacacgcagtcagcctcctatgtccatgggttcaacngaccttggaatgaaaatattccacacacaaaaaaaattgcgtctgttctgaacatgtacatttttcttgttgttattccttaatacagtataacagttatttacatggcatttacattgtattacgtattataagtg

SEQ ID NO: 547460 - DNA, 190 bp, Homo sapiens
  misc_feature (48)..(48): n is a, c, g, or t
  misc_feature (94)..(94): n is a, c, g, or t
  misc_feature (138)..(138): n is a, c, g, or t
ctcacacgtgtgctccctgccctgctcctggccccttggcggccgggntgtttctggccatgggtcgctcccgccggacaggccgcaccgagcnacatctctagcccggcagatgaaggcgacggcggcggccggacnttggatgagattcaccgcgagctgcgcctcagggatccgcacgaccccagcc

SEQ ID NO: 547461 - DNA, 220 bp, Homo sapiens
gcggccgcctactactactactactgctcgaattcaagcttctaacgatgtacggggacatggtggcacgcgcctgtatcccagctactcaggtaactgaggcccaagaattgcctgaaccagagaattgcttgaagccaggaggcggaggttgcagtgagctgagatcacgccactacactccagcctgggggacagcgtgaaactgtgtcccaaaaaa

SEQ ID NO: 547462 - DNA, 126 bp, Homo sapiens
gatctaacagagtgtgcaggcttactggaggactgaagcgacttttgtgccgggacttaaaaagataggaggccaggtgtggtggctcatgcctgcaatcccagcactgtagaaggcagaggccgg

SEQ ID NO: 547463 - DNA, 466 bp, Homo sapiens
agcgggttgttgagaacggcggagcgagggacccctatgtggtggagggactgctccggggaaagccgagtgggcgctacgagctctggtccacgtgacctgccgggggcgggagcagggcggcgcgccggcctcctgcgaatgtcctatgtcttggggaggggcagtgatccaaactcgttcttgtcgcacccgatggggtggactcgggtccggtttgccgaagctgtcaacaccgtgattatcccccggggaacgcgcggactggaagcgagtgaggatgtctattcttcatacatttgaaccttcggtagttgccgacgagacagacgattttgaatgcacgccatggcacgagcatggaacccccctggctcttttgcactgattgcagtttcatgtacacacagtggacaagactctttgggtggcataagaatgcttgcgcctttgaaaacattgggaa

SEQ ID NO: 547464 - DNA, 402 bp, Homo sapiens
  misc_feature (16)..(16): n is a, c, g, or t
gcgtggtcgcggccgnggtacaggggaatggaatggaatggaatgcaatggaatggaatcatccgtaatggaatggaaaggaatggaatggaatagaatggaatggaatggaatggaatggaatggaatggaatggaatcaactcggttccaatcgaatggaatggaaaggaaataccccgaatagaatggaatggaatggaatggaacggaacggaacggaacggaacggaatggaatggaatggaatggaatggaatgcaatggaatggaatggaatggaatggaatgaaatgcaatggattcaactcgattgaaatggaatggaatagaatggaatggaatggaatggaatggaattaacccgaatagaatggaatgtaatggaatggaacggaatgga

SEQ ID NO: 547465 - DNA, 353 bp, Homo sapiens
gaacgggtgagtcattattgggataaattacccaagtgttaacctggtggctgtgtgatgatgacgcatggtctaatgactgcatgtgggtcgcagtaactcacagtgagctcactgggctcgtctcggggcacccataggcagagatgacgacaacaggaaggaacagtgacaaagcaggtggccacccgagaacactatagagaaaatctcacctggtccccagaccatggttctgctcacaacctcagaacttccctcgcctgactgtcctgagcacttccaggaaggcagcccctggctgtccctgaggtggccgcatctgtccttccccaccaaccgcatcacccgtt

SEQ ID NO: 547466 - DNA, 413 bp, Homo sapiens
tcgtatgatttggggtggagagttctgtagatgtctattaggtctgcttggtccagatgctgagttcaagtcctgaatatccttgttacttttctgtctcattgatctgtcaaatattgacagtggggtgttaaagtctcccactattattgtgtgggagtctaagtctctttgtaggtctccaaggacttgctttatgaatctgggtgctcctgtattgggtgcatacatacttaggatagttagctcttcttgttgcattgatccctttaccattatgtaatgcccttcttgtcttttttgatcttcgttggtttaaagtctgttttatcagagactaggattgcaacccctgcttttttttttttgggtttccaatgggctgggataatttttcctcaatccctttaatt

SEQ ID NO: 547467 - DNA, 134 bp, Homo sapiens
cgtcggaccctggatctggttttctcacagtgaactccatgttatattcttggccctagatgtgtattagaatcacttgttgccgggcgtagtggctcatgcctgtaatcccaacacttgggaggctgagatgg

SEQ ID NO: 547468 - DNA, 572 bp, Homo sapiens
gtgattacactggtgctcagggatagcctggccctgtagatgtacaagggaccctcacttgccctgctggagaggaaggaaagcgaggagctcgaggtgaacccggacccactggcctgccgcggaccacctggcgatcgttgtggacctggtagccgtggtttccctggcgcagattgtgttgctggtcccaagggtcccgctggtgaacgtggttctcctggccctgctggccccaaaggatctcctggtgaagctggtcgtcccggtgaagctggtctgcctggtgccaagggtctgactggaagccctggcagccctggtcctgatggcaaaactggcccccctggtcccgccggtcaagatggtcgccccggacccccaggcccacctggtgcccgtggtcaggctggtgtgatgggattccctggacctaaaggtgctgctggagagcccggcgaggctggagagcgaggtgttcccggaccccctggcgctgtcggtcctgctggcaaagatggagaggctggagctcagggaccccctggccctgctggtcccgctggcgagag

SEQ ID NO: 547469 - DNA, 401 bp, Homo sapiens
  misc_feature (2)..(2): n is a, c, g, or t
  misc_feature (21)..(21): n is a, c, g, or t
  misc_feature (167)..(167): n is a, c, g, or t
  misc_feature (309)..(309): n is a, c, g, or t
  misc_feature (321)..(321): n is a, c, g, or t
  misc_feature (324)..(324): n is a, c, g, or t
  misc_feature (343)..(343): n is a, c, g, or t
  misc_feature (379)..(379): n is a, c, g, or t
anccaggccaaggtgggcggntgcttgagcccaggagttcaagaccagcctgggcaatatagtgagacctcgtctactaaaaataaaaattaaaacaaccagccaggcatggtggtgtgttcttataggctgaggtggaaggatcactggagccctggagattaagngtgcagtgagccatgcttatgctactgcaccacagcctggggaacagagcaagatcctgtctcaaaaaaaaaaaaaaaaatagaagtagagagcaaattatttttttttgttaccattattttgtaacattatttttgcgcntaaaggaaaaanccnaaagtctggatcccttggnaccattataataaggtttcagacaccacatattctnccaacatttttcatgcttgaac

SEQ ID NO: 547470 - DNA, 124 bp, Homo sapiens
aactgggtagcaccataactttcatgttgtgagctctgggagcccagagggcagccgtagtgtgcctgactccgtggagagaggtaaagaaacagaccctgcttcttgccgcagaccccaccag

SEQ ID NO: 547471 - DNA, 377 bp, Homo sapiens
  misc_feature (32)..(32): n is a, c, g, or t
  misc_feature (84)..(85): n is a, c, g, or t
  misc_feature (164)..(164): n is a, c, g, or t
  misc_feature (311)..(311): n is a, c, g, or t
  misc_feature (367)..(367): n is a, c, g, or t
aaaattctcccagtcatgatctgaaaaaaaanaaaaaaagaaaaatgaaaaacactaccctaaggatgttattgcattcttttnntttttgggataagagtttcactcttgttgccccaggctggagtgcaatggcgtgatcttggctcgctgaaacctctgcntcccgggttcaagccattctcctgcttcagcctcctgagtagctgggattaccagtcccgccaccaccctcggctaatttttgtatttttggtagagacggggtttcgccatgttggccaggctggtctgaaactcctgacctcagntgatccgcccacctcggcctcccaaagtgctgggatttacaggcgtgagccacccnccctggccat

SEQ ID NO: 547472 - DNA, 209 bp, Homo sapiens
gatctgagcgctttataagtagcagtttcccctgctctcacgcttctcccctgcagccatgtaaggcgtgcttgcttcccctttaccttccaccacgattgtaaatttcctgaggcctcctagccgttctttctgttaagctcgcggaactgtgagtcaattaaacctctttcctttataaattacccagtcttgggtagtatctttac

SEQ ID NO: 547473 - DNA, 146 bp, Homo sapiens
gcccttttagctgtctctgaaacacttactgaccaagcgctgacttgtgcaggctatgtgcccctggaacccaagaaggaaaacagaatcttccctaccttctaggagcacacattcagtgaaagtgatggataaaacctaatcac

SEQ ID NO: 547474 - DNA, 457 bp, Homo sapiens
ttcaggctgcattgattttatatccagaaactctgcataaattatctatcagttctaggagcttctggcagagtccttagggttatctaggtatagaatcatatcatcagcaaagagatacagtttgacttcttattccatttggatgcctttcatttctttctcttgcctagattgctgtggctaggactttcagtactattttaaataggagtggtgagagtaggcatccttgtatagttccagttctcaagggaaatggtcccagcttttgtccattcagtataatgttagctgtgaatctgtcatacatggctttgattatgttgaggtatgtaccattttatagccagtttttaggaatttttgccatgaaaggatgttggattttatcaaatcctttttcagcatccattgaaatgatcatatggttatcgtccttcattctgttgatata

SEQ ID NO: 547475 - DNA, 702 bp, Homo sapiens
  misc_feature (2)..(2): n is a, c, g, or t
  misc_feature (143)..(143): n is a, c, g, or t
  misc_feature (186)..(186): n is a, c, g, or t
  misc_feature (191)..(191): n is a, c, g, or t
  misc_feature (194)..(195): n is a, c, g, or t
  misc_feature (211)..(211): n is a, c, g, or t
  misc_feature (214)..(215): n is a, c, g, or t
  misc_feature (225)..(226): n is a, c, g, or t
  misc_feature (260)..(260): n is a, c, g, or t
  misc_feature (268)..(268): n is a, c, g, or t
  misc_feature (278)..(278): n is a, c, g, or t
  misc_feature (299)..(300): n is a, c, g, or t
  misc_feature (313)..(313): n is a, c, g, or t
  misc_feature (320)..(320): n is a, c, g, or t
  misc_feature (353)..(353): n is a, c, g, or t
  misc_feature (356)..(356): n is a, c, g, or t
  misc_feature (358)..(358): n is a, c, g, or t
  misc_feature (360)..(360): n is a, c, g, or t
  misc_feature (362)..(362): n is a, c, g, or t
  misc_feature (373)..(373): n is a, c, g, or t
  misc_feature (384)..(384): n is a, c, g, or t
  misc_feature (394)..(394): n is a, c, g, or t
  misc_feature (543)..(543): n is a, c, g, or t
  misc_feature (554)..(554): n is a, c, g, or t
  misc_feature (596)..(596): n is a, c, g, or t
  misc_feature (702)..(702): n is a, c, g, or t
cnatacaaccttaattaaacaataattagagtaaaaatgatataatgaaataataaagtacttcaagaatacttttaatattatgaaaacgataaaatattcttattcggaagtctacattatacccacctgtttactaagtnctttctgctacacagagccaaaaaaagcccctccacacaaganacacncgnnccacaaaacttattanaannaaaaaaacgnnctatgacatcttcattacgcaacacaaactgtcnatcacatnaagttctgangcagaatgtgctcgtgagtcnntccacgctctgtngcttganacagtcggaaaacaaatggagttaaaccccgtntgngncncnctgcatttccnaaaatctggtntcctattccnggtatatggctgttcactctgttcattatcattccactgatttcaagtacagacatgtctgctttcttacaatcattaccttcccatactatagcacttattttttctaatcctgggtgggaactatggagccagggcaaatgactctnatgaaaagggncatctctatattcttttttcacacatggattaatctgatgantttccacatctgtctcactggtacaagatgaatggcattctgcacaatgtaacaagtcttcccataacacatcttctgtgtcagattctggccttgcactctcagn

SEQ ID NO: 547476 - DNA, 173 bp, Homo sapiens
tgatattctaacatctgatatcctgttatctagatgtagctcagaggacactctatgatctcattcagattccttagcaaccctgtggaagttaatacattaaaacacaccatcgatgtgactattgtaaggtcactgaggtgggactctcttgtgagaagtccagtcgacgc

SEQ ID NO: 547477 - DNA, 392 bp, Homo sapiens
  misc_feature (1)..(1): n is a, c, g, or t
  misc_feature (18)..(18): n is a, c, g, or t
  misc_feature (262)..(262): n is a, c, g, or t
  misc_feature (284)..(284): n is a, c, g, or t
  misc_feature (306)..(306): n is a, c, g, or t
  misc_feature (346)..(346): n is a, c, g, or t
  misc_feature (357)..(357): n is a, c, g, or t
  misc_feature (381)..(381): n is a, c, g, or t
ntttaaatcaaaagctanaaatgattaaccttagtgaggagggcatgttgaaagccaaaataagccaaaagctaggcctttgcatcagttagccaagttgtgaattcgaaggaaaagttcttgaaggaaattaaaagtgctactccagagagtacatgaatgataagaaagtaaaacagctctgttgctaatacggaggaatgtttgaggagaggtctaggaaccagccacaacattctctttcagctagggcttcaatccnggaacaagggaccttaactttnctttcaatttctctggaagggnttgggaggaggttcagggaagtttgccaggaagggaaaantcttggaagcntagttagttgggtttgggtttccntggagggtttt

SEQ ID NO: 547478 - DNA, 255 bp, Homo sapiens
  misc_feature (83)..(83): n is a, c, g, or t
  misc_feature (86)..(86): n is a, c, g, or t
  misc_feature (109)..(109): n is a, c, g, or t
  misc_feature (121)..(121): n is a, c, g, or t
  misc_feature (167)..(167): n is a, c, g, or t
  misc_feature (217)..(217): n is a, c, g, or t
tatgacttcgcctaagaggcggaggctgcagtcagctgagattgcgccatcgaattccagcctggggaactagagtgagactncgnctcaaaaaaaaatttttttaaanaagatgaaactntctcagattgaggctgaaatgggccctataacatatcctgggcaangacaactcagcagactacaccaagaaaatgagtacctcttccatgtattnctactgtgtgtgaacgagagatgaatttaacaccacca

SEQ ID NO: 547479 - DNA, 462 bp, Homo sapiens
gagcgtatcgaaagaccagccggtgaagccaggtacgactgatcacgcggtgaggccgacatgcaaaagaccagccggtgaagccaggtacgacggatcaagcggtgaagccggatgcaaaaggtccgaggttgctaatagatcacggcggattgacgccgaaaccgggtagaaacgatcatccagtgaagccgtcagtgccgatgccttcagtgaatgtcactaatgatgctgaagcaacatgtgcatgtgaacatcaatgtcgctcactgtcactgccctgatacaaaggacgggccaaacccggacttaaatcccaggcaaggtccgaagccggaatcgaacccccgtgccacagccggatccaaagccggaatcggaacccggcgccacagctgggatcgaagccggggatcgaaccccgtgcctcagccgggtccaaaggcctgaatcgaaccccgt

SEQ ID NO: 547480 - DNA, 145 bp, Homo sapiens
gtacctatcatacccaattggtacttcaaatctctccctcctcccaccctccatcctcaagtaagccctggtgtctatcgtggaacctacttttctatttctctttttttttttaatattactttttgactcttcacctgggagg

SEQ ID NO: 547481 - DNA, 426 bp, Homo sapiens
tgcccatgggtacagctcaggattgcaggggtggtacaggctgcagatttgttgccatggtgctcaacaggtgaaagagaaagtgactgcttccttgggaaacatcatgtaatacacctgtatcttttcccctctccctccttccacccctcccgttggttgtttgtggtggatacagacatattcttgtcaggtatgagaattcttcttgctttacttggtgcagatatcttcaaactggatttctgtcaagctcctccattccacatctcctgaacattatgaaaccagcttcaacatcaacttgtgctcagataatagcgttttgataagcttctgatagtgtgttattcatatatttcccttcatatataaatactaagcattttctaagtatcttcttcagcaaaagatcttctccagcat

SEQ ID NO: 547482 - DNA, 783 bp, Homo sapiens
agatactcgcaaagcccaccaccattcttcacacaacccgataccgactacaatcacgtaccccacactgcaacctatcccacacacctaccatacttacttcctactctcttcataactacaaccagcacttacttcctcacacacttattataaacttttaccggatgccacaaaaacctccccaatcccaccaataaaattcgccactcaataatttaaaaaaccatttccctacacttttaataccatttcttattcccctcccctaacatatactaaactccctatttatatccatctatcaattccccacattaccaccctcttcatctcatctcttctacctccacctccaccaacccttacctttttctccacatccatcacacttcaccgctttttaattcctctcaactactactttatccatacttcccctatattatttttctctctcattccacaattctgagcccttatcccattaacaatccatactcacccctatccaatccctttacacctctccacctttcaaatacacatctaacttaccttccctttccccactaatattcataacacccccccactccaactccttcgttctttactcttttccattttattaatatacatctcacctatacctactcctttcttatctctccttctctctcctatctctctaactaccttatcccaacccactccttaactctcttataccttttttaattaccactcccttctctctcttcttatatacagaaaactcac

SEQ ID NO: 547483 - DNA, 341 bp, Homo sapiens
  misc_feature (168)..(168): n is a, c, g, or t
tctgtaacactaatgtagctcagtgtatgtggatactaatataaacaagagtagggaagtctttggcactgcatgatgcgtgcggctattaaatccgagagatgagaagctacatgcacttttttttaatctacagatacctgccaaagcagacatgtctatcagatnttgaatgacatagctgtaagttggcggttgtcagctttccacataaaatttcatcagcaagtgaaacttgattacagcccacactagacaaggcaattcaggtgcccgtaccctgaagtccacgtgagactacaggagaacgtgcattatggtgcttgccagccagtctcttg

SEQ ID NO: 547484 - DNA, 399 bp, Homo sapiens
tcaccattaggcaaataccaataacggcggatcgtcgacggaaactaaagttagggggttctggagaggatattctcatggggtccccgcaagatactcattacaccaaagaaaacagtaactctacagggaagagaccgggtagacaccacctacatccggattggatgcagaggaggccagatctcttccgggttctggccagaaggcataatggcagtttaatcacgagaaaatatcaggcaaaccaaaatggagggggagtctacaaaaggccggcccacacttcccaagggctcgggtcctgaaagacggcagcagagactgggaaggcagggagacaacgaaatacaacgggggcgcttggggagggcccgggacaggaaaaaccgacactcg

SEQ ID NO: 547485 - DNA, 880 bp, Homo sapiens
  misc_feature (398)..(398): n is a, c, g, or t
ttgtccgcatgcgcgattgagccgggtgcatggtactgctgcatccgggtgtctggaggctgtgccgttgtccttggctaaaatcgggggagtgaggcgggccggtgcgcaggaaaaccgggctcgggaacccatttgcaacgaggggtttggaattggaccttgaaaaaaaatttgtcgtggattcctaagaggggttggaggattcgctcaagaaattggatttggactgtgcgggggaaaaagcgcgcaaatattaattggggtccaaatggggctggggggggctgtaactaattttcaacgggggcgtgggtgggaataactcataagatttcgcggtgtggtatttttatccccaccattgaatgtatttccaacccattcataccatggcntgttgctgtaataggcaaaccaataggcttcccataattgataaggggcagtaatcgatggacacaatcgtccggagtgaattagttacccggtgcaaggtttgtcctgtctcacacagggtcgccagattgggttgccgggggtacaattgtggcaccctgggggaatcttctgagttgcgcatcatagtggtgggacttccttagggcgggacgcttatgtggctacacgacagaagatattaggtatacgctggaagtggctggtatttcccagaaatggcttacatctttgaggagcgcgagggcacacaagggtttgggcccgacttggaagactttatgggcgtaacactttttgttccccaaggacaagcagcgcctgaattggttgctggtttaacctggcacctcccactttttgatggcattcaaacttatttctggtgtgtacccgaacgttggaatccaaacccgggacg

SEQ ID NO: 547486 - DNA, 571 bp, Homo sapiens
aaatccaatccaaggtttcccaaatcagcccgcacatccaaactgtccgctgcgttctaggaaaccttattggggtccggtactactcgtttcgctgttctatttctagatagagggagtgggggctacccgttatggcttgtttcgaattgggttgggccggaagatctagttacgaaggaaaggggacgtatggagggtggatttttttgggatattgttttatgtgggtaaagggggggagttcggttggattgttggcgtttaaagcctaagtggttgtgtcgagatgtatcgatccggtgggttgtttggctggttggggggtgattacgggacgtttagactataattagaaggataatatggggatacgtccgttgaaggtagtacgctttcgttgaagtaagctcatatctagttgaggtatcgattagtcgactgagtttatatccgcgctgccgatttcgcgccccctttccgtctatttagtgcgatgttgtgagtgtgggtgtgtgtgtgtttctctataaccgtttatagtgcttcctcgtgtgcttaggtgttgtgc

SEQ ID NO: 547487 - DNA, 454 bp, Homo sapiens
ctattattacagaatatatagataagcaacaagaagaaaatgatggccgggcgcggtggctcacgcctgtaatcccagcactttgggaggccaaggcgggcggatcacctgaagtcaggagttcgagaccagcctcaacatggagaaaccccgtctctactaaaaatacaaaattagccaagcatggtggtacatgcctgtaatcccagctactcgggaggctgaggcaggagaattgcttgaacctgggaggcagaggttgcggtgagccgagatcgcgccattgcactccagcctgggcaacaagagcgaaacttcatctcaaaaaaaaaagaaaagaaagaaatgacatcgatgatctgacggcaaggaatagctactgttaatattttggcatcctcctatatatcccttttttctgtatatgtttgacccgaacatagattatataata

SEQ ID NO: 547488 - DNA, 114 bp, Homo sapiens
tagactaggagcagatagaatattatagggcgtgatcataaaggtgatagctcttctatgataggggaagtagcgtcttgtagacctacttgcgctgatatgccattcttgctg

SEQ ID NO: 547489 - DNA, 430 bp, Homo sapiens
cgctacatgccgacaatcatatcacagggtgagaatcatttagcatgtagtgaaaggttttttttcagttgttctttttagaaaaaaagaaaaacaaaaacaaaaacaaaaaaaaaaaatcacaccatggctcacagaatgggcatctcattttggggacctcccatctttcggtttggaaaagggtacagtagtgcagggttcctgatgtaactttagggcttacaaggttgacatgtctcaggttcatggtgtggcgatgggggttttccgtctcaggtagatggcaaagtgtaggccccacacatgggaaaaaataataataaaacaaagcaaaaacaggaaattagggatttaagtggtatatgggttaatgtattttttcttaagtatacagggcacggttggaaaggtatggtcgagcaggtag

SEQ ID NO: 547490 - DNA, 505 bp, Homo sapiens
cgatatacttgtgaccttggtgactgtgcacgagctgcaggattgttctgtccagatagttatgtacccggacagtgagacactgagcaggtggtccttctgccataggcaggccagctgttggtccagaaccgtgtgagcccatggtcacctgtgctgactacgtagttcatgctgacgtcccaaatctctgaagttttgtccccataatcagagatcacatgggttctgtcgggactccaactaattgtgtaaatcccaccgtcgtgggccttgcttccgcccagcgcgcacaccttctccccagtcttcccgtcatagatgtttctggggccgtcagcactggctgtggcaaatctgttcccatcaggagagaatcgcacacagttgacaacgcggctgtggtcgccaactgtgaacttgaacttgaatgggggtccctcaaagaatgccgcgcagttatcatcgcttcccgtggccagccggtatggcggctctgcttgat

SEQ ID NO: 547491 - DNA, 103 bp, Homo sapiens
aacccccctggaaagggcattttaaaaccctgtttttaccccccaaccctgatgtgggtcccttatgtaaaaatttccaaaatttaaaatggatattttttga

SEQ ID NO: 547492 - DNA, 211 bp, Homo sapiens
tgaacactgcacacagtagcatagccatatctttaagctggtctttctattgtcacaaacctggagccttgatgcacaagctgaagaccaacctttagcctattcaagacgagtgtacttcagggcttctccatcaacatcttcagcgattatgaccaacaggcttactggtgcagcattggcacatttcaacgaagcacggaactggcca

SEQ ID NO: 547493 - DNA, 701 bp, Homo sapiens
catatatcatgcgtgtggtctgcggacacgagtgaagtgtacctgcccgtggaacatccttgtggcctagaatcatggcctgtttgcgtgcttgaggttgctaggatactgacctattaaacctggccgccagtgcctaacgagatgcgagcggaggcgtaggtccccgtatgggcgtacgtaagcgtgtccatgcaatggggatgtgagtccaaagaacgaggctaacaaaagcgaagtgtccgtagcatctaaatttccgtcgctgtcaatgacccaaggggacgcaaaacacccatcgtgtgcaacaagaagggacggcggggcccctgggggagaacccaaagcagctgggaaaggtaggcttacccattccagcctgaaaagttggtgcaggagggtgttgcatacaccttttcgacacaaggccaaccctgaccggtacagagtctgggccaagaattgggatacacattttcaagttccccaaacgggccatcaaactgtgggtgagccattccaaacttacctttgggcacgcttgaccggggtgacctcaagagacatccaattgtgtggcccttgtgacttgaattcaagccaagccaatggccccaaataaaagggcaggctggctctgtcccttttggcaaaaaaacaaacaataaaacacaaaacatcatttttaggggccccgacca

SEQ ID NO: 547494 - DNA, 837 bp, Homo sapiens
cctccacgaatgagaccattaacaatcattcgaagataaagtcatcatacttattagcgatggaatcaccacttctgacagagtgctgaggaaccagtactgggacaggtacatgaccaagtggctttctcactctaaattagctacaggacgcacacattcggtcctgtcagaagagatccagagctctgagtcacaaaggagcgtgaagaatctgcatccagtcctacagacagcttctcagctttcaagctggaggacacatcagagcctgggcactggtctgcacgcagctgagagtagctccctcctttccacctgaattcttcctcttacacatcacagcagcgaccacagctccgatgacacaacttgctaggacagccaggccagcaacaatgcccacgatgggacggtggactgtgaagacggctcccatctcatgggtgaggcttcgcagcccctacatgctgtacatggcatgtgtatctctgctcttctccagaaggcaccaccacagctgcccacttctggaaggttctatctcctgctggtctggtctccacaagctcagtgtcctgagtttggtcctcgccatcccgctgccaggtcagtgtgatctccgcagggtagaaacccagggcccagcacctcagggtggcctcatggtcagagatggggtggtgggtcacgtgtgtctttggggggtcagcgcgctccagcttgtccttcccgttctccaggtatctgcggagccactccacgcactcgccctccaggtaggctctccgtctgtccgctcacgggccgcctcccacttgcgctgggtgatcttga

SEQ ID NO: 547495 - DNA, 152 bp, Homo sapiens
gtgaactaagtggcttttttattaaagaaagccagaattaccaaagacttaaaagttggcattggggccctttttcttgccaaaggtgggcacaacgttgacaaagcgccggttggactgcatccgccgcttagcccttctgttgtcttctc

SEQ ID NO: 547496 - DNA, 358 bp, Homo sapiens
gtccttctattttagacggttgaacctggatctggctacatgtgtgcagaaacacaatgtcagaaatcttttctcactggcggtgggtggatgtggaattcaatttgtaacttttaggtctaactttcctaactgtgctttctgtcacaagccaaaatctgctttttgtctcaagttagctttccgtaagaatgaagggagtcccattttccaatccccagatctagacagaggtacagcagattgaatgaagaatattctggtgttactgctttattgctaatgaatcaatgaaaggcatggttttaaagctatcaaagtataaatagaacttgacaaggataatataaaatggact

SEQ ID NO: 547497 - DNA, 289 bp, Homo sapiens
ttttttattgggcggggggggggggttttatttttccccgggagccccttttcccctttggccctttttggggcccctttaacaccggttttgttcaaaaaccggggggggggggggggggatttccccggtttttttttccccccccccccccgggggggggggggggggggggggggggttcccccccccccccccccccccccgttttttttttttttttttttttttgtgttgcccccccgggggttttttttttggggcccccccttgggggtgggggggggga

SEQ ID NO: 547498 - DNA, 314 bp, Homo sapiens
aaaaaaaattttttttttttaaaaaagggaaaaccacccgggggcgttggttcccccctttattccccccattttgggagtttaggcagggggttcctaagttcaaaaaatggagccctttttggccaccttggtagaaccctttttctttatatataaaaaaattagttgggcatggtaaaacggccctttattccccctaattttggaacccaaggcagaaaatttttttttaccagggatttggaattttcatttaaccgaatttattccttttcactccaccctggtaaaaaatttaaattttttttcca

SEQ ID NO: 547499 - DNA, 465 bp, Homo sapiens
  misc_feature (156)..(156): n is a, c, g, or t
caaagagacgtagcactaccgatatccccaattagggctgacaggctgagagctacctatagtcatctaggagcgcaggtaagtgtgtaggctctgacggtatatcagataaagacaccacacgactggagaagctctcgatgttaatcaagctcnatggcagatatttccatgcccataggaggaccgtgaggaatacacgaatagactatagacttagggccgcatccattgtcagctcctccagataaaaccagcatgtaccttcatacagttcccattcggtttccaatatactgggccaagacggcagtatgtaggcatagtcgttgatgatcttcaccagctatccgggaaagtgatacccgtacccactcccagacacgcatagagcaggtattgatgtacttatcccagctaggtaccaggaagctaaatagaactggatgaatcatattagtccac

SEQ ID NO: 547500 - DNA, 747 bp, Homo sapiens
tcgtctagaggatcctctcggatgcaaggtcgatgaagaaagtgagaggaaattttaaaaaatatgtttaaacaaatgaaaatagaaatgcaacatacccacacctatgggatacagaaaagcaggctaaaagggaagtatatagcactaaatgcctatatcacaaaagcagaaatattttaaataaacagcctagtgatacacctcaaggaactagaaaaccaaggacaaaccaaacccaaaattagtagaaggaaaagtatagtaaatatcagaacaaaaacaaaatagagactaaaaaacaatacaaaggatcaagagacaaaaagtgcgtgttttaaaaaaaagatacacaaaatggataaacctcctagctagactaaccatgaaaaaaaggaagaagagtcaaataaaatcagaaatgagaaagaagatattataactgataccacagaaacacaaaggatcatcagagattactatgaacaactatagccaacaaaatggaaaacctagaggaaatgggtaaattcctggacacatacaaccttccaagatggaacctggaagaaatagaaaacctgaacagaccaataactggtaatgagatggaatcagtaataagtctcccaacaaagagaagccagtagtggatgattatgggtgaacctaacaaactatagagaaaataacacatcttccaactgttaaaacattgagaggggatctctaatatctaagcagaag

SEQ ID NO: 547501 - DNA, 699 bp, Homo sapiens
ggtgaagaggacaggagccatgtggacgtaccagttggtgaggagctgtgggtcgtgtagttgatgccctggtaatgctatgatggaaagggtccaatcggttccaagtacgcgtaggcgagtggtctgaaagcccccggtatcgaatttcagtgcgggaaccaatgcgaagactggcattaagggctgtggatagcttggtgccgaattggtcgtggtcagcgtgaactgattattggtgaccgacagactgggaaaacctcaattgctatgtgagcaaatcattaagcagaaacgtttcaatgatggatctgatgagaaagaagaagctgtactgtatttatgttgctatcggtcgaaagagatccactgtggccagtctggtgacagagacttacagatgcagatgccatgaagtacaccatcgtggtgtcggcgtacggcctcggatgctgcccacgttcagatacctggctccttactctggctgttccatgggacgagtatctctagagacgatggcaaacatgtcttagatcgatctatgaagactgtatccaaaaggctgtttggttaccgtcagatgtctgctgtggtcgccgacgcccctggtccgtgaggactatcctggtgatgtgtctagctacatcgcggttgctggagagagcacgtcaaaatgaacgatgctttgggtgggtc

SEQ ID NO: 547502 - DNA, 371 bp, Homo sapiens
agccctaaggatgttttgaattcagtggggccaaataaatgttgacattccccttttggttgatggaagtatcagtgtgggaactgtttgcttaatggccttttataaaataaaaagagcatattagcagggagggagattatggagggagggaaaagtccctttgttttatttatcccttttgtattaataaagaagcccttcccagtccctgggcaatgccctttataggaaaaaggttttgcattcctgctgctgccccggaggggttaactttttaatgaaaaaataaatgcttttcccctcagtagataaagtgaaatgtgaattgttaataactgggcccggtcaataaaacgatgttttaagga

SEQ ID NO: 547503 - DNA, 307 bp, Homo sapiens
cctcggtaccgtatctctaacattacaaaaatatatatatattatttgcttcctgttgaaatgcaatgtaaagtacacagcggccgggcgcagtggctcatgcctgtaatccttttcttttctttccttttctttttttgagacaaggtctggctctgtcgcaaaaacaaacaaacaaaaaagaaataaaaaaacagcccctccaaaaattgggcaaaggatatgaacaaacacttctcaaaggaagacatttatgcggccaaaaaaggtatgaaaaaagggctcaatatcactaatgttagagata

SEQ ID NO: 547504 - DNA, 347 bp, Homo sapiens
  misc_feature (183)..(183): n is a, c, g, or t
agtctttttttttgtttgttttagacggagtttcactcttgttgcccaggctggagtgaagtggggtgaccttggctcactgcaacctccaggccagcctcagcctccctagtagttgggactacaggccccccctaccacgcctggctaattttttgtatttttagtaaaaatggggtttgnccgtgttaaccaggatggtttcgatttcctgacctcgtgatccccccccctcggcctcccaaagtgttgggattataggtgtgagcccccgcgccgggccggttgttggcattttaatgttttgtaggtggaatatttccaataaacccaaggtgccgtattta

SEQ ID NO: 547505 - DNA, 267 bp, Homo sapiens
tcgaggcgcggctggtgcagcaggcggcggtacgagaagcctttgtcctggcccatgacagcgaaaacggccagcaactggtggcctatatcgtgccgagcgacgccgctatagcggtggcaggggaagcccaggccgccctgcgcgaaagcctcaagacggcactcaaggaacatgtgccggactacatggtgccggcctacctgctgttcctggaggcgctgccgctgacccccaacggcaagctcgatcgcaaggctctgcctg

SEQ ID NO: 547506 - DNA, 196 bp, Homo sapiens
tccatgttaagggtgtcggaatagagtcttgagaagcagaaggcggtctgggagtcatgcaggaatgaatactactggtccattatgggatctaggtttcttcaaactacctgtgtaggtgtcaactggccagactggtagcgcgcgctggcatcctagtgacccgagcccatccccagatgcctctccatggccc

SEQ ID NO: 547507 - DNA, 787 bp, Homo sapiens
  misc_feature (144)..(144): n is a, c, g, or t
  misc_feature (172)..(172): n is a, c, g, or t
  misc_feature (184)..(184): n is a, c, g, or t
  misc_feature (280)..(280): n is a, c, g, or t
  misc_feature (605)..(605): n is a, c, g, or t
  misc_feature (727)..(727): n is a, c, g, or t
  misc_feature (762)..(762): n is a, c, g, or t
gaaaatttaaaaagctgcaacgtttgttgcaaatcttcttggaatcaactgcaagacctgtgccgcctggccaaactctcctgccctgccctcggtatctctaaaaagaacctctataactttaaaatcgaataccttttcgantacaaaaaaatccgcaaacaagaatatnacctggtgaaanggcgtggatatccaaactcaaaaaacacctgggaaccacggcaaaatctcaaatgtgtgcgtatcctcaaacaattccacaaagacttaaaaaagnaactgctccggcggcaccaccggtcaaaaaccccccggcacctggacccaaacttggccaactacctggtgcaaaaagccaaacaaaggcgggcgctccgtcgctgggaacaggaactcaatgccaaacgcaccatctgggacgcatcactttaaaaaataaagtggacctggacggccctccgcgggccttcttttacatcaataaataccattgttgtttaaggcagtcaccctcaaccaatgtggctgtggggctgcgagtgccaggactgtctgtgggcacccactggaggctgctgcccgggggcgtcactgcacaagtntgcctacaatgaccagggccaggtgcggcttcgagccgggctgcccatctacgagtgcaactcccgctgccgctgcggctatgactgcccaaatcgtgtggtacagaagggtatccgatatnacctctgcatcttccgcacggataatgggcgtggntggggcgtccgcaccctggagaaga

SEQ ID NO: 547508 - DNA, 252 bp, Homo sapiens
cacgagggtatcctctgtatcttgaatgtcacctatgacatattataaagattttaatgcatgtttataggaataagcatttggctattctccacattacactaaatgttctctgctacctcattaattctcacaacagctctatgaagtcaggataattagtctcattttacaagtataatggtgtggctcataaagatttagtatactgctcatagcatctgatacataacctattatctgttatcatat

SEQ ID NO: 547509 - DNA, 140 bp, Homo sapiens
gcggagtgacggtggaggttcgcggctctaacggggctttctacaagggatttataaagacgttacgaagactccctacagtgttttgaaaacaattcgaacagaacgcaggttcatttaatgaagttagataccacaca

SEQ ID NO: 547510 - DNA, 156 bp, Homo sapiens
aaagaactcaaatatattcatctgaggagcccacagacttctgtactctggggtagatgagagcagtacctccacagcctgggtaactgcatctggtagagaacaaatgtgtcaaggttcccactgcttacagccccactggtcaccagctgccca

SEQ ID NO: 547511 - DNA, 163 bp, Homo sapiens
gctccgttgtggcggagtatctcatataggcgacactgtcacgcgatgcactgttcgtatctgatgccgatgttatcatgatccgatttgtcttctcctaggcgtagcagcccaatctttcatccttaacaagcgttcagtcagagtcttgatgtgactttcc

SEQ ID NO: 547512 - DNA, 625 bp, Homo sapiens
gtgattagcttagagtggtcagttcagacattgccaattgttcgaataacgggatgacaagcatatcatcacctatgttgcgccatatgttccatgggcagttccttattataccagacagagttgtactatacacatgacatgtgttggattagatccatgggtggacagctgttgtcagcatgcgttgaatcgggctgatgcctgaataccgtctcgtttgatattaacgacacgttaatggcatacaccatgctgcttgaatgtaagcaggatatcacatctgaagaaacggttcatactgactgatgctttgaacggaatgctgagggcgtactgatcgatacatagtatgttcacgtaatgactgggaactacttccgtgtgatatgagtgattgtcagcattatcatcttacatagtcagtagtatcactactgagtggctattgattgctagtagcagtgcatcagattcagacgctgctgctacttatggatcactttgttacaggtcatcagtagccacctgtagagcgcatagtatgatctctatatgatcctccctgtaattgagatacctactgaccctacctgaggagaatacggagctcttgtatttggcc

SEQ ID NO: 547513 - DNA, 506 bp, Homo sapiens
  misc_feature (27)..(27): n is a, c, g, or t
  misc_feature (254)..(254): n is a, c, g, or t
  misc_feature (267)..(267): n is a, c, g, or t
  misc_feature (273)..(274): n is a, c, g, or t
caccctctccttaaacgcacgctgcanagctgcctcttgatgtgacaatttattttcaagcccttttacctcctgaggggcccctcggtggcacaaccagccggaatcacgacttggtgacactaaggggtcaccttttgaccccagatacaatcatggtttgaggaacagacctgagcccgcaggtacacacggcggggcaccgcgctcacaccaggcttgggttcctgccaacgctctccaaccactgcgtnaatcaggggtccncagcgnnagccccggggtccctgctaaatgcagcggcttcaaatgacagttgaactcccggaatacgataccctagagaaaagctacggagggcaaattggaggagatgggggagtgggggcagcggcgtgccttttgacctctccaagccacttgccaaaccctcgcctaccccgccagaaaaattcttaaatgagctgggcggagcgctcggagccaagggaggggtggcgctcttc

SEQ ID NO: 547514 - DNA, 165 bp, Homo sapiens
gtatctaaggattcccgatgggtagggttgggtagtgggaggtcagacgtgattacgtggcgtggcatagtgacgagtttagcagttcgtgcgcttgtgcatgcttaactgctgggttggtgatgggtgtgttgacgcgtcaattggatggggttagcgatgggg

SEQ ID NO: 547515 - DNA, 687 bp, Homo sapiens
aaaaattagctgggcgtggtggcgcatgcctgtagtcccaactactagggaggctgaggcaggagaatcacttgaacccaggaggtggaggttgcagtgagccgagatcacgccactgcactccagcctggcgacagagcgagactccctctcaaaaaaaaaaaaatacaaaaaattagccgggcattgtggtgcatgcctgtaatctcagctatttgggaggccgaggcaggagaatcacttgaacccaggaggcagaggttgcagtgagtcgagatcgtgccactgcactccagcctgggtgacagagcaagactttgtctcaaaaataataatagtaaaatgttacatgtgcatgaacgttttaaattactcatttttattaactgaagaaaataaggtagtttagactttccaagagttaactatagtttacaaaatttttttaggcaaaaatatgcttgatatattaagcagcaaatgttgtatattaagcaaaagtgtaaattcagcaattactaactgttccttacagacagtgtacttgaagtctttgggttagttctgagcaatgtggtcattgaagttggatctaagaggaaagtgggtaatcggtagctttttatttataacaggatgccaaaattaaacttcagatttttggccagtccaaaaaaacaacaaagg

SEQ ID NO: 547516 - DNA, 634 bp, Homo sapiens
ggtcgtctaaaacaggctgatgcaggagaatcacttgtatcccgggaggtggaggttgcagtgagccgagtatcacgccgttgcactccagcgctgggcaataagagtgaaattccatctcaggaaaacaaaaaaaaatctataaggggaaacagccatggccaggttggggtaagatgtaatgttgcacgaggggttatccggtttactatcggaaagagtttctgaaaacagaagaaaacccacagccagcaggagatgtgaataccactcacaggacagtgacccacagggggaccttgaactgtgtgagagggtgccgccttcacttccgggcgacaggggtgtcgaggaaaatgtcacgtgaggtcccttctggctggcaaaaagtccttgggcattggctggtaggcatgcaagagggtagactctgtgaggaagggattgggcaacatctagcaaaccggtcttcactgacctgtgacccagcaaccccctccccagaacctacctgaaggcacgggcaaaggcaggagaagctgcgtgtgcagggctgcttgtgacagtactgttgggacaactgcaaatgcccatggtaggagactggttgattcggagatctgtggaatattat

SEQ ID NO: 547517 - DNA, 1149 bp, Homo sapiens
ggtatggccaggatcaggtgtggtcaggttctctgtggtcggacccgtggccacctgggttccctttatctcactcctgccctctctgtggcactcaagtccacatggtgatcgtggtggctgttggatagtcgagcggatggcgattaggatctacaaaatctcttcagtgtacccagcggggctcatggttcagtgcactggcatgtggcctagtgtccgctcctggcctggctaaaccgctcaaagtccctcgtggctcctgtccagattccagaagcctgtgctaggactcggccacttacccatgcgagctcttgagcttctagcctcgagaggattatcacatgtgccagctagtgtgccgaaggcaggctgtcgtggatcgacggctcgatctacaaaaggtcgagggaagaacttgtcccatgttggtcacatgacgactagtcgggggcatcaattgacgggaccccttgtagaagacttgctggtaagtttccatcgcagcattgattgggatggcacgccctgagcacgaccagtggcgtgcccggggactctgagcaaggtcatcacgtcttgactgggtgaccgttgagggaccaccccaaaaaattccccgtgggtaatctggaatccctactttcgcatttcgccctttgtcgcattggtcctacaccgtaggaaacatggggctcgaacttgtgccttgattgccactgtgtccatcccaaaagagataaacctttaacgtggaattcattcccttgtcctcccaaggtggaattggtgctcattgcatgagtgggcctcgttgggtgaaacctcagaaaagttccaagcgcgacagtgcggcgcttggggcttcacaggttgatcccctagggcggtgctccaattacaagcgaaaggctatgcctagctatgacaggcccgcctttggttggcgcaaactcctaatgttgtcgcaagtgggaagaccacccggattggctggagacattggcttgaagcgccccgggggacatggggggaacccccttgtgtaaaaaagtatttgtatgtggtgagaaaccccaattcacaatagctggcgtgttggtgaaagggcacttgataccacacaatgggcaatatacctccctg

SEQ ID NO: 547518 - DNA, 322 bp, Homo sapiens
cggtccatcgtgcagaatatcactcgaaagaagagcagatgaatttggaaatgaactgaaatttggaaataacaagaaaattttacaaaaatcccaattttctgttcttaatggcttcaaaaggacattggaaagattgttgcagattaaaaacatgatcactgcatcacaaactgccagtgaaggcagtgaacacaggtgagaaaaaaacaaaacaaaacaggaaaacaaagcagaagatgaaacagaaattctcccagaactgggcagaaaatggatcaaatttgaatgagaattcaaatgagaatgatgacagattcca

SEQ ID NO: 547519 - DNA, 733 bp, Homo sapiens
catggagcgatcccttttgtttttccggcactcacagaaggagatactcaagttgaatggaacatcggttctgttacctgtggccagaaggactttcacatcatgagaatctggtttccatgttttagaacactgtgggaccggacccaccaccgaccaagaatgggtcgtgtccccagccatatgtgtcacgcgccctattcccggtgaccaaggtaactgcccaccgtgtgacttttccctccgccccctcatgtggtctgtccgtgttatctattcaacctatataagaccctcttttggagcagccctttggttttgaatttgtatcatctcacataaattctagactccataaaccctgatcccctcatatctagaggcacatgcccagaaggataagtagacaaaaaatatctcccatccttgagtagattaaaaggcatgtcggctgggcgtggtggctcatgcctgtgatccccgcactttgggaggccgaggcaggtggatcacgaggtccagagttcgagacccagcctgacccacatggtgaaaccccctctctactaagaataccaaaattaccgggttggtggcgggcgcctgtagtccagctacgagggaggctgaggcacggagaattgcttgaacctgagagtcggaggttgctgtgaaccgagatcacacccctgcactccagcctgggtggcagagccagactccgtttcaccca

SEQ ID NO: 547520 - DNA, 206 bp, Homo sapiens
gcacgagaacattctcagtaaagttttgggaaagttacatgacatggggctcatgtcgtgagcattttaaaggaaaagaaaagatggtgggaacagaactggagaaaatataaaagatgagagtagaggctgggcatggtggtccacacctataattccagcaccttgggaggccgaggcaggcggatcacgagctcgggagctcg

SEQ ID NO: 547521 - DNA, 221 bp, Homo sapiens
agcaggagctatacacctatacacctatacacctattacactgatacaccctgtcatgtggtttagttgctttccctgatacgaatataccaataaggctaaacatctgtcatgtaatattaccagccattcatatgtcttctctttcccccaacatttttttttttttggggggggggaataggggtccggagctcggaattcggaaatcaatgggtcat

SEQ ID NO: 547522 - DNA, 162 bp, Homo sapiens
gcgttgtgttctcaacttctacaatatttggcatgtagtaacactttttaaacatatacggaatgaatgtatgagcgagtcactatgttctcatctttggattcttattaccttgcacatagtagttatcaggttattcaagtaaatgtaattagcttttaa

SEQ ID NO: 547523 - DNA, 153 bp, Homo sapiens
ttcctggacctcacggtgctggatgggttgaggccgtggaagggctctgagatgactgcaggcgtagagctgatagtgtacaccgtgcccggtcacactgtgcctatcctctcactgccggacccgtgtcctccccatcgccggccagggaac

SEQ ID NO: 547524 - DNA, 410 bp, Homo sapiens
tggagagtgtcgtcctatgctgttacctaggaagattgtacgtgatgaggctgtatagttataataatgtttgtgatattcgagtctatcagaatagggcgaagtaggcctgcgtcgtatgtcgatgtttcatagcctgagactagttcggactccccttcgccgaggtcgaaaggtgttcgattggtctctgctactgtgaagataaatcatataatggtcaaggctcatgatggcaggagtactcagaggtgttcttgtattgtgataagggtggagaggttaaaggagccacttatcactaatagtatgatagtagaatgatggctacggtgacttcatctgagatcgtcagggctcactgctcgcattgcgcctgatcagtggcgtagttctgagttcgatgctca

SEQ ID NO: 547525 - DNA, 408 bp, Homo sapiens
catcatggggttctggactaccctgctatttctcagacatgctttcattgtgtcccactgaattctctaaattcccagctcattttccacactctgttagggtcctgcctcaaccattaattctacttatccatttgtttaggaataattattttctttttttcccctctaaactgggtaatttatattacgagctatttttgtatgtttaaaggattaccatccctagcctgtattgttgttttactgtgagggaatggttaggacagaataagtgtttgtgttgctctgtaatcttcaactttctaggaatgctgcttctcactggggcttccttgcttgaagatcatgggcttttcccttccactgcagaccgaggcataattgacagttggatataggatctgg

SEQ ID NO: 547526 - DNA, 220 bp, Homo sapiens
cggacgttgtttgaccgctttggtaggcccaagccagggggcatcccccctctcccaggaaagcagggagggggccggggagtttttcctctcagccccaccctgggcccccggggggaaaggcttgccccctcctcccctccccaagtgaaggaacattttttggtaaaccttattttccatttttggaaaatatttatgaataaatagttttatatgt

SEQ ID NO: 547527 - DNA, 158 bp, Homo sapiens
  misc_feature (158)..(158): n is a, c, g, or t
atctcgaagtcctgagctcaagcgatccaacagcctcggcatcccaaagtgctgggattacaggtgtgagccaccatgcccggccgcaagtttttttttttaagtcttacgtatagtgacttattttagattttttggttacggtaacaatgtgtgtn

SEQ ID NO: 547528 - DNA, 804 bp, Homo sapiens
  misc_feature (33)..(33): n is a, c, g, or t
  misc_feature (84)..(85): n is a, c, g, or t
  misc_feature (96)..(96): n is a, c, g, or t
  misc_feature (109)..(109): n is a, c, g, or t
  misc_feature (123)..(123): n is a, c, g, or t
  misc_feature (135)..(135): n is a, c, g, or t
  misc_feature (156)..(156): n is a, c, g, or t
  misc_feature (162)..(162): n is a, c, g, or t
  misc_feature (164)..(164): n is a, c, g, or t
  misc_feature (168)..(168): n is a, c, g, or t
  misc_feature (181)..(182): n is a, c, g, or t
  misc_feature (192)..(192): n is a, c, g, or t
  misc_feature (201)..(201): n is a, c, g, or t
  misc_feature (222)..(222): n is a, c, g, or t
  misc_feature (269)..(269): n is a, c, g, or t
  misc_feature (274)..(274): n is a, c, g, or t
  misc_feature (281)..(281): n is a, c, g, or t
  misc_feature (290)..(290): n is a, c, g, or t
  misc_feature (325)..(325): n is a, c, g, or t
  misc_feature (335)..(335): n is a, c, g, or t
  misc_feature (346)..(346): n is a, c, g, or t
  misc_feature (350)..(350): n is a, c, g, or t
  misc_feature (357)..(357): n is a, c, g, or t
  misc_feature (363)..(363): n is a, c, g, or t
  misc_feature (367)..(367): n is a, c, g, or t
  misc_feature (369)..(369): n is a, c, g, or t
  misc_feature (372)..(372): n is a, c, g, or t
  misc_feature (380)..(380): n is a, c, g, or t
  misc_feature (388)..(388): n is a, c, g, or t
  misc_feature (405)..(405): n is a, c, g, or t
  misc_feature (407)..(408): n is a, c, g, or t
  misc_feature (410)..(410): n is a, c, g, or t
  misc_feature (416)..(416): n is a, c, g, or t
  misc_feature (420)..(420): n is a, c, g, or t
  misc_feature (423)..(423): n is a, c, g, or t
  misc_feature (426)..(426): n is a, c, g, or t
  misc_feature (430)..(430): n is a, c, g, or t
  misc_feature (434)..(434): n is a, c, g, or t
  misc_feature (437)..(437): n is a, c, g, or t
  misc_feature (442)..(443): n is a, c, g, or t
  misc_feature (457)..(458): n is a, c, g, or t
  misc_feature (464)..(464): n is a, c, g, or t
  misc_feature (476)..(477): n is a, c, g, or t
  misc_feature (495)..(496): n is a, c, g, or t
  misc_feature (500)..(500): n is a, c, g, or t
  misc_feature (518)..(518): n is a, c, g, or t
  misc_feature (524)..(524): n is a, c, g, or t
  misc_feature (558)..(558): n is a, c, g, or t
  misc_feature (572)..(572): n is a, c, g, or t
  misc_feature (578)..(579): n is a, c, g, or t
  misc_feature (800)..(800): n is a, c, g, or t
caaagggagtcttaaaaccaaattaagattgcnaggtaaaggctgcacaaggaaaatgccttacctctgaagcccagagctggnnggggagggcangacccaggtgagntccaccctcctgcnaagggaaagggnatgtctggtgaggtatggggntccgantncagnttactctgggtgnngggcggtagntttggaagnttggtggaggatttcctgctnaacttagagggtgggccaatggggccagggcgggggaaggtgagggntgganggcaganggaagtganaaaggccacctcagcacagcagtgagaggagctgnggccaagggngggagtgaganagcnctaggtngtgggnagangntcnaagatggnccgggggntgggagggggtgggagngnncnggggtntggntgntcnagcngtgntgnggtgnnataagtggctcttnnggctcnaggttccatatnnttggtggcgctcggctgnngcgntcgggactcttgagtgcnttggtngaggacttgtaacagatcagctcctgggctcttngagggttggagctnctgcgnnggtggggacagagaatccagcatagtcctgtcccctggagcagccttgccatacttctgcatggcttccaggccggcatccatggcagcagaccaggctgggaggctggtcttggccttcaggggctgtgcagccgcagtcaggaacaggccatagagcgccccagatgagcctcccatcttctccaggagcaggacagacaacttggagagcagctgggnaggg

SEQ ID NO: 547529 - DNA, 270 bp, Homo sapiens
tgggaagggaagggaatggggagaagggaaaagcaagcagggtttgagcctcgggggcttccccctccccctttgcctatcccctccccttgggttgggccttgagccttggctgggagctgaaaggggttgcagctggtgggatgagacctccttttccccgttttgggggggggggggccagcagataaatcccccccttccttgggcggtcgggggactttgaggttcagccaggtcagattttataaaaattaattaaaatctcca

SEQ ID NO: 547530 - DNA, 121 bp, Homo sapiens
gaaacaactttgtcattttattcaatagacatgaactgagcctcggtgctgggctaagctgtacggatacgaaaggtataaagctctgtctgtgctacacgggactccttttgtggggtgg

SEQ ID NO: 547531 - DNA, 342 bp, Homo sapiens
gaggccatggtaacgatggagctgtgcctgtggaggcggtggtgggggcagtaggctcatctgcggagatggccgtgacgtagggtatgggcctaaataggccatggtgagtcatgagctgggtctgtagaggctgatgggagaaagttcggggcctggagaggctgccgggaggtaggagcataaggtagaatcagggggcgtcttaagctggttttcctgcaacgggatggtcccacgtttcactgtcacccctcgggaatccacgtatacgaaaattccaaatattagtggggcataggggcaagcacctgtagtctcagccacgggggaggttgagag

SEQ ID NO: 547532 - DNA, 653 bp, Homo sapiens
gccatgctgtgtctggcagagctgtcagtctctgcacttgaggccctaggccgtcatagacgtgaaggctcttcagcgtcatcatgtggagacagacggtaggaatcctgcaaatgagcagaaaggatctgatgatgaaagtttgttctgaagctactacaaactcaagtcagtgagttgcttctgtaccagttttgtttttttttttttttttggaaatagaagtcttgtgcttcccacctttgaaggtgcagggggtggtgactcctccttcttcacgtgcaagccttccgccctccgtgggttctcaagcaatttctgcctcagccttcccaagttaccgtgggactacaagttgcgcgccaccacgccgtggctaatttgggtattttgggtagagacgggtttgccccattttgggccaggcgtggttctcgaacccccgacctcgaggtgattccacccgcctcggcctccaaaaggtgctggggattacagggctgtgagccacctggcccggtcaagactctctcgttctctaggaggagacggtctgggagcgcctccagggacgaaggctgtcgctctggccccaggaagccgccctgttagaggctgtccctccttttccccatctcctgcggggccctcca

SEQ ID NO: 547533 - DNA, 147 bp, Homo sapiens
cattccctacacagtttgaaaaaaaaaattaaaagataacacaaaatttaaaaagcaatacagtataacaactatttgcatagcatttacattgtattaggtattataagtaatctagagattatgtaaagtgtatggaaggatcgt

SEQ ID NO: 547534 - DNA, 386 bp, Homo sapiens
attgaaaatattacagacgcatcatggcacaatcactgccagctgcacactctaacattgtaacatatgatggagagaactgggcaggctatggattgtgtaagggagatgcacttaactgcactctagtctgtgtgatcatagcgagaccctatctcaaataatatataattatttttgacaagtttccagcatatttagtgcagaggtggacaattggttccatttccctagcccattatttcaagaaatgtaaatccccctgtatgctgacatttggaatgtgacctttgtgagttttccacgttaatgatggtattcttcatataccttaaatttccaccatttttcactgtgcttcgtccaacctatatcccgctcataag

SEQ ID NO: 547535 - DNA, 102 bp, Homo sapiens
tgtctcagtttcgggatgcaggtcacctacggccccacagagagagcgtcgctctctcggtggggcccttccagcctgcagtctcgtcccgaaactgagaca

SEQ ID NO: 547536 - DNA, 228 bp, Homo sapiens
aaaaaaaaacttttggggccaacgagccatcaatatttagggataatggaagacgttactgggggactgacaccactaaaatagaagattcaaaatcctataccataaaaattacaatcaaaagtggactaaagagaaaaggagcttaaagttatactgcaatagggctgatacatattcttcccccaaatcatactctggctcccaaaatttttttatactacagcc

SEQ ID NO: 547537 - DNA, 451 bp, Homo sapiens
atcatatcggtcataaccctgctggcttcccttgccataggtagaaactatagaggtaaacatttcttttatagtagcaggtgtgttgtaccaatagaacttgtcaacattgtaatctgcataaggaatatatatcgcacattctgtgacttaaaattacattataggaatggtcatgaagcctgatctccttcctcagccccactgtccagtagaaaaattgatccagatttagtcttcaatatgtaatccatcttcttcttggatgtgcagaatggtctggatcatattgtatttaaggcttaacatctcatgccaagtaattttttcttctgaatcacagtaaaactgtgttggaaatcagttcaagaaaattttgcttgattgtagtgcatgatggtaagtgttgcattgtgagttcatcccgagtaaggaagagagcctgtttctc

SEQ ID NO: 547538 - DNA, 291 bp, Homo sapiens
tttttgcacttccagcccaggcgctggcacgaggcagctgccgaaggctgtgcccacaggcactgagtgctcagatgactttgaggagcgagaccctgacctgagagacgggctggagaacatgctgccagccccttcgggaagtggacactgttcagcgcggctcagacccaccagctgcggcgactgcggggcccagccaagtgccgctgagtgcgaagccttcatggtcagcgggacggagagtgaggagtgctttctgacctgccacaagcgctgcctggagactct

SEQ ID NO: 547539 - DNA, 556 bp, Homo sapiens
agtttttctctgggcctatgaaagttctcaaaattctagatctacagtcttaagattatctttttatgacgtgtcatttaggtcatcattgcaggacattttcttcttcataaattatttcctaaggagtaaatcaaattaaataatgaatgtaggactgctttgtaagcagtgacacccttcatttaaaaaactagttgtcactcttcattcctagagtgttatttgtggcaaatagaaatgaagggtcaatgtaatgaccttaatgactatttcgtggtacacaattctccctggctttgcctttctttttctagtatctaaaatagccagtcagctatgtggaactcacttgctaatgcaagacccaagtttgagctttgggtcaatcacttgggtgaaaactcaccatatgacttttctcatttaaatgtttttgttgttgttgttgagacagagtctcaccctgtcacccgggttggagagtagtggtgcgatctcagctcactgaaacctctgcctcccaggttcaagagattcttcggcttcagcctcc

SEQ ID NO: 547540 - DNA, 318 bp, Homo sapiens
aaatcaaaacactactctgacatcagaacatatttatgaagaactctttctataaacttttgtcaattttccatattaaccataatgctgccagatgattacatctttcattgaaacataacaaaaactttacatttgggattcagggtggtattatttatttttggagggctttgtagagtcaggctatcaggtgccagttgacgttatttattaatctggatagcatgatattagttcagaaggcaatttccatttttaaggttatgtctcagaaaactgtgaaagggattttagcatgatgaaaactttgactat

SEQ ID NO: 547541 - DNA, 192 bp, Homo sapiens
  misc_feature (10)..(10): n is a, c, g, or t
  misc_feature (187)..(187): n is a, c, g, or t
gatggctccnggggacctggctgggcgaccgggaaagtgaccggatctctcaaggggagaccttcgtgacgttgacgtccctgggaagaaacggagataggtcgtccttcatcgatctcgtcagtagcgggttaagggtcgtcgtcaattttacacggcgaacttaagtcgaacctgaattggtccnacttg

SEQ ID NO: 547542 - DNA, 443 bp, Homo sapiens
acacatatatgatgtgtgaccaatgctatggtttgaatgtttgtcccttctaaaactcatgttgaaacttaaccccctgtgaggcagtgttgagaggtggggcttttaagaggtgattggtcatgcaggctctgccctcatgaatggattaatccatgagtaatcacaggagtgaggctggtggccttataagaaggggaagacagacctgagttagcatgctcagcctccttactatgtgtgccctgcaccatcttgagactctgcagagagtcccactagtaagcagactctcaccagaggcagccccttgacttggacttctgaaccaccataactgtaagaaataaattccttttctttataagttgcaaagtttcaagtattctgttataagccacagaaaatgaaaataagacaacctacttatatatttcctcgtg

SEQ ID NO: 547543 - DNA, 168 bp, Homo sapiens
  misc_feature (86)..(86): n is a, c, g, or t
  misc_feature (119)..(119): n is a, c, g, or t
  misc_feature (146)..(146): n is a, c, g, or t
gtcgcggttgcttctggaccgaacgaaggacgacgaatgcagaaatgagacagacaaaaggatctgtttgaaagaaggggtcaggnggctccttgatattagggaacagggacctgagncttttgcagcccagttcatatttattnaggtagaaagtgaatagggagg

SEQ ID NO: 547544 - DNA, 335 bp, Homo sapiens
cccccttttttgggggggccccttggggttttccccgcccccaaaaaagggcccctttttttctttttgggaaaggggggacccccaaaatttcccccgggaaaatttttttttgggttttttgggaacccccctcaaaagggaattccccccccccgggggggggaaaaggtttttgtttttttttcccccaaaccctcccccccttttaaattttttttaaaaaaagggggggggggggggggggtttttcccctttttttggggtttgggcccccaatttttttggttttgtttttttttttaaaaaaaaattttttttggtttttttccca

SEQ ID NO: 547545 - DNA, 1200 bp, Homo sapiens
agcgcgggcacaggcagggcccaaacacaccgggcgtggagcctcaggacccctaatccttcggaggcgcacacctctctcgcagcaagtgtcccacgacactccgctgtgcccgtggaggggactcaaccgatggcggcatagggaggcaccctctctagtgcgaacccaagggccgcggagacctccgggggcggataactcggctcgttacctacaagccagcgcgcccaggggtgtaccaaactcacccggcgtgagtgggaccagcggctggcacgacgccctccggccaggccggctaatgacctgcttgagcatggagggttctgcttctgccgctgggccagccaaagtggccttccctactctttctaagccctcgttgtgtactccgttcgagcaaggtaccctctcctacctatggtgtgattgatataggagtgggtgtgaatgtgggggtgtagcccgtgggtggcgttagtccctagcctgttgctggcccggcagttgggactagcctactgatcctgcgttgccgcacggtgccctcctcaggctgggtcacccagtgcttgttcacctgatctactccgtgagcgttctcccaaacagggagtcaggtttagaggggccagggcctcttggaggcccctcgtgtcttgcgatgggattctgcttcctgtgccttctgaggctggctcaggggcttctatgggatcctggaagttccttagggacttgcccagggtcccagggccacccacacttgcgatgctgctccctgataggcccgcaacctcctacgtcccggctgggctccagaccccagcttcctgccctccaccgggagtctgcatggttgggagtcactgggtggaggggcctattgatgaggctggacccggctcagggacaggtggaggagctgggcctcccacagggtgcccgggcagtgccattcctggatgggggatgggcagcgcttcaaagcgtgtggggtctacagtcctgcaggtctaggcagggctgaccggttcgtccacgctcgcccatcgcgccccaggccccctgcctgtgcctgccttgcaccccgtcttgcttgggccacggtgtctatgcattgccctgccttatttgccattcacctcttttcttccccgcccctgaaattaaggggtactggagccccagggaact

SEQ ID NO: 547546 - DNA, 442 bp, Homo sapiens
agtcttgctctgccacccaggctggagtacagtgagccaagatcgcgccattgcactccagcccaggctacagtgtgagactccgtctcaaaaaaaaaaaaaaaaaagaagagaaaagaaatatagcatctcttcaacaaacggttggggacaactggatttgcacatgcgaaagaatgaagttggattcctatccctcaccatgtaaaaaaaatcaactcaaaatggatcaacgacctaaatataaaagctgaaatcacacaactcttagaaaaaacataggagttaatcttcatgaccttggatttggcaatggattcttagataggacaccaaaaggaccagcaataaaagaaaaaacatataaattggattcgcaaaatttaaaacttcgtgcacaaaggacattataaataaagtaaaatgacaacctaaagaaaaa

SEQ ID NO: 547547 - DNA, 302 bp, Homo sapiens
cctttttaacccccgggccccctttgggcccccccccccttttccggggggcccccccccccggccccccccggccaaatttgggcccgggggttttaattcccctggcgcccccccccccgccgttgggctttttattttggggttttaaaccaaacgggatttccccccgggggggggtccccccccaaaaaaccccaaaattttttttttttggggcctttttcccgggggaagggtgggggaccccccccccgggggttttttttttttccccaaaaaaagtttttttttttctttta

SEQ ID NO: 547548 - DNA, 287 bp, Homo sapiens
ggaaaaaaaataaaataaataacagttttttttatttgaccattcctaaaagattaggtagtaatacttaaacacagtaataaggtcaaaaaagaacagaacattcaaattaaaaggcaatgtacttcactggtcatttttatgactcctagagtagtcatagcatctctacaaataagttgtcctatgataacaatacagatgcttcagattcctatagcactgcatgtgtctcacaccaatcctgctacgtaaatagaatcataacctccttttaaaattaagga

SEQ ID NO: 547549 - DNA, 260 bp, Homo sapiens
gtgattttaaggtttttctatggtgaaggttcaaactgtaataaccatgtttacaatttttcttggtcttaaataatttcttatattacttattaatagtcaagcttgggggttatttaagcttcttggacgagcctaaaactttgtatcctgaaggaaaatatttttttccaccagaggaaattgctttcaatttcttaaccttcaaaacaatgtcaagtgtttgtcaacctgtgcatttgatagccacagcacaggta

SEQ ID NO: 547550 - DNA, 716 bp, Homo sapiens
  misc_feature (428)..(428): n is a, c, g, or t
  misc_feature (659)..(659): n is a, c, g, or t
gaggcggagggacagaaacccctgtgggttgtgaggccgcccagcacggtggcagcacgaagaggaactacctgctgactgctggctcatcacacctcattatcaaggatcttggagaaattcattcatggcttttggatcacagaccagttattcaaagtgaaactcgttattttgtaaaagactttgaagacaaacgtgggctccgagaaatgcgagatctcgaaaatttgaagaacatgatccactgaaacatatgagcatactctgtccaaatgtagagacacactgcgggacactctcagccagattctccacagatagcaagcagctaatgactcagtctgtagactccaacacagggagcacgaacgaagattcatagtgaccactcagaagctagtgagaaacagcatatgctccagagngacaactttatgaatgagcaacccaacacaagggctgaagtgtatgaacagcacacgaaattttcatccttttaagaacttgaaccacaacactcacaaactaatgagaagatgtgcacctctctcctgagaactatatccaccagaccgcttagactctgcttcaagcttagcaatatattcagaggcactcttatatcacaagaaagaagattctactggcgttctganaggatatttgaagggtgccacaatttttccagctctgtgcctatatatgattatttg

SEQ ID NO: 547551 - DNA, 431 bp, Homo sapiens
  misc_feature (13)..(13): n is a, c, g, or t
  misc_feature (15)..(15): n is a, c, g, or t
  misc_feature (17)..(17): n is a, c, g, or t
  misc_feature (22)..(23): n is a, c, g, or t
  misc_feature (25)..(25): n is a, c, g, or t
  misc_feature (44)..(44): n is a, c, g, or t
  misc_feature (71)..(71): n is a, c, g, or t
  misc_feature (96)..(96): n is a, c, g, or t
  misc_feature (103)..(103): n is a, c, g, or t
  misc_feature (107)..(107): n is a, c, g, or t
  misc_feature (148)..(148): n is a, c, g, or t
  misc_feature (217)..(217): n is a, c, g, or t
  misc_feature (225)..(225): n is a, c, g, or t
  misc_feature (238)..(238): n is a, c, g, or t
  misc_feature (243)..(243): n is a, c, g, or t
  misc_feature (257)..(257): n is a, c, g, or t
  misc_feature (311)..(311): n is a, c, g, or t
  misc_feature (321)..(321): n is a, c, g, or t
  misc_feature (330)..(330): n is a, c, g, or t
  misc_feature (342)..(342): n is a, c, g, or t
  misc_feature (349)..(349): n is a, c, g, or t
  misc_feature (356)..(357): n is a, c, g, or t
  misc_feature (388)..(388): n is a, c, g, or t
  misc_feature (392)..(392): n is a, c, g, or t
  misc_feature (408)..(408): n is a, c, g, or t
  misc_feature (412)..(412): n is a, c, g, or t
catcatggcgcgntncntgganntnaaagtggtcttcaaaccantggcgtaccgaatttatgtttctacanatgcataattaagaggtctacatanttccatnatcnctcaaaggggaacgaattccattctgtcatgccaggtgttngtcagaaccttcaaaacgaaagtggttatcagtggagcttgtattacaaatagatcgtatttctacacnggctctgntcctctcatggtnctganatcctctggtgttntcaggacccctgggctacctcagtacccctacgggtagcccatctgcagtctgnctcttccggnatagccggngactcgtcccgnggctttnctcctgnntccccatctcggtttggcgacgcctcccgancccngggctgccagagtgantgangcttctctcataggaatag

SEQ ID NO: 547552 - DNA, 1524 bp, Homo sapiens
  misc_feature (906)..(906): n is a, c, g, or t
ctgccctctctgtgagactcatagtcagatagactaaggaggacacctgcagcaagagcagtctgctagtctgtcatcttgcgccgtttgctgatatctttctttttgctctgtttgtctgatgatgctagtttatttggtggacgttgtcttttcttactgggtttctttttgcgtttgtttgtggtcccattcgacgtctgtctgtctcgatcggattgttggttcaacagacgacctcttatgtcctccatgataggtccatcgttccgctcgctgaggtttgtgctccgtcttttagttggggttttgttgtttttggtcctttatgtggggacgccggtgcttgttcgtcgtgtgctctcccaatatttttgttgcagggttgtgctcccccctgggggggctcccccccttgctgcctctgtgtgccgaaatggctttggcccacccgtcgcctgtgtgcgcttgtgcccagtgtcgtgggagcaccccccctggggccctttgggtcctctcctttaaggccccctgtcccgggcttattgctcccactggctaccgggtggggagccccacgggattttccgcgtgatgtatactctctgggcccctttggcccatgcgaggagttcccccgttgtccgtacggggccagagttggtcccaactggccccggtttggatgaccttttatatggagcctatttggccacaaggtatcccccgcgtgtacacggatgaggccacagctatagccgcttagtccacgggaacaatctctgacgcgaccgggcgccaaaataccacacggttcggccaacccccaggatacttgcccgccataagcaggtaatactttggagacacacccattctgtccgccaactttggatcaccgggtanagctctggacaccggcgtttgacaccaatatgatacccgcggagacccggctttctccaaggcgccccgaccgggtgagcgccagaaccggagccctcggagaggtcacatgcgtccacaccacggctgaccacgaggcctgttatccgcggagcactgttgtctcacgcaccctctcgcgggaatgtaaatcacgcgccaccacgctatacttctcctgtagaagaggtatacccgcctgcacacacacggctgtccgaatgggaccactcttcctctgtgaccccgcggggagcccacgaatggaggccaccaggactgaagctggcccacagaaggggtggaaactgtctgaatgggagtttccttcacattcccttcttgatataaggtacatcccccacgcctggagtccccagaaagagagactgagattctcttagacccagaaagaagggatgaccaatggccaccagatgttttggaagattccccgagtgtgttcccaagaaggcttccccttgagggagggctggaatctgtcttccccgactcggctcctccggtctttagccccccccttgtctaagactttggtctattaagtgccctaccaga

SEQ ID NO: 547553 - DNA, 700 bp, Homo sapiens
taaaaaatcctccctcgccgggtggtctaacatttaggcaggcctataaaacatttctgtccacaagttagcctctaaaatcgtggaagctttcgtgtgctaatggcggagtggccaaacttcctctcaaatgttgagcccggccatgtgcccgcatctgcttctctagtataagcccaagatgtgaatcctgtgccatgggggcctcatattaagtcgtatcgacatctattagttttcagagaccttacggaagagtaagaggtcgtttattgcgttcacaatccagatagttgacaaggaatatcacagatactgttcagtagcagaatataacgaccattgcgatctggttccatcaatgtgcatccatctatatgtgataaggtatatccaaggaagacatccatttcatatagtcgattttaatccaaagctttatgggttgaacaaggacaggtttcgttcgtgaggagctcatttacatcggtcgcacggtcttattcatgagaggacacagtgcttcgggtctgacacctagtgggagctctaagtcctcttttcagaatcgaaagctataacagtcatagcaagattaccccggtttaagctcatcctgaatgtcacctaataaatgcttcgccatcagtatgccacgtgttaactgggctgccactattaaccgacgtttcgcccctct

SEQ ID NO: 547554 - DNA, 519 bp, Homo sapiens
gggcccactgaggcaggctccggctccgtctggttggggctgttgttttgatggatcgtgtgcttttcccttacctcttatcacttgctgtcatctgttgacttaggcccagtctgcagatgtagtgtagtagtttcctattgctgggttagcttatggcagtattagagtattacttgcctcctactttatagtggaagacagaccataatcccagatgtaagagtgaaattagatagtatcatattattaccgtattaggctgagaggtaaagttccgacacctaacacagaggaacgaagacaggaccagaacggcagtagtagaaacgaccaaggaaaaaaacaaaaaatagagaaggaatgcatggggaacccaggaaaagcagagaagaggacaaaaaaagaacacaagaccaaaagaccactcacacgacgcacgaaggagtactccaggaaaaaaacaaaaaacgcctaacaacatggcactggaagcacaaaacaaaacaattgataaca

SEQ ID NO: 547555 - DNA, 101 bp, Homo sapiens
ctctctatggctatgcggtgcagcggtgtcggctgtggcttaggcctgggtggaggtggcagtgtctcggctaaaccttgaggaacgaggacacggagatg

SEQ ID NO: 547556 - DNA, 160 bp, Homo sapiens
  misc_feature (37)..(37): n is a, c, g, or t
ttaacgtgtagacagtagtagtaggctggctatgccngatgtgtctacctttctctgataggaggcaggtacagcagcaaggctgaagagagccttatcagctcctcaattccagtgtccttaaccatagtccatctgtttgcaccctaggttggtgtcc

SEQ ID NO: 547557 - DNA, 443 bp, Homo sapiens
gcggcgcctactactactaaattcgcggccgcgtcgacgggtcaggacctcttttctctaagttgctttgttcagggtattttatcacagcaacagaaatgaaacaggcaggatctaagagggcatttctctataaacaaaaatatataaattgttactaaacaaatgcagtgatgctcagtatcattagccaagcctaaaacaggtatcatttctccccctttaggatagtcatcaacaaagagacaaataaaaacagatgctggtaaggctgtggacaaatcagaaactgctcacactgatgttagaatgtttgaagaaagtttagcagattttccaaatgtcaaacaaagatttctagaaatccagtgattctagttgtagatatataccaagggaataagaatacacagtgtacctccacctaaaaatacatgatccaa

SEQ ID NO: 547558 - DNA, 994 bp, Homo sapiens
gcggggttttgccatggtagtcaggctggtcttgaacctcctgagctcaagtgatccaccagctcgtgctcccaaagtgttgagatgacagggacgagccacaggcccagcctgagtggtatctgctttagggaccaggtagactttaaaaggagggttagagaaacgccagtgtcttgtgctgaggtaaatacatttactgctcaggaacacattgcccagatctccactccgagcagcgccccctgaatagaaaatcagtcgtgtccccagggactgctaatagcttggggctccaggaaatcatccagttagagttggagattcagagattacttgaagccaggacatgctccgtaactccttgcccgattaaaggtgtaatgaatagacgcagagggtgtaccctgttagccagcagatacatgggaatcggctggtgtgccgttcagggaggaagagggcacggtggtccaagctatgagtgacgtaggctatgaggatggtgctgactttgtccatccctcatccaagatgttctcaagctccatccatgcggtgttcagaaccttgttacgcggaaacgggctcaggagtgaccccaggattcagggtgtggagtcggcgtaaacacgacatgctagaagctgtacacatgctaactgcaggatagactcggaactcaggctcttccggtacctacgtggagggtataccgtgcggttcccaataatccataagcatgcccacgagggatccatcagggagccatgcgtgggccaacagcgccaggccatggcctgaaggctgactgggaagagccagagagaactcttgccctgccgggaccctaccggagcggtggagctcggagacgaacagagaatggtcccccgggctgggcactcatgcgggtcatttacttgcgaaccgggttcagacatggccggggacggcctcagcacgaggtaacccgccttgaattcgacataat

SEQ ID NO: 547559 - DNA, 134 bp, Homo sapiens
ctctcgaggacccccagttattagaaaaaaaagttatgttacagaggtatatttatgaacagtagatgtgctgttcaaaagaatttacaaaacagtacgtttccatgttttttaaaaaaatcaaatatgtcaat

SEQ ID NO: 547560 - DNA, 511 bp, Homo sapiens
tgttgctgagaggtgaatgtggacagtggagagcatttgccagcagagacaggaaggccatggtggtctgggctaacacaggtggtgctggacaggccatgtgccctggctggacactttctctgccccgtgaccacacgcagcctcagccaagccctggaccccacccttggactcagcctgtgcccaatcctgctctacacctagccctggccctggggactctgatcgtagtgtgtgacctggaggcccaccctcagaatggggactgatgtcctgctgctccagggctgcatgcaccggccacagacccagggcggtcccaggggcattcttagccagcatggcactgcccacattcaagacacctcacacaaccactgcccagctccgcagccagcaacatctccctcagcgcccaggctgccaggtgggcacgccatgtcctgccccggcgcagtgcacagagatgcacaaggggaggggggctgctcccggtgctgtgcggccg

SEQ ID NO: 547561 - DNA, 414 bp, Homo sapiens
tatgtatcgccaacacattatttattcattgtattaatggtatgtcacattttttactgtataaatacttatgtgcaaataagtgtaagagaatgattcttattggtagcacatgaattctgaatcaggaataatggtgatgccaaacaatcacagactgtacatgtgggtggctgggtgacatctttgctttctcatggttcaatgtatacaaactttgtttcatacacaaaataaataaaatcattgctataaaattaccttcaagccatgtgtaaggtaaatggatacaccataaatggatttcctgtttagacttgggtcttatccccaacatatctcattatgtgtatgcaaatactcaaatacaaaaaattagccgggatgtgtttactgtgttgggcgataacatca

SEQ ID NO: 547562 - DNA, 472 bp, Homo sapiens
gatctcgaggatcccatggcggggtcccagccatgtctggccatgtctccaagaagaaaacgagcctgattaagccttgattttgataacaaaagatgacaggaactccaaacaagctagcaatcagaatgttcaatatcattggactgattgttttagagaactaaaataaaatcttattcttattttttaaatgttttgattccagaccaagggtaaaaaacaaatacaacaaatatatagaccccacactccctctagtggaccttcactttcattaaccaaatgttttccaagaggctataagtcggcctggcactgtggctcgcacttataatcccagcactttgggaggccaaagtgttgaggtgttgacattacaggtgtgagacatcatgcctggtatatatatatactttttttttaattcttaccttggttgggagtacggcttcttttttttttttttttt

SEQ ID NO: 547563 - DNA, 129 bp, Homo sapiens
ctcgcgggtgcctgatcagctggttgtccaagcatcagcaatcttcagttccacactttcacacatttgccccaccagcacagtccttccggggtcacgcagctcgcacattcgtcacatccatgggtc

SEQ ID NO: 547564 - DNA, 153 bp, Homo sapiens
agtcgtccacaactgtcgtgactgtgataacctggcgggtggactgtgatgttccgcagcaacattgcaacagactggccttctgtatgttactttcaacaggcccacatgatacaattagcgaattcccaccgcacaaaacaagggcggccg

SEQ ID NO: 547565 - DNA, 93 bp, Homo sapiens
  misc_feature (48)..(48): n is a, c, g, or t
acggccgtgtattactgtgcgagagagacgtggtgggatattgtactnaagggccccctgaaagatgactggttcgacccctggggccaggga

SEQ ID NO: 547566 - DNA, 790 bp, Homo sapiens
gggctggtgtgcgtgcctcgtactgtgtgtgctgggcactgggtctaggccaggtatgacacccattctcctgatgagatcttcactgtcagatctgctataatggtccgtattactacaaacggatgagatgcgtagtctcatcttgagtacctacatattgtgtggtaaagacttgtcgttgacttcttctttgagcggatccttgaaacatgatgaagtctcggagtcacccatgataaagcggggcaactccatgtgtgcctctttcccacgtagtactgagagggcctgcttgttctgggagtggagcggagaggagcgaatacggagccaagcagggtgcatcatctatagtggccgtatgtcccttaaataattagagccttaaagggggcgaaaccaacattcgcatctcttgtgcaggaagtagaagtctcacagggaggacatatccgcgctgttagaaacacagtagtggtggcgcaacgcgccgtccgatggtcaaaaatgttgtcggtcgtcgagtacttcttgagtgtagttgatcggtgtggggactgatagatgaatcgtagagggtttgctttcttgttaggacacacgtggaaggaagttgggtgcgataactttctgcgactttgtgctgttagtgagttggaacccagtgcattaacagacgttttggaggggtaaacaaagggggggatggatgattgggaggacgcatgaaaaatgtgtgatatagaaagcgagtgttaatagagaaggaccacgttgacaatatgga

SEQ ID NO: 547567 - DNA, 179 bp, Homo sapiens
tcaagcttctaacgatgtacggggacatgttggtgttgtggtgcacgcctgtagtcccagctactcaggaagctgaggcaggaagatcacttgagctcaggaagtttgaggaggcaagtgaagctatggtctttgtcactgcggctccagcctaggaaatagagctagaccttacccca

SEQ ID NO: 547568 - DNA, 607 bp, Homo sapiens
  misc_feature (348)..(348): n is a, c, g, or t
tgcttgactgattcagaaaagtactgaagtgaaagattttagcatttatttctcctggctttcttccatctgccaggaataactcagttcactgaaggcttctgacaggtccctgaccttggcccctatctttgccatcagtgtttggggtgaggagagaatgggctttgaggatggttgcctctttttcactgctgcacctcctcattatctctccaggaagcaggttgattctggccggcaaagctccctgaggtgggatccattcagtccattcttacaggggtaatagggcttggggctcatttcagtcagccttcgttggaagagagaggtccctttcctttncttttgaagattgattagtttccaaagaaagacagataacaccactctcattctcactttctctcttttttctgttcttgaaaactcaatagttgtgtacaataagaagtcttgctagacaaattgtgcctatgctttatgttctgtaaacatgattcttgaagctgagaaacttttaatggaaccctttagctaagctgaaattacttacataatccaactctgtattagttttcctggtttttgaaatagtgtcacc

SEQ ID NO: 547569 - DNA, 150 bp, Homo sapiens
tatgcagcagtaatacagcagcaagaaaagactgcccttgacagtacccaatgttttcatcatacacagagtaggccttgcagattttatagagtgattcttgaccatctcctccagtatctttaaagtaatcatgtccggggtatgtac

SEQ ID NO: 547570 - DNA, 103 bp, Homo sapiens
gaccagatctggtagtcggcggtagtccttgccgttgccggcgcggcccaggtctttacctttggtctggttatagcccacgaacggacgcagaccgaagtcg

SEQ ID NO: 547571 - DNA, 307 bp, Homo sapiens
tggcgatctagaggatcccggaagcacactgcaacatcctttcatgataaaaacactctaacaatgaggaagtggaaaggaattaccttaacctgatgaagggtatctaccaaaaactcacaactaatatcatacttaatggtgaaagattaaaaacgttcccacgaagatcaggaacaagacaaggatgtctgctgttaccactctactcaatattatacttgagggtctatccacagcaggagaaagaaaaggcattcagatgggaaaggaaaaagcagaactacctctatttgtagatgacata

SEQ ID NO: 547572 - DNA, 436 bp, Homo sapiens
cgtcaggaagctaagtgtactgagtctaagtggggtcatgctgacggatgtaagtcccgagcccctaccaagctctgttggagagagcctctgacagcctccaggacctggtctaatgatgagtgtgggatcacggatgatcagctccttgccctcctgacttccctgagccactgctcccagcttacgagcttaagcttctacgggaattccatctccatatctgccctggaaaagtctcctgcgagtactcatacgggctgagcaatctgacccaagtgctgtatcctgtccccctggaagagttatgaggacctccataggtacccctccaactggagaggcttgcttatctgcatgccaggctcagggagttgctgtgtgcgttggggcgagccagcatggtctgggtagtgccaacccctgttctcactgt

SEQ ID NO: 547573 - DNA, 337 bp, Homo sapiens
tacaacggcgacgtcatgctcaacagattatttggaccgtatgtattacgggatatagtaacatcatttagtctccacccggcagggagtagggcttagatgtatacaacacctctgcttactgatgtcgccttaatattctgctattgcagcaattcaaaaatagtcttccagtaccatttggcacactaaccacgtgcatgtgcatcatcattcctcaaactatgaaacctttttcctcagtgtccgctcacatcatttgttctgggagtctaaagccaccccacgtacgttaataagcaaaatcctgactattatgctgtggggcatctctcac

SEQ ID NO: 547574 - DNA, 248 bp, Homo sapiens
aagcttttaccgcctagccaggaccagccagccggagaccggagtccgagagacgcagacagcaacagacgagagacagccaaggtacgatcagcagcaccaagccaagaagcctaaagagcagtcagacctgactgcagcagcacgctcgcactcgccagagcacagcagcactgacacaactacagccatagcgagtcatagacaacacccaacacactaatcctatctaatttggcccactcctc

SEQ ID NO: 547575 - DNA, 144 bp, Homo sapiens
tgctggtctcatacgtactacatggtggtctaggagcagctgggcggatagcaccgggcatattctggaatggatgaggtctgacacccgtgagcagtccagcgaggacttggtcttacgatgagcaatttggctaggaggata

SEQ ID NO: 547576 - DNA, 123 bp, Homo sapiens
gggtgctctagcaggatccttatccccgatctgggtatggggaggggggttcatagtagaagagcgatggtgagagctaaggtcggggcggaaactgggaggctgaggcaggagaattgcttg

SEQ ID NO: 547577 - DNA, 244 bp, Homo sapiens
tcttgctaagggcggttagcgatgccccaccatctgaagcacgtcatagctctgtcctgacacataggcgtggatcatgacaaatgtaatacagaggtatccatgatgattaccaggtggggagccacgttcatgccccagcagagactccgagaagccaacaccaactggatagcccctgagctgaagagctgctccaccaggcgtcgctccatggggctgagcccctcatgcaggtagccca

SEQ ID NO: 547578 - DNA, 613 bp, Homo sapiens
  misc_feature (200)..(200): n is a, c, g, or t
  misc_feature (203)..(203): n is a, c, g, or t
tcgatctagaggagcccctatgttctcgatcgttaaacccttccccagttttttttttatactttaaaccccggctcctcagggcctgggccctttctggaagctggcttcctcttataaaatagctttggccgaaacatagtttttttttagcagatcccaaaatataatgaaggggagggggggatattggggtcggngtncttataatatattattattcttcctgggttctagaaaaatagataaatatatttttttcaggaaatagtgtggtgtttccagttggatgtggcggggtggttgagtgagtgaattttcatgtggcggggtgggttttggcctttttctctggcccggttcctgggtgccttcggatggggcgggaatagtggagggggatggttctaccctttcggccttcggttggggacccagcgggtgtccttgggttggcttactacaggctctagggctgtgctatccaatacagtaaccacatgcggtggtttaaagttaagccaattaaaatcacttaagattaaaaattccttcctcagtggcactaaccacgttctagaggcgtcctgtgtgtgggtcatgcctactgtac

SEQ ID NO: 547579 - DNA, 110 bp, Homo sapiens
tctcgatatctgacctcaagtgatcgcccgcttgactcccaaagtgctgggattccatggcatgagccactgtgctgggtcatcttagggactttttattaacaaaccct

SEQ ID NO: 547580 - DNA, 823 bp, Homo sapiens
gtagggaccaatactttgggaggccctccttggcgggccccggtcccccagttctgcccacaccgcccgggggtttcccaccacggcggagttgtctgaacacacagcaccgggcgctttcgtccctcccagaggtacaccggggaaacaccttggcggttgccaagagaaccgtttcaccacgggttctgaccgcccccccgggggtctttaatatgttgtcctgccccccgacgtagagctttcaaccttaggtcctggtgcctatagggggcatgtgccccttcatttgggagtcttcaactgccccccctcttccacccccgggtcttcctagtagcttccacaacccgggtatccggcgtccactcctagccacctggtctgaaatctctccaactgtatcactaattctcaagtccattctccccccccctttaagtcttatcgtcgcacattctcacgcaataaacgactttcgtttgagtcagcccccctctcccaattcacgtcctcctacaaggcagatacaaaattctctttaacgcacggttcctgtctctcataaccagtcgaggagcacacagggcgtgcatcacccctaggattgttcgttaggagccacggggtgccccgatcagtaatagcgcacaccatcgacgggtgatcaaaccatttatccatctttgttggacaagttgcgctatgactttctccgtctctttgcgctgtcttgctattgcatctcaacccgtctgcacaagaaagggttttgtaatacgtgtagattaattaaaccccgttgggacaaccaaaaaaaaca

SEQ ID NO: 547581 - DNA, 373 bp, Homo sapiens
gtctgtaccggtgtttccctttgtctctataccccaggaaagaaaggggcagagacaggaagaaactagctgaagtcatcgtggctcatgcctgtgttcccagtcattttgagaggccgaggcaagcagatcacttgcaggtcaggagtttgagaccagcctggtcaacatggtgaaagcccatctctactaaaaatacaaaaattatccaggcgtcgtggtgcactcctgtagtcccagctactcaggaggctgagtcaggagaatcgctcgaacctgggaggcagaggttacagtgagccgagattgcaccactacacttcagcctgggtgacagagcaagactctgtctccaaaaagacaaagggaaaca

SEQ ID NO: 547582 - DNA, 1311 bp, Homo sapiens
cccggccaacagccgggggtggctagatgttcgcctcctgcggggatgtaccaccaatgtgtggccgacaaagggggtattatactccctcctctttcccgttttgtcgaccgttctcctcctcgtcagtgatatggaacgttgtgtaaactgccccattgtgtggagagctccctcttttgtgcctctcgtccgccctttttcccggggagctctcgttatcatatacctatgccctggctcttcttgtgtctttcctgcctagagggcctgggcgccgggaagccccctgggggacgccgggaggccaaacatccgggtgtgaaaaaccccgccgtgtggtcctcgaattcgtggtcccaggaccccccgtttctgtgggccccaaatgaggcccccccggtatgtcttatatgagcgccccccccttgttcaaggttcgcaggccgcctccacctctttagcgagtgtatagtctctttctttgggggagaccgtggaaatgagacaattgggccccctggatggccctttctgagctttggagctccggagtgtatacccactgggagatccctatgatgggatgtgtggctgtaagagaggcttccccacacaagggttgaaaggaggacagaatctcttctgactccccattctacaggcacgtgatccttgtagttgggattcacgcacccaccgtataaggggacccggcccttcctctggccctgagtcttctttcgagaggcccacttccgcggcgacccacgagggatcacgcccacgaattgtcccacgcctacgcctcccacgagctctccacgggcacccacgagcaccgccacaccggaggctctgggcgctccctgacttgtgaaaacgtcctgagacctcgtgagtcaccacacactgaccacgctgaggagaaccccagtgcacaactcctgggttttctttaagaattctggcctgaacaccggaaacacccacggttctgctcgtcttcttttgtgtgttataaaatttgccttaatttaaaggtacacttttctttgggttttctaagagacgcccctaagtcaccctgcttcacttagaccggtttccacggttttttcccacaggtgaccctgttagcgcctcacgctggcggtgaacacagccggcccacgcgtggcgccacccacacacccccccacgaagctgtccacggaccacgctccgtccccagcgctcatggtgttgaaactgtctgtcaagcaccccggtgtctgtgtccaccccagtaataaacggtttactgtccga

SEQ ID NO: 547583 - DNA, 130 bp, Homo sapiens
tctatccgcaaggtcctagtaggggcacaactccataggtagctttttctattttcgtcacttagttcatcttcccatgtaccgctgccttacatcaacttcctgcgcccttgcccatatgtcacggttt

SEQ ID NO: 547584 - DNA, 816 bp, Homo sapiens
  misc_feature (194)..(194): n is a, c, g, or t
  misc_feature (445)..(445): n is a, c, g, or t
  misc_feature (524)..(524): n is a, c, g, or t
  misc_feature (534)..(534): n is a, c, g, or t
  misc_feature (580)..(580): n is a, c, g, or t
  misc_feature (582)..(582): n is a, c, g, or t
  misc_feature (587)..(587): n is a, c, g, or t
  misc_feature (592)..(592): n is a, c, g, or t
  misc_feature (599)..(599): n is a, c, g, or t
  misc_feature (633)..(633): n is a, c, g, or t
  misc_feature (635)..(635): n is a, c, g, or t
  misc_feature (645)..(645): n is a, c, g, or t
  misc_feature (653)..(653): n is a, c, g, or t
  misc_feature (660)..(660): n is a, c, g, or t
  misc_feature (672)..(672): n is a, c, g, or t
  misc_feature (767)..(767): n is a, c, g, or t
gtgtatgcaagtgggaggtaactttatgcttggcaaagagtagatgtttcgttaagaaatcagtcaatatatttttttaagatggcttcacaggtagaagagtccagtaatgtccagagaagcagacactggttagcttaacaaatgaatctgatgaggcaaaggtctgtatcaacatgagttcattagtcggnaggaagtgagggtcttctccccaccctgtctacagggagtattttggagattgacttgacactgctgtgcacatcaactgagtctacatcaggaaacaaaggaagtgatattataggctttttcttaacattttaagaaaaaaatatttgtaaaaaagaatttagagtgcttgatgtctaaaactttgtatgtgaaaaaaaaatgtgaaagagcaaatatgctcttgttaagcattaaaaatacatatatngtaaaaataaggtagtatcacacggcatattacaaaattttatgtcatgaagcacatcaaatgactccgggtctctganggtgctaaanatgagacgtatattttcacatttcttttttgccttaaaaatttgcngnaaganatggnttccgantttaataaaacagtataatccagccccgccaacntntctccccttncccccgtngttcttncccttggttgcnttagggccttggcctgtcatgtgcccgggatattattttttaaaggaggtccctgggacagctggtcaccccactgcacaccagaattacttggnagcttcaaaaataatgatgtcccccaccacccgcaagactccactgtaa

SEQ ID NO: 547585 - DNA, 758 bp, Homo sapiens
  misc_feature (194)..(194): n is a, c, g, or t
  misc_feature (466)..(466): n is a, c, g, or t
  misc_feature (476)..(476): n is a, c, g, or t
  misc_feature (522)..(522): n is a, c, g, or t
  misc_feature (524)..(524): n is a, c, g, or t
  misc_feature (529)..(529): n is a, c, g, or t
  misc_feature (534)..(534): n is a, c, g, or t
  misc_feature (541)..(541): n is a, c, g, or t
  misc_feature (575)..(575): n is a, c, g, or t
  misc_feature (577)..(577): n is a, c, g, or t
  misc_feature (587)..(587): n is a, c, g, or t
  misc_feature (595)..(595): n is a, c, g, or t
  misc_feature (602)..(602): n is a, c, g, or t
  misc_feature (614)..(614): n is a, c, g, or t
  misc_feature (709)..(709): n is a, c, g, or t
gtgtatgcaagtgggaggtaactttatgcttggcaaagagtagatgtttcgttaagaaatcagtcaatatatttttttaagatggcttcacaggtagaagagtccagtaatgtccagagaagcagacactggttagcttaacaaatgaatctgatgaggcaaaggtctgtatcaacatgagttcattagtcggnaggaagtgagggtcttctccccaccctgtctacagggagtattttggagattgacttgacactgctgtgcacatcaactgagtctacatcaggaaacaaaggaagtgatattataggctttttcttaacattttaagaaaaaaatatttgtaaaaaagaatttagagtgcttgatgtctaaaactttgtatgtgaaaaaataaggtagtatcacacggcatattacaaaattttatgtcatgaagcacatcaaatgactccgggtctctganggtgctaaanatgagacgtatattttcacatttcttttttgccttaaaaatttgcngnaaganatggnttccgantttaataaaacagtataatccagccccgccaacntntctccccttncccccgtngttcttncccttggttgcnttagggccttggcctgtcatgtgcccgggatattattttttaaaggaggtccctgggacagctggtcaccccactgcacaccagaattacttggnagcttcaaaaataatgatgtcccccaccacccgcaagactccactgtaa

SEQ ID NO: 547586 - DNA, 542 bp, Homo sapiens
  misc_feature (46)..(46): n is a, c, g, or t
  misc_feature (49)..(49): n is a, c, g, or t
  misc_feature (82)..(82): n is a, c, g, or t
  misc_feature (84)..(84): n is a, c, g, or t
  misc_feature (89)..(89): n is a, c, g, or t
  misc_feature (94)..(94): n is a, c, g, or t
  misc_feature (99)..(99): n is a, c, g, or t
  misc_feature (101)..(102): n is a, c, g, or t
  misc_feature (105)..(107): n is a, c, g, or t
  misc_feature (111)..(111): n is a, c, g, or t
  misc_feature (115)..(115): n is a, c, g, or t
  misc_feature (119)..(121): n is a, c, g, or t
  misc_feature (123)..(123): n is a, c, g, or t
  misc_feature (144)..(145): n is a, c, g, or t
  misc_feature (150)..(150): n is a, c, g, or t
  misc_feature (158)..(158): n is a, c, g, or t
  misc_feature (160)..(160): n is a, c, g, or t
  misc_feature (184)..(184): n is a, c, g, or t
  misc_feature (191)..(191): n is a, c, g, or t
  misc_feature (195)..(195): n is a, c, g, or t
  misc_feature (205)..(205): n is a, c, g, or t
  misc_feature (218)..(218): n is a, c, g, or t
  misc_feature (229)..(229): n is a, c, g, or t
  misc_feature (239)..(239): n is a, c, g, or t
  misc_feature (259)..(259): n is a, c, g, or t
  misc_feature (276)..(276): n is a, c, g, or t
  misc_feature (278)..(278): n is a, c, g, or t
  misc_feature (333)..(333): n is a, c, g, or t
tccaggctctctacctaccttgactccccaggttttcttagtccanttntttaaactaccctgtacctgctgataactcctntnaattntaganggganannaannncctnttantatnnncngagtataaaataggaaccccnnatttnacataccncnaacctgagattcctctttcctgcnaatcctnaccntactctgtgnaagctagtttccnagatgtcctcnatgatccccncttcctagtattcacacccntatgtagtcctctcccncnatgagtaaggctgacctgtgtaagcactagtatattgcagaaatgatggtgtacnacttctgaggctgggtcataaaaaagggtacacgtttttttgttgttgttgttgagaccgagtttcactcttgttgccccagctggagtgccgtggcgcgacctcggccccctgccaccccagcctgggcgaccaagtgagactctgtctccagatagaccgatagatagatagatagatagatagatagatagtagagagcctggcca

SEQ ID NO: 547587 - DNA, 246 bp, Homo sapiens
aagcaagggggcagcagcaagtctgtgtgtcagcatctccttaaagaggctcatgtgtgccgggcgcagtggctcacgcctgtaatcccagcactttgggaggctgcggcagaaggatcagttgaacccaggagttcaagaccagcctagccatcatagtgagacaccatctctacaaaaactttcaaaacattcagccaggcatcagtggcaccactcctatggctgcacagcaggagaacgcgg

SEQ ID NO: 547588 - DNA, 941 bp, Homo sapiens
gctaggtcggctggtgtcatcggcgagggacgcccgcgggaaaacgtgtctattagccatggtcaccccaccgtgtcttcgacttgccgtcgactgcgagcccttgggccgcgtctcctttgagctgttcgccgacatggtccccaagacagcagaaaaattttcgtgctctgagcactggcatgaggcaaaccaggatttggttcatgagggttcctgctcttcacagaattattccaggtttatgtgtcagggtggtgactttcacacgccataatggcacatggtggcaattccatctatggcggagaaatttgcaccagatgtagaacttctatcctatacatgcatacgcggtcctggccatcttgtcctatgtgctaaatgctggacccaacacagaatggttcccagtctttcatcctgcactgccaagtactgagtggttggatggcaagcatgtggtgtttggcacacgtgatagagatcgggcatgaagttattgtgcggaggccttggttgcgctttgcgcgtcctggattgcgcgagaccatctacgacatatcaccatttgcttgatctgtggacatactcggaagtcacgtgtgacttgtgttcaatcttaaccaccagatcatgccttctgtagctcatggagagcgcccctccagcccatttgctcgctgtcatactacaatctttctgctctcgctgcagttccctttgcggttccatgtttgccttgttcccctcccattgcctagctgggatcgccgagttaagtctatgattatcgaaactaaaaggtacctaccagatggatgaaatgcaaggcgggcatatccgtcgggccggagacaggattctctaactgggatggcctaagggccgcgaccaggttctttggcaaggggtaaattgccggaccgcaatggatcctg

SEQ ID NO: 547589 - DNA, 184 bp, Homo sapiens
tattacgtacacagggggaggaatggggtgggttttgtatgttctaactgtcatttgatttttacgttgttagcattgggagtaatgtgattcgaggttggagtagcattcaggcgtaggtagacatgtagaggttaacggacggcgtgattggtggcctatgattggtgcggcgactgactca

SEQ ID NO: 547590 - DNA, 147 bp, Homo sapiens
ggacacatgcttttcaacgatgatgtcggcaccttgcgcgacgtttcccgcttctttcagcagcttggcggcacgcaccgccagatcgtcggcctcggccacgcccgccaggccctcgccctgccggcgcacctggccgtcttcacg

SEQ ID NO: 547591 - DNA, 396 bp, Homo sapiens
ggcatattttggtcttatacactgtgttccaccggcaatgaaaagagttcttgtttttcctccagcaatttgtcatttgttaaagagtttagcagttctaagagatatagaccagctgtgctatctttttgtggttttcagttctctagtatgttgagcatctttttgtaagtgtacttgccatctgtagatcttctttggtgaggcgtctgttcagatctgtgtgcatttttaattgggctgtttaacttattgtttagttttaacaattttttatgtattttgaatacaaattctcagatctgtattttgcaaatattttcttcaatatgtggcttgtcttttggttctcttaacaaggtctcttccagagtataaactgtaaatattaagaaa

SEQ ID NO: 547592 - DNA, 956 bp, Homo sapiens
catggtggctcgcgcctgtggtcccagcgctttgggaggctgaggcgggcagatcacggggtcaggagatcaaaaccatcctggctagcgcagtgaaaccctgtctccactaaaaatacaaaaaaaaaaaaaattaagccgggcgtgggtggcgcggatacctggtgggccccagctaatccgggaggctcgaggcaggagaaggggcatgaacccaggaggcgggagctggtagcagagcccagatcgcaccactggcacagtagccggggcaacagagttgagactctggtctcagttaaaaaaaaaaaaaacgacaaacttgggggacgcctttctatcccccatggtgggtgaccatccccttaagaaaggaaatttttcaagaatcttgcaaccccctatcttttattaatatgcgcttaccgaaaaagaatataaagtggccttacaacaatttaattttgtacccaacatgtgggttaaaaaaagtcttttcacaagggaaaccttttaacacactggtgttgacaaacatttggacggggggactcttcaaattcggtggggaacaggatattacgggcgcatatgggcgtcgagaaggaacttaccactgtggtggccacgagcatgtggggggcgttacccacgttgtgagaactcccccccgccacttggggacaggggtcgtaacacgagccacgaaacacactttgaggggccggaggattccgggacacccaaggtggggccaacagtgggggaacaccagacctcctcataaaagaagtgcgagaaactacgccagggtcagcggggcagtgccgtgaaaccaacactacctggggaggcgaggacaaaagaaattgctgcacgggggcgccaaggctggcacgctcagaatggtccagtgaccggtggaataacagacacacgcccagagaagagcaaga

SEQ ID NO: 547593 - DNA, 99 bp, Homo sapiens
cacgccggagggtcgcacgcgggttccagtgtgattgctggagtgtgtatgccaggaggctctccgagatggggtcgggtcactgcctcatccaccgga

SEQ ID NO: 547594 - DNA, 285 bp, Homo sapiens
  misc_feature (37)..(37): n is a, c, g, or t
  misc_feature (65)..(65): n is a, c, g, or t
  misc_feature (81)..(81): n is a, c, g, or t
  misc_feature (83)..(83): n is a, c, g, or t
  misc_feature (98)..(98): n is a, c, g, or t
  misc_feature (143)..(143): n is a, c, g, or t
  misc_feature (168)..(168): n is a, c, g, or t
  misc_feature (170)..(171): n is a, c, g, or t
  misc_feature (200)..(201): n is a, c, g, or t
  misc_feature (265)..(265): n is a, c, g, or t
  misc_feature (268)..(268): n is a, c, g, or t
tccccatggcgctgtggcgcggctccgcgtacgcggncttcctggcgctggccgtgggctgcgtnttcctgctggagccananctgccaggctcggcnctgcgctctctctggagctcgctgtgtctggggcccgcgcctgcncccccgggacccgtctcccccgagngnnggttggtcggcagcttgggacgcgtcttnntctgtgctgccaatccggtgctggcgccgcgtggcagtgggagtcaaatgcatgtgttgatgtngtnctctcaaggggtgaagc

SEQ ID NO: 547595 - DNA, 953 bp, Homo sapiens
attaaaccgtctatatgtcagattgatgagtgtagttatacaagtatatgctatgatacaacagagtgtagtatgattagctgtagatatacttaactcatgatatcgatagggcgatataacgggtctgtccatagacttctcctaggtctcgtagacttcccccactagctgatgcgactagaagtacgtgtctttgtacctgagtgggaccccactagttggaggcagtagtaactactactgtaaccctctctttaggcccttgtagcatacaaccataaatagagcgttcatatgctcacagacattatctagcaaatagagatacaaaaaacattattggatagacacgtgcacattcgtcaactcagtggaatcattgtactaactcagagtaaatagcagtcgttatgtactgtgtacacatgcgaaattatcctccatcacagattcttctcatgagtcgagaagtttcaatgactagatactggtagtaatgtgaaggatgaccggatatctcatcccatcgggctgaatgacgatcataaagcaacaagcagcagagcccgaggaaacacgatggactccaatctggggaaggttcttaggtgagttctgtggtcccgggaacatgtggagtgacgatgtgttcgatctagtgtaccatacggcgtgtaaactggcatggtagttgagggagacgtggcactggggagcctgggtgggccctccttgtcttcatgggatctgcaggatacccctagcccaggggcaccgcgttaacaataaatgcagttgctgcccctaacatttagggaccagcgaggaactgtgcctaaccttgacggttatcacaggggcaactcgaggataaaatcaggagaaaactgtactcgtgctccgggaacacaggcgcggtttaccattccatcgacaaagtaccctactag

SEQ ID NO: 547596 - DNA, 199 bp, Homo sapiens
tcaggctgcaaacagcagcgagtgtattagaattccagcctagggctggttgcggtggctcaggctgtcatcccattactttgggaggccgaatgggagggatggcttgaggcaggagttccagaacagcctgagcaacatagcgagaccctgtctctgttttgtgtgtgtagtggttgggccctcatgccaagggggt

SEQ ID NO: 547597 - DNA, 136 bp, Homo sapiens
ctctgtgatgccaagtgtcactatatcaagcttgtctttattgacagtgcaatgcactagttctgtggtcgttagatctgggagtgatctctagtctaacacttgtttccagagctcagattaggcaggattgttt

SEQ ID NO: 547598 - DNA, 135 bp, Homo sapiens
ccttcccccacatgagtcacattgggcgtgggcactttaatgcttttaaatcaactgccagaactttagtccatctacaaattcagtgaaagagtgtaatcgctcaaatccctcttctccgtgtgacaaagctta

SEQ ID NO: 547599 - DNA, 945 bp, Homo sapiens
cttttgttttcagcctgtacttgtagtgactgctttgggtgggtggtcccgtgtcgggtctagcgggtcgatggctcctgtggcgtttttgcggtccctcgcagttttcctatgaggtactgtcgtcctgcgtttcgctagatactcgtggcgtggtctgtgggctgtaggtacctgtgagaccctgtttagtgcttgtgctctgggtactatcacctcttcttgcggtcaagctttttgcgcagtccctgattccctttgccatgtgccgggacagcatgtggctcatcgccttctgcctgcccacgggtttctggcgattatcatggttaaggccagtcacaccctggccatagtgacaggtttttaattgggtactcttcagaccgatctaagtagaagtcactgctgcatagtatctcatcagattctctaattgctgggcaaatgtaggtttctacaacatattgtttcagtgttcaaataaactgaaggactcaacagtacaatttgagactatatccttcctagtgggttagtgtgaaaatagagtttggctgattcgtcaaatctctgccagccctgcagtaatctccagggcctcgttgtatcgtatcagacattccatggatgattcctggggaaggaagacgttgcgctgctgtagtatcctgagtctggggctgagataatgtttcatgggaagggaacatctgttctttggatgtaatctctcattcggtgagatctgctctgtacatcagactatactctgcacttgctaccaacgttttctatactcagaatatatctgacaaggatggtattgaatctaaaacccaatattagtttttattaaactcatgggaaggctaatatattccgacgtaaattattacatatggttaagttaatcgcatgtaattatattcatcgtaatatgat

SEQ ID NO: 547600 - DNA, 674 bp, Homo sapiens
cgaagtagtaaaggggacaattggtcaggaggaggcaaacagagatttagggtacaaaggcacagagtaaaagagcaaaaaggacaggaaaaaggatatagcagctgacgaaaagtatatatatatatatatagacatatatatatatatacatatatagcgtgagatcgaacagagagtcacctatgcagaaagacagataaatacatatgcatatagatatatacataaggtcgagaagccactatcagccagaggcacaaatcagaagacagagagtagagtacgagaatatgcgaaaacaccaagtagacaagccaatgattgcaaagggaacgcaagagacagatcagacaagagttgcatcatacacgacatgacaaggtagaggtacacatgcaatggaagaaataggggacagaagtaaagccgtgtatagaatcagtcaaagaaatcacagggacagagatacacacgacggagcaacaagagggcagacatatagatcagcaaaaaacaaagaaagagtaaacaaatacgaacagtctctctctgtctctgtctctcgctcgctctcacactctctctctctctctctctctctctctctctctctctctctctctctctctctctctctctctctctctctctctctctctctctctctctct

SEQ ID NO: 547601 - DNA, 375 bp, Homo sapiens
tggtattcagatgcttaaagaaagcattgctgctacaaatatttttatttttaaaaagggtttttatggaccaatgccccagttgtcagtcaaagccgttggggtttttcattgtttaaaaagtcccctgtaaaaggggcattatttaggtttttttttttgcattcccgaaaattgtatgtattgtataaaaaacgtttggcccttgggttatacccctggtatatttaaacttacggggttttttgtaatgtaaacccccattttaatggacggtaattaacagggttataaaagggacaatccttccctcatcccatcccccaactttttttgggggtgataaactgattttggtttgcaataaacccttga

SEQ ID NO: 547602 - DNA, 905 bp, Homo sapiens
gaaaggggtccacaaccgccgtggcagggagaaacatatagggcggtctcaagaaaggtgccggggctccccccgcgactccgcggtgtctcacgtgaagacgttgacgacaacggggggggaggaaaaatcccgggacaaaaaagggccacaacagggcgtaaacacaggggaccccccctgccctcccggacggtgagcgcccgctgcgcctctcgggcaaaggaaggacgccttaattattatagaaatccgttaggcaaaccgtgcttccgcgcgaggggagaaacacgccccgttggagagcagcgacgtctccccacaaaccatggccgggggagggaagcttttgtgggaaggccggtgtgagcagcaaaggaggttttatgttttccccttgagacatccctgtgaaactttgtcactccgtagattgccccgcgtataacatattcctggaacagcgcactcctgtgcaatgtcagtctgtgagcaaaagcagtcttacaaaaggccagacgtgcgcatagacacgccaccctcctgttgtgggaggtaacgagttatttggcagaccccctccccgccccgccccgtcccccaactggtcagacaacgggtatcaatatgactaaagatgtgcacctcttatttatccagggagaagaataaagtcaccccgctcttagtgttggcaacaagcgacaagtagatacataaatagtgaggcattgaaggtgctgcgtggcgacctttacaatagttgcgaaggaagtgacaggtactgatgtcgcctggatgacgccgccgagatctaggatgcttattaccggacttgggcaacaacttttcagagacgacttacacgagtctttgaacaggcattgataaacccgcacaacatg

SEQ ID NO: 547603 - DNA, 749 bp, Homo sapiens
  misc_feature (64)..(64): n is a, c, g, or t
  misc_feature (541)..(541): n is a, c, g, or t
cgacccacgcgtccgatcgcgagtggccgcccttttgtttgttttttggtccgacatcttgacnaggctgcggtgtctgctgctattctccgagcttcgcaatgccgcctaaggacgacaagaagaagaaggacgctggaaagtcggccaagaaagacaaagacccagtgaacaaatccgggggcaaggccaaaaagaagaagtggtccaaaggcaaagttcgggacaagctcaataacttagtcttgtttgacaaagctacctatgataaactctgtaaggaagttcccaactataaacttataaccccagctgtggtctctgagagagactgaagattcgaggcttccctggccagggcagccctttcaggagctccttagtaaaggacttatcaaactggtttcaaagcacagagctcaagtaatttacaccagaaataccaagggtggagatgctcccagctgctggtgaagatgcatgaataggtccaaccagctgtacatttggaaaaataaaactttattaaatcaaaaaaacnaacaaacacgaaaacacactacagaggccataaaaaattagtacgggatatgcagagacaaagcaaggaaacagaagcatgggccaattggaccattagctagaatccttagcccaaagatttctatgtccaacagttgaacaatcatgcggagaccccctattaagagaggcggataaattcaagaaagcaggttaaccttggataa

SEQ ID NO: 547604 - DNA, 1051 bp, Homo sapiens
gagagaactagtctcgagtttttttttatttatttttaaaaggtttcatctttaatgaaatgacttgggaaataccgtacattcccatgacaccaatactacagtttccggagtcacagtaagatacccagaatttacattccggtaacttaatatgaatgtgccaacatgtgttcaagcagtaatttggttacagtggcaaacaaaactcaaataagcaaccattcaaacaaaagagacccatagcttcagacaaggcaaatcccgagggatagcattatgagaacagcgtgcggcttcagcgaagggtttctgggctatacccaatgataagggtctgccaaagatctggtcccaataccagcaccaaaaccagccatctcctactggttggcagcaccttgcaccaataatattgggcagcagttatcaatggtctctggctgattggcgactgggtctggaaactcccttgggattagctggagaacacaccattctgggcgccccattaaatcaccggtagagccctctccatgtcctattagcctcggtgtcgagataccactgattgcagaaatgggtctgtatgcaactcgggatccagttcggatcaaagagggggtgcaggcagagctgtggcgcaggaaaacatcttacactcttcggaactgcgcggctggaaatctggggtgacaggcgacgtgggctcctcatcccggtatccaccatctatcccaggaggcggcggcggccacgggcctgcggcaaaggtcgaagtctggacggagcagtgaaacaccttgcacaacgcgtgaccaggccagtgcgtgtcccgaggctgctaacccaaaacctaggggtgaacccaactgcggatgaacgaacttgacgcgaaataacgtgcaaaaactgtaccctaatccccaagaagatactgacacattgaagagaatgaggcccacgatgtaggacccacaaaacgaaggcgttcccgcgccccccggcaagacaaagggccccacggagaaagctcatgcgcaacaaaccg

SEQ ID NO: 547605 - DNA, 375 bp, Homo sapiens
tagaggatcccgtattgatctggatactatgatgtagcaacttcaacagacagttttgtttcaaagaaacatgttggaagatcaaggcacaggttgcaaggaaagtgtactgcagttttaccgaaagctaatatcgttggctaccatgacagcatcatgaaccctgactataatgtggaatttttccgacagtttatactggttatgaatgctttagataacagagctggccgaaacccagttaatagaatggtggctggcagctgatgttcctcttattgaaagtggaacagctgggtatcttggacaagtaactactatcaaaaagggtgtgaccgagtgttatgagtgtcatcctaagccgacccagagaaa

SEQ ID NO: 547606 - DNA, 412 bp, Homo sapiens
  misc_feature (64)..(64): n is a, c, g, or t
  misc_feature (358)..(358): n is a, c, g, or t
  misc_feature (368)..(368): n is a, c, g, or t
  misc_feature (376)..(376): n is a, c, g, or t
cgacccacgcgtccgatcgcgagtggccgcccttttgtttgttttttggtccgacatcttgacnaggctgcggtgtctgctgctattctccgagcttcgcaatgccgcctaaggacgacaagaagaagaaggacgctggaaagtcggccaagaaagacaaagacccagtgaacaaatccgggggcaaggccaaaaagaagaagtggtccaaaggcaaagttcgggacaagctcaataacttagtcttgtttgacaaagctacctatgataaactctgtaaggaagttcccaactataacttatacccagctgtgtcttctgagagacttaagattcgaggctcctggccaggcagccntcagagctcntagtaagnctatcaactgttcaagccaagctcagtattcaccga

SEQ ID NO: 547607 - DNA, 709 bp, Homo sapiens
  misc_feature (501)..(501): n is a, c, g, or t
tattttaaacctgcgggttcaggtgcaatgacatatcatccgtggcccggttggcttctaccaataacgaatgacaaagcaagcaagcatggacgctggaaagtcggccaagaaagacaaagacccagtgaacaaatccgggggcaaggccaaaaagaagaagtggtccaaaggcaaagttcgggacaagctcaataacttagtcttgtttgacaaagctacctatgataaactctgtaaggaagttcccaactataaacttataaccccagctgtggtctctgagagagactgaagattcgaggcttccctggccagggcagccctttcaggagctccttagtaaaggacttatcaaactggtttcaaagcacagagctcaagtaatttacaccagaaataccaagggtggagatgctcccagctgctggtgaagatgcatgaataggtccaaccagctgtacatttggaaaaataaaactttattaaatcaaaaaaacnaacaaacacgaaaacacactacagaggccataaaaaattagtacgggatatgcagagacaaagcaaggaaacagaagcatgggccaattggaccattagctagaatccttagcccaaagatttctatgtccaacagttgaacaatcatgcggagaccccctattaagagaggcggataaattcaagaaagcaggttaaccttggataa

SEQ ID NO: 547608 - DNA, 326 bp, Homo sapiens
ctacctattgagttggacgagagaaaggatggtgcatgtgaaagatttaagatacgccaccattttagtaacccactcttagtacatcttcagttttcagtatgctgagaacctcacaaaatggaagtggcccagggtttttctagacctttagcagatcctgatctcttgttctctatttgtttggacacccaaaggcttgactactagggtggaaaacactagaatcagcgaatgtatcactgatctgaaaagccctcttgccaccgggaaggggaagaaaggcagggtttggtgtttgcatgagttagtatcgtccaaccaat

SEQ ID NO: 547609 - DNA, 238 bp, Homo sapiens
  misc_feature (104)..(104): n is a, c, g, or t
tttttttttcattgttcttgttcaattttattggcattgcgttcatctctttacagaagaactcagcccacaccctagaatgtagaccttggaaaaggagaggngctcgtaaggcaagctacatgcagggcagatcctaggaggagcagactgcaggtcacaagaagagtatatatgccaattgggaggggaaggaagtcctactagatacacacctgagagcgctctagacagtatc

SEQ ID NO: 547610 - DNA, 626 bp, Homo sapiens
acccggaaattcgcccatttatggccggggcctctttttccgtaatcttcgacgaggctgttgagattgctggggatctattagctttcgaatgccgcctatcgacgacaagtataagaaggacgctggaaagtcggccaagaaagacaaagacccagtgaacaaatccgggggcaaggccaaaaagaagaagtggtccaaaggcaaagttcgggacaagctcaataacttagtcttgtttgacaaagctacctatgataaactctgtaaggaagttcccaactataaacttataaccccagctgtggtctctgagagagactgaagattcgaggcttccctggccagggcagccctttcaggagctccttagtaaaggacttatcaaactggtttcaaagcacagagctcaagtaatttacaccagaaataccaagggtggagatgctcccagctgctggtgaagatgcatgaataggtccaaccagctgtacatttggcgttgtttggacgtcttggaaccagtccaaatatggattcgacacaggtatatagcatgcctcccgcaaattaggggcaactctgtgccatatttagcccttttaaggaggtcctggttacacctc

SEQ ID NO: 547611 - DNA, 326 bp, Homo sapiens
ggctgatctagaggatcccttcatgtccaggcccttcatgcgtctttgcacggttagatgtgcgactgtaaactttgtgacattcttcacatttataagccttctctccagtgtgagttcttatatgttcaagtgagtgtgaagatgtagcaaaggctttcccacagtccttacattcatagggcttctctccagtatggatttttacatggttatgtaagcttgaggaaacagtgaatgctttcccacactccttacatttatagggttttattccagtgtgaattctaaagtgattcttaaggcatgaaggccctcgatatgaa

SEQ ID NO: 547612 - DNA, 506 bp, Homo sapiens
cacgagggatgttggagcgctttcaggactattgtggaaaaggaaatatcttcaaataaaaactaaacagaagcattctgagaaacttgcttgagatgtgttcattcatctcacagaggtgaacatttcttttgattgagctgttggaaacactctttttgtagaatctgcaagtggacatttggagtgctttgtagcctatggtagaaaaggtaacatcttcacataaaatatagacagaagcaatctgagaaattttttgcgatgtgtgcactcagctcagagagataaacctttcttttgattaagcagttttgaaactgtctttttgtaaaatctgcaagtgcacatttggagcgctttcaggcctattttggaaaaggaaatatcttcgcataaaaactagacagaataattctaagaaacttctttgtgatgtgtgggtttcatctcagagagttgaccctttcttttgattgagcagtttggaaacactctttttgtac

SEQ ID NO: 547613 - DNA, 965 bp, Homo sapiens
cggatgtatggcatacgtcgacccacgcgctctgctcttaccctgcgccggctccagctgaccaggaacggggtgggctgaactgaggcgggggcgaggtgagtgcccgacatcttgtccgactcctgcgggtgacacgagccgtgttctctctgtgactggtggcagcgctgcggtgcccgaaccgcgccccaggcctggcatggctgtgcggaatgtgagcctggtgggggtagtgggtgtgcggtggtggtggtgggtgaccctccggctcttgtggggtcccagtccccgcctggctgctgagcgggtggggtggtggaggagctgcagagatgtcctggccagatgcctgactggaccgaatcactgccgcccagcacagtgtcaccggctctgcgcgtatccaagacagtatgcaatggccacgacccacgagatcatggggcccaaggaaacaatgcaccctggactacttaattcagttgcacaaatgagatgacatgttgaacatcccacagttggcagacagtttactttgaaagaactactaatagtagcttgggtggtggtcttcacaatctctcattacaactcatcatttgatggtgtatggccaactgagcgtttcactccagctatttggccttcaagaaaccacgttgtataacttaagcaaattctttggattccacgtggcattgcagaggatatgacatgttctaccatttattagggcggtataggtacgatatttcaaatgagaaaggcaggtttcgtacccgaccgacgttgcgctttgcattgtcacccgacacgctgacacacgagggtgcttgactgggagctcatgcaaacccatggagaccacagcaacaaacctcctagagcaactgtcggccaatattcctcgaactccactgtggtcacctccttgacatgcatggtaatcgcctggacttaca

SEQ ID NO: 547614 - DNA, 595 bp, Homo sapiens
ggacttcatgctcggcgccaaatctgatggtgagaccattctaagaaggcctccagtccatttgccaggagcaggggaatggctggagtcggttgcactaccgtggcaggaccatggcgtatttagcaagctacagcaaaacaatgaacggcgagctatgtccagtttcgagaagtttagccacatggattggtggttgctggaccttcagagttatgatggtgatgcgcaaggcagagaagagatcgacagtattttcgaacaaagtagaggaaagaactgaatagaagtgacgtcatggacagatactggtgcggcgtgaaaccgaattaccagccatagtgcgaggaggagccatcgacagatactggcccaccgccgacgggcgcctggttgaatattgacatagatgaagtggtatatgacgaagattcaccttatcaaaatataaaattctacactcgaagcagtttggaaatattctcatccttagtggggatgtcaattggcagagagtgatttggcatatacccgggccatcatgggcagtggcaaagaagattacactggcaaagatgtactcattctgggaggg

SEQ ID NO: 547615 - DNA, 426 bp, Homo sapiens
  misc_feature (44)..(44): n is a, c, g, or t
  misc_feature (91)..(91): n is a, c, g, or t
  misc_feature (173)..(173): n is a, c, g, or t
aacttaaccaaaaatgtgtaacattgagacttccatttaatccncctgtttaaccaatccctccatctgtccagaactttgcctaagaaanaataaaaatataagccagtccaaagtaccatattttgaaggccaagcactttatatagaagagaatctctatggcttttacncagtctgtatgccttttataattccagcactttgggaggccgaggcagtctgatcacctgaggtccaggagtttcagaaccagcctggctgacatggtgaaaccccatctctgctaaaaatacaggaattagctgggtgtgatggccggcgcctgtaatccaagctacttgggaggctgaagcaggagaatcgcttgagcccaggaggcggaggttgcagtgagccgagattgtgccactgcgctccagcctg

SEQ ID NO: 547616 - DNA, 339 bp, Homo sapiens
  misc_feature (288)..(288): n is a, c, g, or t
cttcatctcccttgaataatacatgcggtccacttcagttaggcctagtttctgggcacagcggcttccttctcagagtctaccagcccgaagccaacaccctggtcttctaggactggggctgctaactccaggatcagctcctccatctcaaatggtcttggtgaggcctggtcatcctcggggggttcagggcagaggagtgccagcacctcatacttctggaacacattctggtagttcttggcatggacatggatcacagggtccacaccatcgtactcaggnaagtccagcccttccggcccctgtacccctgaagggagcccaaagggtacc

SEQ ID NO: 547617 - DNA, 1493 bp, Homo sapiens
tctttgtccgtctctgcgttcctctttttcttgctctttgttttctctctgctttttcttcttttgttttcttcttctttttcttcctctcctttgtgtttcttgtcttctctgttctttttttttcttgttttgcttttgtctctctcttcttctctttgctgttccttctttccttttttgtcttctgtgtcttcttttctttttcttttcctgtcgttgttgctctttctctcttttttctcttggtttttctgtgttgtggttccttttttgtgttgtgtatctcagttgttttcctttgtgttctttgtctgttgccttttttttctttcgttagtgtcgtttgtgtttttttgtttcctttttttgttttcttttgcctttgtctggtttctgttgtgtggtctctctttgttcctttgtgtttttgtgtttgttgtgtatgtttattggtgtgctgttccgcttctcgtttaattgttgtgccgtcgttttctgtctatgtttcttttgtttaggtctcttgtccttgtatttttgtactcccctatctccctctgccatgtgtgccctcttggtggtctttagatgcttttcttggcagtacgggctcgtttttccccgtgtttgctcttcctttggtcctctgtccttttattatgtaatgtgtctacgtgttctgctctttgtttgggttcttctgtcttgtcgtcttcctggctgtctgtgctgcctgctcttggtgttgtgtatctggctatgttccttcattgcttgcctatatcttttcttggactgtgtgtgttgcttgtttgtggattggtcctttgcttgccagacggttttctccacgtgtccctttgttgttgctgggtatccttgtgttgcccttctttcccttgcaccgttattcttgttctgcttttccatatgtggccactcctgcttcctaatgttcatgtggatcttgcatgtaatgcccacatggtgtgatgatgttctaatatatgtggcataagagtcactttcttaaatatattatgaacatcagggtcttttgggacctgcaggtttcggcacttgatgtttgcaagcagtgcgataataacctgaatggatcggtgccccctatgggttctgaccctagtatgtagaatttcctttatctagtatctttttgtgtctgtgtcttccctttctggcttctagcgacatccatgtccaggtgtatggtgcctgggttcctctgttatcaagtcatggagccctgtagggagacccactccttttgtaccaagtacctgaatgctgcgacaatgtcagatgttttgttacaacattttatattagtttttaatgtcagtggcgatctcggttcctggggctgacagccagcctgggactttatgtaagaatttttgggtgactcacattcgatgtcgtttccgtctgccccctcttaaacctctgtatctacggccttacgctgc

SEQ ID NO: 547618 - DNA, 576 bp, Homo sapiens
  misc_feature (537)..(537): n is a, c, g, or t
  misc_feature (559)..(559): n is a, c, g, or t
cattcgatccggtaccctatgcgtgtacaacatttattttcttcctcattctcactaggaataccttcatcttcatctctgtacagggttgttgattgtgtcctgaatgatctgaatccagctggtttcgttcccccttggaggctggcttggacttctaccatctctggatctgtcatccccatgctgatcaggaataaacctttctcctcatgtgccacttctctcgcaatcagcttctttaaagagatcactgttgacttctggtccaatgatgcaaagatgtacttctggtctttttcttgaaggaaaactaaaatgtcagtgagaagaactgcttgaacctctttcaaccttcctgctgcattcttcagaaacacactcccaacacgtacaagcttcttccgtttcaaatcttccttggcaaacatctgaccactcttcatcctcatgattgacttgctatctgtctttgtataaatctcattgagacgcactttcttttcataacttgccactttgctgtctacagctccnatcacatccttcaccaggctcnaggactgtgctagatct

SEQ ID NO: 547619 - DNA, 904 bp, Homo sapiens
tgagaagtgaagttcattttatgtgatctacatgcgtcggtaatctactttggtagataattaagattattaaaccctcatttaaatgtgacataaaatacagctttaagcacataaatataaagcagcttccatcaggaacatggagcaggcagggactccagttttacagaattactgagatttctcagttgtaaaacatgatgtcatcctgcatgcctcctggaattctccaatggggtcgccaaacaacaaatggagaaaagaaagttttacttcctgggcattcattctaccgtttaaactagcaaagtaccactacgcaacacacacgcgtcttgaccccgcgttcccgtctttgtcttacaacttctggcagtttcagagcgtcagcaggctacccctggtttcctaggagagctcggcgctaggcctgaagctccccactcacaccacgtctgctaggcacgcccaggcctggaccgggagacagcccctcacccatgcctgggctcccggccaacgcggaccatggcatgcgctgaacgtcagcaccgcgtgccgctcagaggtgaacctcactccagggccccccagagcgacagcccctacaccccctgaccctccccaaccaaacaaccgccggccacccccaaggccaagactacccgcagccaacctgtgccctcgcccacctgccgcgcactgcctccccgtcactgcgacacgctgcgcacacgccccacacacgtgcccaagggacgggcacaccccccgcacgacgcccacggagagctgcccactaccgcacacacgccgcgcccgcgccctgccaccagcctaccaggggtcacccacgcacgcccaacccgcacacacggcccaccgcagcacggccccacca

SEQ ID NO: 547620 - DNA, 431 bp, Homo sapiens
gagagccaggagattcaggatcagctaagctacataatagggagcacatctctaccaaagaacaacaacaacaacaacgacaaaaagccaggaatgggtgatgatagacacctagtgtcccactactggaagacgataagatatgggagaattgcttgagccacaggggttagaggtgcagtgaactatgaccacgctccagcccagggcaatagagcaagacctatgtctcaaaaaataaaaaataaaaaaaatacctataatagaataaaatgataaagggagaaattttaacatacaggaagcccccaacttaaaatcgtttagacttaaaatattagacttaataacagatatatcaagatgtaaccccatcataaatcgaggagcatactatatatataatctaagtttcaaatggcaatatcgaa

SEQ ID NO: 547621 - DNA, 347 bp, Homo sapiens
gttccttgacaacctgacagaatggagctagaacatgaaaaagcagtacacgcggaaaacacttcagctctttactagataataacataagagaaatgtcaagtcagaaaacatttatgacaagaatcaaaattactctcatcctaaagaaagttctcatatttgactagattatacttcctgcataaagccccatctattagaaaaagtaatacacacagaatgcagaatatgaggtttactttgaactttgcaaatccttgtgaaatgttgtctacaaatttctatgtaaatacatataatggggagacactggaatgaactagatcttttcaattccaaaggga

SEQ ID NO: 547622 - DNA, 355 bp, Homo sapiens
ccacttgggccagtgtctccctttggtccaggttttccaacaaagccattgtcccctttggggccaaatgggccagcttgtccagggatccctgcttgccctgcaggtcctggcaaacctgtagcagcaaaaaaaatgggcaaagacctggccctagacccagaaagggccagcctcctgcagggtcagcccctagcattcctttaggattttgcagagcatgagacttcccccgtcccccccccagggccagtgggggtccaggaaatggggatcaacatcccccttttataaatgaggaaaaagccttccagagttgggggggggttaaagccaagacctgcctgcccttcca

SEQ ID NO: 547623 - DNA, 399 bp, Homo sapiens
cccatgagcacatttttgcaatggtccttatgaacgactgtagtgcacgagacattcagatgtggtagtatgtccctctcgcaccattccttgggacgagttctgggaccactgtctttccgtgggtggtgcccatggatgctctcatgcccttggctgtgtccaacccgaagcatgaccccacgccactgccgtatctgtgccatgacgagccctacacattagacatctacctctctgataacctgggagaaggaatgagccaggcgtttaccatatgcatgtccaattttaagtacatgtactggacgatgctgcagcagctcactcaccactctgtcaacggctgccctgcggccggtggacctactggcttctgggaccatcagcgggcccggc

SEQ ID NO: 547624 - DNA, 112 bp, Homo sapiens
gggtggttcaagtctttgctatagtgaatgtattttagtggagatgggttcactgtgttagcaggatggtctctatctcctgactcgtgatcgccgctcggctggattacag

SEQ ID NO: 547625 - DNA, 538 bp, Homo sapiens
ggtgttgctggcagaaatggtgttctagacgggcggcatttgatctctgtccttgtatgtttatgtactataaggtttaggaaaaacacacatagaaaaactatatccggccaagtgctgtggctcagtcctgtaatctcagcactttgggaagctgaggcaggaggatcacttgggcccaggagtttgagaccagcctgggcaacatagtgagacccccatctctacaaaaaaaacaaaaaaattagtcgggcatggtggcatgcgcgtgtggtcccagctacttgggaggctgcaataggaggatctcttgggcccgggaggttgaggctgcagtgagttatgatcgaaccattgcactttggcctgggtgacagagtgagaccccatcattaaaaaaaaaaagactatggtaaatatcaggggaataagggatggcctttatagtgctgtgactggccaatcatcttaaaattaaggccggacgtgggggctcatacctgtcatccaccattctgggaggccaggcaaacttcag

SEQ ID NO: 547626 - DNA, 141 bp, Homo sapiens
tggcttctacgaccatgtttcctaaagcaccctggcctgagcggtgagtcccaccacctcgaactctgggaattcgagccacagcttctgccatgtaccccctgactcagcactagctctgagtataggccaccggtctgt

SEQ ID NO: 547627 - DNA, 119 bp, Homo sapiens
  misc_feature (88)..(88): n is a, c, g, or t
gaggacttgcagatcacttgcccaagtggctccctagctcctggctcctggcccgggtcctgaaactaaaaaaaaaatagagctcccnctgggtgtgtccgactggaggcagggacctc

SEQ ID NO: 547628 - DNA, 339 bp, Homo sapiens
ccaagataaattatgggtcatgttaaagtaatattacacaaattctatactatacatccattacctctaccaatttggctctgagtcctctttgaagattcagaaaccctaaaaaaacactcatcttcattgctgaaaataacattgtaacaaagtcctaaagcaagctgtgatggtgtaggttgtcaacaagagcttatgaggactgagatgagcaatccactgtaattttatactggtcaagctgttgtcgcttttacaattcatcccttgcatgtgtggaagaagaaagagcagaagataaaatcacttccacctggaccactgctttactttatc

SEQ ID NO: 547629 - DNA, 229 bp, Homo sapiens
cgtgtacactgatcggaggtgtgtacgagtccgacgatcagacgcggaacgtgtcgcgggcacatcctgcagatagacccgatcatcgactccatgaagtcggcgcggaccaagcgcgtactcgacactgctggacaacacgctggcggagaaccgacgcctgacgcactacaagagcttctggaaaaaccttcggccatgggcccgagacgtacgggtacccgacgct

SEQ ID NO: 547630 - DNA, 144 bp, Homo sapiens
cccctcagttcctgcttcttgaaaggactctcgttggggagatagagattcagaaggcaccttgtgaaaaggacctgaacgcacgattcttgagtggagaagaggcccgccgagcataaggtagtggtagacgtgcaggcgagg

SEQ ID NO: 547631 - DNA, 176 bp, Homo sapiens
tcgccccaacaaaattgtaaacgttgttaggttttcgtgtaagactcttgctgtatcgtgacagctgtgattggtgagttgaccgtcctggctgccagttacactgcgattgtaacaacatttttactttctgtacaacaaggaaaagctttgtaaataaaatcttaacattttga

SEQ ID NO: 547632 - DNA, 208 bp, Homo sapiens
aggatatccctccccaactcccgacactcagcagactggtttttaaatttttttctttctggttcattcttacaaggtattttttgacttaagaatgacatttttagaggcatttcagagccaatgatgaaatttgctttagataattattatattattataaaaaaagccatattattttgaattcaaataaatttttatactggta

SEQ ID NO: 547633 - DNA, 259 bp, Homo sapiens
ggaccggtatgagtggcatgtgaacataaagtgagcaggcgaataccatgaggccctactttcaacgtttgaaatgattgaaggaataaaccaacataggtctagctgttcatagtgcctgggattttacttctgtaatggtactaaaatatatactagtatcgtgctgggtatttgggcacctaatcttcctaaatttcttatgtcttgatcagattctggcctggaaatcgatttcacaagtcatacctctcggcgg

SEQ ID NO: 547634 - DNA, 166 bp, Homo sapiens
cggtgaggttgtctagtccacgctcgggagccatgccgtccaagggcccgctgcagtctgtgcaggtcttcggacgcaagaagacagccacagttgggcgcactacaaacgcggcaatggtctcatcaaggtacacgggcgcccctagagatgatgacgccgcaga

SEQ ID NO: 547635 - DNA, 293 bp, Homo sapiens
tctagaggttccaggcaaagctcctacagtatagtatagtgtctcacttctcacaactaactttaaaaagcttaacttacctaaaggatttaatgacaatataaactagaatgacaaacatggagaaatattcttggcatcaggagctagcaccttggagttttccaaaaaagccgtctccccagtgtgttcactgtgactggtggggtaaaagattccacatttaacatacttaaaactacttaaaacttagataaacatcacttctgaagtaatactaccagaaatgttaa

SEQ ID NO: 547636 - DNA, 115 bp, Homo sapiens
tgtatgactagggggacctgggacctcaccatgctagccaggatgtctcgatctcctgacctcagaatccgcccgcctcggcctcccaaatgtgcctggcctgacataatatttt

SEQ ID NO: 547637 - DNA, 160 bp, Homo sapiens
acgtacccacctgtgaaaggaaagttgaactgggggttggtctggcctactgggctgacattaactacaattatgggaaatgcacaagttgttgggcctcgtaccggggtggtcaggtgtggctactgtcggtgtaccagatgctcgacattctgtaatc

SEQ ID NO: 547638 - DNA, 299 bp, Homo sapiens
ccgctcgacccccttgtcatttcgaacatgtaatccggaacagaggcgagtgagagagatcgccatggcggaattggagctgcccctcgcctgatggtttgttaaaagcctaatctgtcgatttgttcgtctgatttgcaacagcatgtggagcctacgcctgatatgccaaactacatggaatggcagagcactgttcaggtcatgtctggtgtgttaggaagtagtttcagtgcaattattttttagtgcagtgaattttatggattacagtggaattaatagctaatggaatttcg

SEQ ID NO: 547639 - DNA, 1458 bp, Homo sapiens
tttgctcccccccctaagggggtgccccacgcccctggtgttgttagctcacctcttcgttcactcacccctccctcgtgttcctgtagtgtgcttcctccccgctgccgtaggtagctaacgtagccgtgcgcttgctagcttagtttgctactcactactctccgccctcccccttgcttctactactgcgggcgcagccatctggtctactgtcgggggcgccccctctgtttgtgttctcttcctctccgtctgtgggggtgggctcctacactattgcacacagaccatggtgtgttgtgcgctagcaacactatgtgtggcggtaggtcccaacctatcctctccttgtggtggtctttttttactacgccgctggttgttttccaacctgtgtgggtgttgctattctctcttctggctcagagggttgccctccctcgcttggggttcctcctccccccccggaggtggttgctcccccgacgagtcgctcctctttttctttggtgtgttccgcgccccgatttttaatactgtcctgctccggggtctcacccgtgtgtcctcctgtgtgtggtagttatgtgtctcaacactcctttgtggtgtggaggcctactaacggtggttggtggcccacccctttcttttggggccccccccacatgtggttgtgttcttttgctcttcttgtgccacagagtggtgttccctcccctgtgttttctctttttgtcccctcaatagaaaagttgtgtgtcgcgcctcctccctcgtcgtcgctccctatccgcggtgggtgaatacacccccgtgggtcccacatttgctgttcgattttgtctccctcgcgcccactaaggagctcgcggggccgctctgggaattctgatgacacacacccccctgcggtttccgtgcgtgggtcaccgatgtgctcttgctccccgccctcgtcgcctgccccccccctccctctcaattattgggtgttctttggtggcgttcttgtgatcgctggtgtctcccccagggtgtttccttccccagctcccctaagtggcggctggcgcctccccgctgtcctcccctgtgtggcgcccccccgtgtggtctgttcaccccgcaggtcttgttttctctcccacaggggcactcacccccctctggtcccttctgtggggaatgtgcaccaccattgtcgagaacatgtttttctgacaatgttgcaaagattccgccctcccttgtttcctcagggacgtcacacaaaaacatagtgtaacgcctccaccaaggagggctctacaaattcttgagggtgcggacaatatttctgcttcccttactacgcgggtgaaaaaacatatgcgccccccccccccccccccttttttttttttaaacccacggcggatttttttgaaaaaaccacccccttgtggtgcccca

SEQ ID NO: 547640 - DNA, 717 bp, Homo sapiens
cccagacgcggtacggcatcatcacgaactgggacgacatggagaagatctggcatcacaccttctacaacgagctgcgcgtggcccccgaggagcatccagtattattgaccgaggctccactgaaccccaaggccaatcgcgagaagatgacccagatcatgttcgagaccttcaactcgccggccatgtacgtggccatccaggccgtgctctccctgtacgcctccggtcgtaccaccggtattgtgctggactccggcgatggtgtctcccacaccgtgcccatctatgagggcttcgccctgccccacgccattctgcgtctggatctggctggtcgcgatctgaccgattacctgatgaagatcctgacggagcgcggctacagcttcaccaccaccgccgagcgtgagatcgtgcgcgacatcaaggagaagctgtgctacgtggctctggacttcgagcaggagatggccaccgctgccgcctccacctcgctggagaagtcgtacgagttgcctgacggccaggtgatcaccattggcaacgagcgcttccgctgccccgaggccctgttccagccctcgttcctgggcatggagtcgtgcggcatccacgagaccgtctacaactcgatcatgaagtgcgacgtggacatccgcaaggatctgttgcgaccgcgcggtacgagctcgatcgatatgccgataatag

SEQ ID NO: 547641 - DNA, 160 bp, Homo sapiens
tgtatcggtgtagtatgtagtagtgtgtgcatagtggtagtagtgtagtagtagtgtgtagtggtagctgtgtagtagtgtgtaatggtgtgtgtgtaatgtgtagcatagtggtgtgtttgtggaggtagcattcctgtctgtggaggtagcactagaa

SEQ ID NO: 547642 - DNA, 139 bp, Homo sapiens
atcagcgcccagatctcccgtaaagtggctctgtgacgtcatttctctggtgcttcagttttctcttcgtgtaaaaaccagttagttagatcagttggtctctgaacttccggcaaactaagaatcactaacgtggatg

SEQ ID NO: 547643 - DNA, 240 bp, Homo sapiens
caaaaagtgtgtctcaaacctgctccatccaaaggaatgttcagctctgtgagttaaactcaatcatcacaaagtattttctgagaatgcttctgtctagtttttctatgaagctattccctttactaccataggcctcaaagcgctccaaatctccacttgcacattccacaacaagagtgtttccaaactgctctatcaataggaatgttcaactctgtgaggggaatgcaatcatca

SEQ ID NO: 547644 - DNA, 857 bp, Homo sapiens
agcggagggtgtggtcaggcggctcggactgagcgggagttgccgtatcccagtcgattgtgctgaagtggactgccgtgtcgcttgtgcttctattcagcgcatgggcttcttcgtgatatcgcaggtgatacgaactggcagaactgcgtgaacctctaggccgaggccatttgagaagcgtggattcgtcaggccgcgtcgaggtcgaagagatgacattcgtgcttgcgcagatagttgccgcacgcgttgtcgccgctccgagaagacagaaggtgactccttgtcgcctgcgtagggaacacgtgcaggaacgaagactgtcagacaggctgccaggagagaaacgcacgcgcaaggtcccagatgagagctgaagggtcctgtgaaggcgagcgtggacgtgacgacaacgaggagccacgcaggaatagcaacgtgccttcagcggaagcgcagatcatgagagatgaacgaagaacgttcgagtgaagacatggcgagcagtgcagaaacgtggagcctacaataagtggagagctaggtagaatgacgaaccgaggaggcgagcaatatggctgcgcaacactgggaacgtttggcgagaggaaggtgtatgcgacattggagatgaacgtgctggttgagaaccgacacgaatccgaagagaaccctgcatgtacgagacgtgaacgctgacgtaactttgttcctgagaacctgagaagtgtcaatagctcgttttgactaacagtgttgagtcatttctaactgtaggctagtttattcgttgttgcaatcttgttctacttcaggtacacttggtgtacatggggttaactgggctattactg

SEQ ID NO: 547645 - DNA, 803 bp, Homo sapiens
gctcaaaataaaaagattattcagactctgaaaaaacaaaaagaagtagcaatatttcaaacaacaaaagccatacaaattatttcagtcttccattagttcatttcagtccatgtaatcaactcctgctctacttcatattcatctttatgaacacatcagcctttcaattagtgccttggaagttttctgtctaatccaatggcacactctccaaagttaccagaaacctgcattcaagagttcttttcatgaactccaaagaagtaagccttggactgtagctgattataagtcactttttttttttggagaaggatcagagcaaaacatcaattatggatgacaaaagtcttaagacagccataaagacacagttgacaaatgtggctatttctgtggcttacaacaatttaacataatcattacaacatattttaagacatatcagaattttagaactctcatacaatcctggaacacattttaacaacaaatctctatcagtataacccaaaggaagctaaaaccacctcacacttgacaatgtttcctgtataattcaaacattacaaataagcctaatataagcctaatattgtcactcttgaacttcaggaagcctaatatccaaaaagttagtttaaggtcaaacagtttcgaacttaactttttttccattagtatggtcatatctttcttactaattgtacgttatgtaatctatcacattttttgtggtctgtttcccaacctctatggtcagataagattccacaggcagaaacaatggctcactgctg

SEQ ID NO: 547646 - DNA, 1184 bp, Homo sapiens
taatgtttggtcgtagggcagatggagctttgtataatacgcctcaaactcattctcaacccccgtgaaaaacaatagcctaccccttcctgggtactatccctagtgaggcataattataacaagctccatcggcctacgacaaacagacctaaaatcgctcatggcatactcttcaatcagccacatagccctcgatagtaacaggccatttctcatccaaaccccctggaagcttacaccgggggcagtcatttctcataaatcgcccaggggcttacatcctacattgactatagctggcgcaagcaaatctcaaatctagagaacgcactccaaagtgcggctatcatagtatactcctcttctccaaagggagctttcaagaatctgtctaatctgcccccactaatataagagcttatttaggagtgagacatgttctatagcgaagcgctctcgggtaagactctgcggctctataacacgcacccccatatatttgtaacacctctaatctgtgtggagagaaacatctctctctgggtggctaaaagtaaccaccaaggtgactcctctgggagtccaatattatgcacatgtctccctaaaatgtaacagcggagcctcaaaactatactcagtagcaccagggcccctaaaggacttccctcctaaacattatttgacccagcaaacgaacaaatgggggggcatacacgttacagcccccagcccaagaagtatagacgagagatttataaaagcgcgctcaagtttcacacgcgacgtagaaaacagccgctccaagtggtttcaataccagccagtattcaccgccatttgtctcgtccaaataatacccttaagaccgcggaaattcaataaccggggggggttgccccctcctgttaaacaagaaaaaaacaaaaaaagaagaaaaaccacaacaaggacgcacagaacaaagaaaaagagagaaaaacaagagaccacaacaaccaaaaccaagcacacagaaggcgagaacaaacaaatagggtcagcgcgacaaaacaggaggaaaacaagcaagaaagcaagcagaaaaatagcgacaagagagacggatagtaaaacaagggagaaaaacagggaacgcaccaaaagaaggaggaaaaaaataaaaaacgagggcacctatc

SEQ ID NO: 547647 - DNA, 564 bp, Homo sapiens
tcggggagtgctgctgtggaaggataactgggtgagcttcatggacaccatgctgcagatgtccatcctgggctcgcgcaagcacgggctgtacctgcccacccgtgtcaccgccatccacatcgaccctgccaaccacaggcagaagctgtacacactgcaggacaaggcccaagtggctgaccgtggtggtgagcaggtggctgaggagtcacagctggccggaggcgtccacatctccgggctccacactgagtcggcccgcaggggcagcagggagcatgcaggtgcccatcctggagaagttttgcttcactccccacacggaggaggggtgcctgtctgagcgcgctgccctgcaggaggagctgcaactgtgcaaggggcctggtgcaggcacttgcagaccacaggtgacccacgcaggggctgaagaatggctggtgcaccggactggatgtgtgcccagatcccccgggaaccctcacagaaggaactgccccggacctgtgtcggctgcctgacaggcttcagctcaactgggaacctgacagccatggagct

SEQ ID NO: 547648 - DNA, 176 bp, Homo sapiens
gtactagcttgtgaccggtgttccagtcatgtgagctggtctccatatcatcgtgcaagcgaaccacactgactgtgtagtcagaacccggtctgaggccttcgaggctctgaggtgtctctcttcaccgatcaggtgccggggaatacgctcactggattccatcctacagggct

SEQ ID NO: 547649 - DNA, 948 bp, Homo sapiens
agcgggtgcgtctcgtgccggcggcgtccgccgcgtgacaggacgggctcctggcatgtcgctccggctacgacgtcattcggggtcccctccccccgggatgcttgcggaagcgatacagtcgcgcgacagtacgtgacaaacatgtcaggtgctcggtgacctgtgccccggggggacgcggtggacgaccggagcgaacgccacgctgcttggatttcccaatgttatgaagctggtaagcacgcgtacgaccgctgagagagctccatggagacttatggtacacctggaagtacagtgattccaggaatgccgtcacgagtgtgattccccctggaagcttacttcctaggaacataccgagaaaggagcttaatattacgtggcaacctggccaagtacttgtaaagaaccttggatctaccgatatacaaacctcgacgacagctaggtgacggacgcgtgttgccaatcctccgcacatgataccacgcttgaaggagcaccaaggataccccccgtttccacactctatgcaggcacccaactcgttagcgacattgaggcagtatgggcggtagacgcccgcccgttttaaaccaacccacggaacgaagtttacacgagctatctccccggtcatatatatatagcgtcgagccaaggaaaggggagggctgtgtcaaacccaggcccgttcaagtcgcaaccaaggaccaatagtggtgcttttggcgaacatcttccttcgccgtcatctttgtcgattagatctcccacaccctcccttctgttatctatagagccaccatatccccatcaccaaggttgggatagcgggcaagtttgactagaaaggggttgattgtacagaccgttctactagtaggtttcccaaggcagatcgtattgcaaggttaacctcataggacatattcttcaact

SEQ ID NO: 547650 - DNA, 481 bp, Homo sapiens
ataccggcttactcttagcctcagtaatggcagacgccccaccccccatcaagctccaatgtacccaggtcaactacagactgtagtagctaggcagcgagaatatcaagtcagtggatacttagctatgactatggctctataggggttggaatctgcttaacaagaccacttggctacctggcttcagccccctttccaggggagtgagtggttctgtctcacttgcgttccaggcaccacacaattcgaaatgtagaaattacctgccttctgcgttggtctccctgggcgctgcagactggggctgttcctacttcagaccatcttgcagggaatcacaataaagaatttttaaaaggaagagaaaagcaatcatcactattttggtttagtatagttttaggagtaactgactactgaacagtactgcatgtttctgaggttcctctgtatatctcctgtagttcactacctctgc

SEQ ID NO: 547651 - DNA, 605 bp, Homo sapiens
  misc_feature (476)..(476): n is a, c, g, or t
acgacaactactcaactctgactgcagattgcctcttcaaagttgtatttcggagtaccttttatacctgccttgctctcgatacacacaatctatatatccttgcaacgctcaccacaattgagatgcttatggccacgatacttatcatcacagacagcattgaacacgcatcctaagcggtcctactgagcatcgtaagggtgaccaacatataggactacctacatgttcaccatacgcagttctaccaatgattactcatcagagataatcattacatcccttgtgagagccttagccatatgtcctcctgctgtcaatgacaacaaactgtcaccagctactcattctggccaccggcatagtcctccggatcctctacatgctggccgctatgtacttctatgccatatatctgactgagtagcgttagcccttagccactgtcttatcctgtccatcatagccgcggntaggttgtcataaatatacctagcttctcaatcctaccataagaattgtaatttaggattcaaagttaactgactactccgcgattctaattcccacccttttttggcaaccacgctaatctttttttc

SEQ ID NO: 547652 - DNA, 899 bp, Homo sapiens
gcggattgtgcgtggtcgatttggtcgcgggttcacgttttgcttccccggatgtcgtgctggtgcgccgtcaccccgcccctctggttgtggcaggacccgattgtgtgcccccccctcgggggtgttttgcattgtccccggttgtggtgttgcccagttcccctgggcgcacgaattggggtgcataagccccacacccctttgggggcccgcacacgtccttagtcgtgccaagatgttgtacgttggtcttttgccgggaccgcgtccccctgccccgtttttcaacactgcgagcgcttttctaatggggaccctctgggcctcgcctcccggcccagcttcttggggagagatccgcttataacgagctcggttctttgagactgggtcaaggcctcgtccggggccctgtgcaatgcctgcgggccccttctcgcccgcgtttggtatgtcgggggccccctcccccccgcggggtgccgcaatcgtacgtctacgactctccacactcccccgtgtctaagcaaggacgcgcgcacgtcgttcgggggaagatcttgttattacctttatagaagattattataaaaacctcctttcaccaacatccttttaaaaattcaccactttggacatctatctccattccagtccaagctccagctatatatataaatggtgtttggcacccctgttatgccatgagcccacaaccccaaaacttcttataaaacctggggcaagagatgtacacatgcctaatattaatttgctcagcgttaaatgtcatcactcttccaatggcacacaaacaagactccctcggcactacacacaaatggccctaaaaagtatttctaacctttataaacatttaaatttcccaacataac

SEQ ID NO: 547653 - DNA, 312 bp, Homo sapiens
  misc_feature (24)..(24): n is a, c, g, or t
  misc_feature (38)..(38): n is a, c, g, or t
  misc_feature (70)..(70): n is a, c, g, or t
  misc_feature (263)..(263): n is a, c, g, or t
accaaggtttgtcctccttataangaattattcattgntgggcacagtggttaacatctgtaatcccaancaatttgggagccaaggcaggaggatcacttgagcccaggagctcaagaccagccacagcaacatgacgattccctctctctacaaaaaatacaaaaaattagctggatgtggtggcacataccatatccaggaggctgaggcagaaggagaaccaaagcctgggaggttgatgctgcagtgagctgtgattngcccctgcactccagcctgggtaattgagtgagggcctttgttaaaaaa

SEQ ID NO: 547654 - DNA, 782 bp, Homo sapiens
  misc_feature (278)..(278): n is a, c, g, or t
gaaaacaaaaacaatcggccgcgccgtcgcaggcacccgaacgtcgcgagcggggcctggggacgcggggccgagtgcagcgagcgaacgggagcagcggcgactcgccagtggggctagggcgccatggtggcatggctggggctcctgtgctgcgctgtggtgctccccctgtgctgcctgcggctagtgcgccctgcctgcctctgtgcctgcctcatgcctccctgctgcctgccctgctttggtgtgaactgatgggagcagtgacgctggcnctcggctggtggccctgtggcctgaactggcttgcgggacaccttgggcggcctgagtgatgccgagctgccgccgcctccgtgcatggatcagtgcgtgacggtggagctgcgagctggagaagtgtgctgcacaagttctcgggctactggggcagctgtgcgagcgcggcctggaggagctcatcgactacaccggctggtctcaagcacgagatcctgcaagagccacggccaagatgctgaattatcagggacactttcacttgttttgacacagtgcttgtaacagaatcaaggatactgttcaaaaattgggctccgaccacaaagacattccacagcagttgtttctcgggttggacaagccatttgatacggattcacttttacgagacttggaactcttcccttttggattgcttcttccatcagagatgccatttatcccttgcgtggaaagctgctccaattggcagaagcggtggccctggatgacgtagg

SEQ ID NO: 547655 - DNA, 196 bp, Homo sapiens
  misc_feature (40)..(41): n is a, c, g, or t
tttacatcggggtgtctaccaggcaagatagtgttacagnncaaccagctggcagcctgactcaagccaagaatgcccaaggtgcagcctgccaaggtagtaactatccagctgcaggtgcagcagccacagcaaaaaaatccagattgtaccacaaccaccatcatcgcagccacagccccagcagccaccctcc

SEQ ID NO: 547656 - DNA, 201 bp, Homo sapiens
  misc_feature (153)..(153): n is a, c, g, or t
accatagaggatcccgagactctatcttctctctgcagtacaccggattgtccgcaccgggcgttcgggaaacacaggcatcgacattacttcatcaacaaagcgtgtgatgagtcagtgctgatggaccctcaaagcgctgttgtagaaacnccagagcagaaggtcgacgcgggtaccgaggctccgaatttcggtaat

SEQ ID NO: 547657 - DNA, 515 bp, Homo sapiens
  misc_feature (388)..(388): n is a, c, g, or t
acacgcttttaggagatccagaggtagaactgcaggtttgatgacgctggagcccttgttcttccctgctctgccttgactgagtttccttgtcaggcagaaaacaaatgccccaagagcagaggccagggaagccaaaaccactcatcttaccactctcagaaatttacaggatattggtgggggacatgattttagtgaccaattgcaagtctgtggtgtgggcacatggagaaactttctctttagggcatgcacactgatgactgttcctgggaccccaaagcatgtgaacaccagggcagctctgtgccctcatttccatgaaggaggcaagtattagcagaaagagagagcaacctacttgtccacatgccagccactccancatctcctagcagacctacatccatccacagcctgctatgcaaccttcaaatccccgtcctccaggcagtcttcccagaggggctataaaggagatattcagtttcctttcccatcctacaaaaacc

SEQ ID NO: 547658 - DNA, 1035 bp, Homo sapiens
  misc_feature (161)..(161): n is a, c, g, or t
ctcgtcgagaggtcacgccggcaagtcggcatcgggcgggattggaatccgagtctgcttttgcccccaagagacccagaatcctggcagctcggtttcagaagctgttgtcccttcgccggctcccgtcggggcctccacgtgcagcgcgagcgtgcccnatagctctgtatacagtcccatggtttcccattgtcctacgcggaaccccggcatgatggccctacgcaaggcgtctggtgcccgtttgaggaccttgttgtgggcgaggcgcctggatggggaaacgggcacaaggtcgagctttcctagcatagccgggtgcaccgaaagatttagcggagagcagcaagcggtgctgtaacgcgagggccaccattggagcttcactcgtagccgtgggcccgtgcgcagagagatgccgggaggtatggggtgtcgaccgcgaggaccgttggtctcgtgtaacagagcacaggattggctctaaactatcgttgcacccaagaggtagcgtctttcgcggcgcgtctgcaagcaagtcaatcgctagcggcaagtcttcggtccatttacccgtcgggcagtcgaggaagtgttgggattaggctgtccgtggagcagatggggggaaacccgaagggtagttcgatgggccccaagaccaagggagcaccggatgttccatgcgttggagttccagaatctatctggcgacgctaaaaagcttaccccctattgcctccaatgttaggttgctgcctgggaaagctgtgtgcgttccccatccggaattccattgacacgggtgcaattgcccgtttgcgcaaggttggcgccccggggaaccatgaccctcaggggagacccttgtgagaagactgcgccagaatggtttgggcgcccttggcggggcatctattggaaggcactggaccttaattgtggccaagggttcagcgcaattctaatccaagggtttccctttttgggccaagaagaacttcacaaagggtggcaggcatgattcccccg

SEQ ID NO: 547659 - DNA, 105 bp, Homo sapiens
ggggctggagcaacgataatgtggcgcacagggaggggtggatgctgtcaccatccagccttctctttattttcagtgctttttgtattgtggccccgagcagag

SEQ ID NO: 547660 - DNA, 155 bp, Homo sapiens
  misc_feature (7)..(7): n is a, c, g, or t
  misc_feature (15)..(15): n is a, c, g, or t
  misc_feature (17)..(18): n is a, c, g, or t
  misc_feature (37)..(37): n is a, c, g, or t
  misc_feature (54)..(54): n is a, c, g, or t
  misc_feature (69)..(69): n is a, c, g, or t
  misc_feature (103)..(103): n is a, c, g, or t
  misc_feature (113)..(113): n is a, c, g, or t
  misc_feature (129)..(129): n is a, c, g, or t
  misc_feature (131)..(131): n is a, c, g, or t
acttgtnagcctcanannatttaaggaaaggggacangtaaaattatcctcttngtaatttaatgaaanggtacaacagatataatgcatgatgaactcaccnaattatgagntgggaggagcgaaatntnaatttcttttgctatagttataca

SEQ ID NO: 547661 - DNA, 693 bp, Homo sapiens
  misc_feature (22)..(22): n is a, c, g, or t
  misc_feature (24)..(25): n is a, c, g, or t
  misc_feature (57)..(57): n is a, c, g, or t
  misc_feature (91)..(91): n is a, c, g, or t
  misc_feature (109)..(109): n is a, c, g, or t
  misc_feature (291)..(291): n is a, c, g, or t
  misc_feature (351)..(351): n is a, c, g, or t
  misc_feature (353)..(353): n is a, c, g, or t
  misc_feature (364)..(364): n is a, c, g, or t
  misc_feature (435)..(435): n is a, c, g, or t
  misc_feature (463)..(463): n is a, c, g, or t
  misc_feature (496)..(496): n is a, c, g, or t
  misc_feature (501)..(501): n is a, c, g, or t
  misc_feature (504)..(504): n is a, c, g, or t
  misc_feature (544)..(544): n is a, c, g, or t
  misc_feature (554)..(554): n is a, c, g, or t
  misc_feature (586)..(586): n is a, c, g, or t
  misc_feature (591)..(591): n is a, c, g, or t
  misc_feature (594)..(594): n is a, c, g, or t
  misc_feature (597)..(597): n is a, c, g, or t
  misc_feature (600)..(600): n is a, c, g, or t
  misc_feature (608)..(608): n is a, c, g, or t
ctgtggtcgtctatctccctgngnngcttcccatcggcgaagatggccctggagacngtgccgaaggacctgcggcatctgcgggcctgtntgctgtgttcgctggtcnagactatagaccagtttgaatatgatggttgtgacaattgtgatgcatatctacaaatgaagggtaaccgagagatggtatatgactgcactagctcttcctttgatggaatcattgcgatgatgagtccagaggacagctgggtctccaagtggcagcgagtcacgtaactttaagccagngtgtatatgcggtgtcagtcactggtcgcctgccccaaggaatcgtgcgggacgctgaanangtcgaggagtngcctacaaatccagagacgcagctatagacgacctagccacgatgcaaaggctgccagcatctttgctctncacctcctgcctctgcttatttcttgtnctggaactcaatgaacagaacttcaaatacttnctacnctncaattcagactcagctgactgttgagagagcagcacatcnttttatcatnttatcttctttggactacaggtggggtggganggatntgngtnggnggataacnagatggcaacttgatggagagagtaggatgctgatttcctacccgtggcccacgtctgtgccttccccatgccaaggcactctag

SEQ ID NO: 547662 - DNA, 675 bp, Homo sapiens
  misc_feature (22)..(22): n is a, c, g, or t
  misc_feature (24)..(25): n is a, c, g, or t
  misc_feature (57)..(57): n is a, c, g, or t
  misc_feature (91)..(91): n is a, c, g, or t
  misc_feature (109)..(109): n is a, c, g, or t
  misc_feature (291)..(291): n is a, c, g, or t
  misc_feature (378)..(378): n is a, c, g, or t
  misc_feature (406)..(406): n is a, c, g, or t
  misc_feature (439)..(439): n is a, c, g, or t
  misc_feature (444)..(444): n is a, c, g, or t
  misc_feature (447)..(447): n is a, c, g, or t
  misc_feature (487)..(487): n is a, c, g, or t
  misc_feature (497)..(497): n is a, c, g, or t
  misc_feature (529)..(529): n is a, c, g, or t
  misc_feature (534)..(534): n is a, c, g, or t
  misc_feature (537)..(537): n is a, c, g, or t
  misc_feature (540)..(540): n is a, c, g, or t
  misc_feature (543)..(543): n is a, c, g, or t
  misc_feature (551)..(551): n is a, c, g, or t
ctgtggtcgtctatctccctgngnngcttcccatcggcgaagatggccctggagacngtgccgaaggacctgcggcatctgcgggcctgtntgctgtgttcgctggtcnagactatagaccagtttgaatatgatggttgtgacaattgtgatgcatatctacaaatgaagggtaaccgagagatggtatatgactgcactagctcttcctttgatggaatcattgcgatgatgagtccagaggacagctgggtctccaagtggcagcgagtcacgtaactttaagccagngtgtatatgcggtgtcagtcactggtcgcctgccccaaggaatcgtgcgggacgctggatgcaaaggctgccagcatctttgctctncacctcctgcctctgcttatttcttgtnctggaactcaatgaacagaacttcaaatacttnctacnctncaattcagactcagctgactgttgagagagcagcacatcnttttatcatnttatcttctttggactacaggtggggtggganggatntgngtnggnggataacnagatgtattgcgagaaattggatgcttatttcatagcccgggaacaaatttgtgctttcccatgccaagagtctagggcaaatggtccctcatttgaacatttgaaagtttttaaagcccttag

SEQ ID NO: 547663 - DNA, 255 bp, Homo sapiens
tcgacccagcttaatgtcacataccctctgaggtcttccccactactccatttttttacttttattgaggtagagtctgactctgttgcccaggttgaagcgcagtggcatgatctcagctcactgcagccttgacctcccgggctcatgcaattctccccacctcaacctcctaagtagctgggactacaggcgcacaccaccacacccatctaatttttgtattttctgtacagatggggtctccctatgttg

SEQ ID NO: 547664 - DNA, 1100 bp, Homo sapiens
ggctccccgcggtgagtctaatgtgacctttactgtgatgctgtgagaagtgtggttctgagtcctttttcttttcctgtagcacagtctggtgtgcctagtgtgtttgggctggggagtccttggtgtggcgctgaatgatgtgagtggatgtggcttgtggacctgcactcattccctcttgtcccatacttggagttttggtggagccactttccctgtccctccactgtggagctgcgttcctgtgagggaggaggccctactgtggtggcgaggacatacgactaaacagattctggacggagtttggacgacacgagtgtattcatgcccccaaatcacgacgatcaacaaacgaaattgcacaacttttgacggaacgagttaaccttgtcccatattgttatagtattttttgaacgatcctcgttgtacttgccatgctctcatacatttgtgtaaaaatatgtattggacaaacatttcttcagtgcatctggtaacttttatatatggagacctttacgaattacactcaagttgcctaattgcagaagtatcactgaaattgctccaacttggcattgcatctttaccgtgttcattttgactcaaaggcgtatattgaacagtaccagcaagacagacatccagatcattggtcacctttgccctggaacaatttctgggcaaccctttaaatggctcaccggtgcacttagactaaacacactaaatggtgggcaatggctgtccataagtccacccacatgggtactccatataatagcactcaaacggcatattggcgaaacagcacacccctacacattgctggcactcgttggagacacaagtctaagaatattcaacatatttcaaacgtagcaaacaaaactatttctacaaattcatgatcgaaacgactcacacaataacggcgtacattatcaaaacaaacagtatcaactattttgacactcaaaatcattcacaaagaattacaccttgatagaacaccactaccacatactaaacatcctactctcccaacttatcccacctcttcctatatatgattacaacaacacacatcc

SEQ ID NO: 547665 - DNA, 129 bp, Homo sapiens
tcagaggatcccgtactcgacatcgtgactcgaatcgcagttacattcaagaataattttaagactataaacatgccattctctttcagctgctcatgttcttaaaattattcttgaatgtactgcgat

SEQ ID NO: 547666 - DNA, 459 bp, Homo sapiens
ttgaagcacactgtgaactacaaacatattttcattcatcatggcagatgctctttgagacttgcattgtgaggacagaagttcaattaatgtgtttcccatttgttcttctgacagatagaggccaaatgacacaatgggaagatcttcaactaagtgtcaagaaaaaaaactagtgttctagtgttctagagtcctctttgccacttaaaatagccttgtgactataagtgtgtcatccatcatcttggaggttcagaaatggaaaggaaagacattttgtaagtggcatagcataaatgtcgatagaatcctggctttgtcactccaacttaggtgaccactaaaccatctgtttccattttctctttcacttatttaatatacatttagtggttagcataaactgacactgtattaaataagtaaaaaatgaaataaatggttgttgtctagaga

SEQ ID NO: 547667 - DNA, 181 bp, Homo sapiens
acattcctgggctcagatgatgctccccctcagacttcctgagatagctgtgactgcggggatatgtcactacacttgtgacaatattcgtattgttatgttgagacgggatcttgccatgtagctcaagctggaactcaaactcctagactcaagcattcccagctgccttggcgtcccc

SEQ ID NO: 547668 - DNA, 603 bp, Homo sapiens
  misc_feature (467)..(467): n is a, c, g, or t
gatgaagcatatccaggcaagaagctgttgccggatgagccctatgagagagcttgtcagaagatgatcttagagttgttaactaaggtgccatccttggtgaggaagcttgattaggaagccacagataaagaagactatgctggcctactgaagtaatactcggtaaaagagagtttaccaagcgtagaggaggttctgactgataagaagacgaactgctttggttgtgcagattctatctctcatgattgatatacctctagtctggtccctggctttgaagcaggctgtgtaggcggactgacagttaaagttgaggtgtgtagactcatagtcctaatagtgaaagctggtggtatgggacagccatgtagatggaagagtccccacaggtcttcagcccctgcgttactgacgtcgaggaataagactaggccagggtttccataggaagctcgtacttntacagatcgagcccttgaagagcctgttgacttatgaggagctctgaaaagtggggccagggagtcaagcaattaaatgctgatcgtctatgatatctttcgcttcagcttaaataaattctaaaatcaacaaggg

SEQ ID NO: 547669 - DNA, 571 bp, Homo sapiens
cgatgtcggggtggaaagcttcctgtgattagctgggagtcaatatttttattttaggctatgtaggctgtatggacttgatagcccctgcacagctttgccatgtggtgtgaaagtagccacagacgaaatgagtggtgtggctgtgtggcaatatgtttatttactaaagcaggtggtgggccaggtttggtccttgggccatcgtgtgctgacccctggaataaaataactagagtaggcttcactgaaaaacttgaagaggagttgactgcttatgaaaacatttatttttgtatttatgtaaataagaaaagtttatcatgctttagccatgtttttagggtttgtttgcttgttaatttagttttgttttgctataaaatctagtatttcttgaaccaatgccactcccatagcttcagatcatcatctatatgcagataactccctaatgtgtatctctagctctgtcctttctccctaactccagactgctgtgtcgagctgcctaccacccgacaggcctagttggattatacccacatctcaatcttcactgaatgtttga

SEQ ID NO: 547670 - DNA, 129 bp, Homo sapiens
atgactctgacactttctttaccaaggaattagattattaggaaaataaaaataaatgcagtcaggaagttcttgcttgtgttacttgttttctaattttaaatcttattcttttaaagtgataataaa

SEQ ID NO: 547671 - DNA, 375 bp, Homo sapiens
ctagcctgggcacagcagtgagaccatgtctcaaagtaaaataagacaaagaaaagaaaatattctggaatatatcatggtggtggttgcacaacttggtgaatgactaaaagccactgcatttactactttaaaatggcgacttttcagccaggcgcggtgtctcgtgcctgtaatcctagcactttgggaggttgaggcggaaagattgcctgtgttcaagagttgaagaccagcctgggcaatatggtgaaatttcatctctactataatacaaaacattggccaggcatggcagcctacatctatagacccagctactcagcaggctgaggcagaattgcttaaaccagggaggtggaggttgcagcgagc

SEQ ID NO: 547672 - DNA, 645 bp, Homo sapiens
agtggttcaatttagaaagggtttcaggccaggcacggtgactcaggcctgtaatcccagcactttgggaggccgagacaggcagatcacttgagaccagtagtttgagaatcagcctggccaacgtggtgaaacctcatctctactaaaaatacaaaatttagctgggtgtggttgcgcgtgcctttagtcccagctactcgggaggctgaggcaggagaatcgcttgaacccaggaggtggaagttggcagtgagccaagatcacgccactgtactccagcctggccgacagagcgagactctgtctcaaaaaaagaaaggttttctaaactaatggttaaaacagaattttcttgtaaatagggaagttggagcattctggttaattgagattttgctctgtattgacacagctcgcaccagtttggttcaggagctacctccttgtcattgaattgacgagttacaatgtttggtattcggatacattcagcaagaacacttgaaaactcctcaccaactatttttaaaggcttactttgtttttgtttttattttttcactggctattttggataagaggatgtttacatcttaatgtaaaaaaatgaaaacaggtataaatgttttatgtaaaaaaaaa

SEQ ID NO: 547673 - DNA, 259 bp, Homo sapiens
aaggtaactccggtgagaagggcgaccccgctgaaggtgaaaagagcaggtcactgacctgccacctgtcttcctctctcccaggtttctcttaaggttctgcagggcaaggctgtctgggacaggctttgcatggcatccgctctcagagctgcaggcatgcatctgcaccttggcatgcacacacagacgcaggctctgcacaccagactgcacagactgtgcgctgcgcatacgcatgcagcaaagcaaactgtgt

SEQ ID NO: 547674 - DNA, 654 bp, Homo sapiens
ggactttgggtcctgcatgacagaacagctgtattagactaatcttcccatagaaaacagctctctctctcctctccatatatatacacatatatatatatatgtgtatatatatacacatatatatgtgtgtatatatgtgtgtgtatatgcatatgtgtgtgtgtatatatatgtgtgtatatatatatacacacacacacacatacatgtttttttggaaagggattcgttcttgtgcccaggctggattgcagtggcaaaatctttagttcaccgcaacctccgcctcccaggtttgagcaattcttctctctcagccaatccagattagctggggatacaggcatgcgccaccaggcccagcaaactaggtatttcgcaactacaatatggtgattcctccatgtatggatcaggttgaagaatcatatcccccgacccaagtgtaatccccctgcatgcggtactactaaagtgcacggccagtacacaggcagttgagcatacgaacacccaggagaacattacctgatatagacacagctacgcaagatttataaaaaccatgttccatagccactggagaagatatacaccgatcgaggagaaaatcaccgaggataagcaagccttgccttgttaactaaacag

SEQ ID NO: 547675 - DNA, 899 bp, Homo sapiens
ccagccgagaggtgggaattcatgcactcccagctgaaaggtctctcaagcagcatgcagtgccctgtggctcgaggcagcagaccccggatccctcaagtccgagccggggcttccctggttgcatccagcctggtagtcctccacttcgagccagcttcactgacctcgttactatgaccccttggagcagctggactcagaagctgcagagcaaggtggagttcctgctcctggagggggccacggtgccggccctcaggctgatcaccaccatccacgaggatgaggtggccaagacccagaaggcgtgagggaggtggccgccgtgcaggctctgggtcccctgtctggcaccccaaagtccatgaccgtccctatccccacgtgcctctctctccgtccccgctcgccccagcgtgttcccctctcatggttgacccccgtccgtggtgggtgatggccgttcctcacttcctgtggcagtcgaagacccgggtagctgaggtgccccgcttggttgacctagagttgtggaaccacggcgccacggagggatcccggcttggggcagcgcaggaccggagggaaatgcagcggggccaggcgtgagaactagggccaggggggtgccctgaaaagagggcgtgtgtccaaaggcgccggaatcggacgcacgtccgtggcgcgaacgacacgcggtgtagacagaggcatcggagcagccccggggtcctcacacaggccgcgccttagagcaggaccacaccgacaatggtgcaaccccgagcaccaagggcccggactacttcgcccgacacaacagggccaataccacacacggaacaccccggccttgagcggccaaccaccacaaatacccggggcacacacaaacc

SEQ ID NO: 547676 - DNA, 488 bp, Homo sapiens
ggctttcctgaagcttaggctttatccccctctgctggctaaaagaagtaggaatcacgcactgggtgagaccccgtctggcttattctcatctattttcattcttttggaaagtggacccaaagcatagagttaaaagagcctttttttttttttttttttttttttttttttcccctcactgtggtgataaaaaccacagtgcaggggctgggcgtggtggctcacgcctgtaatcccaccactttgggaggccaaggcaggcggatcacctgaggtggggagttcgagaccagcctgatcaacatggagaaaacctgtctctcctaaaaatacaaaattaaccgagcatgttggcgcatgcctgtagtctcagctacttggaaggctgaggcaggagaattgcttcaaactgggcagaggttgcagtgagccaaggttgacccactgcactccagcctgggcaccaagagcaaaactccatctca

SEQ ID NO: 547677 - DNA, 1386 bp, Homo sapiens
  misc_feature (426)..(426): n is a, c, g, or t
  misc_feature (1186)..(1186): n is a, c, g, or t
  misc_feature (1213)..(1213): n is a, c, g, or t
  misc_feature (1275)..(1275): n is a, c, g, or t
  misc_feature (1290)..(1290): n is a, c, g, or t
  misc_feature (1350)..(1350): n is a, c, g, or t
cgccaccccccggtggtggatataacaccctcggcgcaacaacgaccgaacgacccaccgtggggcggggcacacaacaacgcataaaaggagcgagagagaacaccccttcacaaggttgctgtccccccccacaatataatcaggtgtctatacctccgcctggatgacaaaccccaccacagatataaaaatacgggcgggaaaaattagaagaaggggttgtctctccggttaaagggaggagaagttgggccccgcctccgtggttgcaaccacccgtttggaaggggggaaggtgttgatatccttcccaaccagggtttttttacaacgagattttcctgttgccccctataggacttctcgcggggggcctcttcttttaaaaaaagattttttgtggagaaaaagtgtcgttgtagnaacgccaactttgccgtgtgttgcgcgcgccaccacccaacactgccccctccttgttgtgttggaacaactccgtctttgggtaggcaccccctcctggggatttgtttttgccgtcagctctggtcgtaaaaaaagagattttttcctggggtgcacccttcatctggacttttctcccctctatactcgtgtgtgttttctcccctctcttttggcaaaattgtcctaaatgtctcttttatgatcctggtgtgtctctgttgggtgtaccacacctctgtttgtacagatgcgcataaataaaaaatgggggacagagggtctgtgagagagagacacactgtattctggtgagacacacacctctgggggtgggagacacacagagccctgtgggctcttatttaagagaattgtggagagaagaagagagctcttctgggccacaccacgagaacaccgctgtgttgttgccctctcacgggtgtctgtgcacacacacacgcgcgtgtgttgtgcattcttctacgcgtcacatataccgcggagaatctgtgtaaactctacacaaatagagtatattgtttataaatatataccacatgagatgtgtcttcccgctgtgtgatcttgaggggcttaagaccctcgagtacacacggtcttttttgtggccctctgtgtcacaccacaggtgtctctcccacacagtggcacactctcacttccacaggtgtcacagtggcgtccacagaangtgtttaaaggaggaaccctataattnacgggaaagttgcgtgaacactgcagtggggagaattgagaatagtcaggcctatcagtttnacaggatcacccctntacctttgatattccacttagctgtagagtccatctgtttgtccatctgctgaaatgagnaaagaaaaatttatgccctgattttaaaccaaccca

SEQ ID NO: 547678 - DNA, 333 bp, Homo sapiens
  misc_feature (133)..(133): n is a, c, g, or t
  misc_feature (160)..(160): n is a, c, g, or t
  misc_feature (222)..(222): n is a, c, g, or t
  misc_feature (237)..(237): n is a, c, g, or t
  misc_feature (297)..(297): n is a, c, g, or t
ggagtccaaaagtaatttttaaaatatccactgagtttctccccgtattgaggctatgccctgagtcaaagctttttgtgcctgtcaccacggtctccccagtgcacctcatccacggtcacgtgctcagaangtgtttaaaggaggaaccctataattnacgggaaagttgcgtgaacactgcagtggggagaattgagaatagtcaggcctatcagtttnacaggatcacccctntacctttgatattccacttagctgtagagtccatctgtttgtccatctgctgaaatgagnaaagaaaaatttatgccctgattttaaaccaaccca

SEQ ID NO: 547679 - DNA, 146 bp, Homo sapiens
gtgatggcaggtagaggcttactagagtgtgaaaacgtaggctggattaaggcgacaggattctaggatagtcagtagaattagaatgtgaagatgataagtgtagagggaagaaagttagatttacgccgatgaatatgacgacc

SEQ ID NO: 547680 - DNA, 160 bp, Homo sapiens
cggagctggagaagaagtcaggaagaagagtcaccagaggagccgcagggacatgccacagaaagaactgcgtagatccagggattgtggatttccgagcggatccggcatgaggacccaagcccaacctggcacctacgctgacgcacaccccccaaaa

SEQ ID NO: 547681 - DNA, 930 bp, Homo sapiens
  misc_feature (76)..(77): n is a, c, g, or t
  misc_feature (173)..(173): n is a, c, g, or t
  misc_feature (201)..(201): n is a, c, g, or t
  misc_feature (208)..(208): n is a, c, g, or t
  misc_feature (222)..(222): n is a, c, g, or t
  misc_feature (238)..(238): n is a, c, g, or t
  misc_feature (471)..(471): n is a, c, g, or t
  misc_feature (477)..(477): n is a, c, g, or t
  misc_feature (479)..(479): n is a, c, g, or t
  misc_feature (481)..(481): n is a, c, g, or t
  misc_feature (487)..(487): n is a, c, g, or t
  misc_feature (500)..(501): n is a, c, g, or t
  misc_feature (505)..(505): n is a, c, g, or t
  misc_feature (510)..(510): n is a, c, g, or t
  misc_feature (531)..(531): n is a, c, g, or t
aacgggcaatagtagtaacaggctggtttaatcggcacgaaggcgaactgttgtggtgcggagcgttcgggggcgnnggcgggcggccaggggctgccgcgggactcggggcgcagcgagtggctgcaggggtggagtgggccggacgagccgggggcccgggtgccgcggtncgaggccgggccccgcgcgaggaggcgngccaccnggggagctgccggnagcgagtttgccccgntgcgaaagaaggcgggagcggcaggggccttcgaaaccccctggcaacccaggcccggagtcttggggagcggtgtttcctgggacgccctcggcggacaccccgatgcagggttacggttctgggcccccggcagaaggctcctcggggtgacccccgcgggggcctgcagagcggcggagagccgacccgggggcctcgagccgggagggaaggggggctccggaggcgangggccngngngccagngggagcgggcctnntcgnaccgngggacagggcagcgccagggntggaaacggggacttcgtggacccttcggtgggggggccacaagaaacttgcccggcgggaaggctggggccggagggagtggcatagcgggaaccttccccaaggaggaacggcccggggcgggagaaatgaacgggttcacgagggagagtgaagcgaaagggccccggcagcaaggtggtgccgacggggatagggaacgtgtcgccctcgagggaggagacgtggtcagaccggggaacgctctcagaagggggcaaaaagctccagagaaccaggtggcttcgaaagaggagcgcattttggtccagagttccgcggcagtagggagacacgggtggagttccgaacacgtattcgggtgtcacggacaacgttagaaggacgcgagcggaaga

SEQ ID NO: 547682 - DNA, 215 bp, Homo sapiens
  misc_feature (208)..(208): n is a, c, g, or t
gtagctgggactacaggcacccgccacgacgcccggctaatttttgtgtttttagtagagacggggtttcaccatgatggccaggctgatctggaactcctgacctcaggtgatctgccctcctcggtctcccaaagtactgggattacaggtgtgagtcgccgcactggtccaacttttccttttcaccttagaaagattgtcaggnggtaccg

SEQ ID NO: 547683 - DNA, 194 bp, Homo sapiens
aaggacgcagctcttctatttgtggactctgatcacagtggaaccctctcccgaccgggcctcagaatctgatcacagggaaccctttcccgccttgggctcagaatctgatcacagggaacgctctcccgcccgaggctcagaatctgatcacagggacacctctcccacctggagctcaagctggtttcctg

SEQ ID NO: 547684 - DNA, 358 bp, Homo sapiens
gggaagtccgtagatgtctcatcgcagataattaaagcttagggcctggtggctaggtcggttctctcctatcaccagtcggagaccttccgccgcaaaccaagccaccgacagaaacaatacggaacaagaccaagaagcataccacgagacaagaaacccaccacacgagaatacaataggacaaaggaagcatcacaggagagcaacccacatgacttctcacatagcagatcatacggccatagcaaacaccaagatagaaacgaagagaacaacaaaaacaaccaaagacccaaggaacaaaaaggcgaccaactgacacacaaacaaaaactaatcaagaccgaggatacag

SEQ ID NO: 547685 - DNA, 218 bp, Homo sapiens
agatttcacggcagccggaacagtagctgggactacaggcgcccgccaccacgccgggctaattttttgtatttttagtagagacggggtttcaccgtgttagccagagatggtctcagtctcctgacctcgtgatccgtccgcctcggcttcccaaagtgctgggattacaggcatgagccagcgtgcccggcatgaaggagttttttaaaagaaca

SEQ ID NO: 547686 - DNA, 529 bp, Homo sapiens
  misc_feature (5)..(5): n is a, c, g, or t
  misc_feature (16)..(16): n is a, c, g, or t
  misc_feature (48)..(48): n is a, c, g, or t
  misc_feature (76)..(76): n is a, c, g, or t
  misc_feature (93)..(93): n is a, c, g, or t
  misc_feature (120)..(120): n is a, c, g, or t
  misc_feature (135)..(135): n is a, c, g, or t
  misc_feature (243)..(243): n is a, c, g, or t
ggccncatttccccanttgccaaatttgtggaacccaacccccaattnccccatccattcaatgaatggattaaangaaaccttatatatatntgatggattactacacagccacaaaanggattgaattaaccnccattttcagtgacctgaatgagattggagactattattctaagtgaagtgactcaggaatggaaaaccaaacatcgtatgttctcactgatatgtgggggctaagcntatgagaatgcaaaggcataagaatgataaaatggactttggggacttggggggaagagtgggagaggggcaagagataaaagactacaaatatggtgcagtttatacataggtgatggggtgcaccaaaatctcacagatcaccactaaagaatttactcatgtaaccaaataccaccggtaccccaacaacttatggacaaataaaataaataaataaaaatatctaaaagggcataattgaattgtttgtaacacaaagaataaatgcttgaggtgatggata

SEQ ID NO: 547687 - DNA, 199 bp, Homo sapiens
  misc_feature (34)..(34): n is a, c, g, or t
  misc_feature (69)..(69): n is a, c, g, or t
  misc_feature (76)..(76): n is a, c, g, or t
  misc_feature (145)..(146): n is a, c, g, or t
  misc_feature (160)..(160): n is a, c, g, or t
  misc_feature (184)..(184): n is a, c, g, or t
  misc_feature (190)..(190): n is a, c, g, or t
cggcagggccctacttctgctcccgcctccagangatgaccatgccgctggcgtcactgggggccagtnggctctngtcgcagttgatgctgacatcaagcacaggtgcactgtggccctgctgcttgttgacagcagccttggnngcccgctccacatnaaagatgtgcacgctcatgttctnactgcncgttaccac

SEQ ID NO: 547688 - DNA, 823 bp, Homo sapiens
ctccatcaagttactgtccccagaggatctctccataagatgtcgtttccatgctatcagttcagagaagttggaataaaatggttggttcatctcaattgatgaatttaaaatgcccaaatcttgttttgtattaagggtgttgtataagacatttccttttgattctgagattttcaggcaggatcgtggactcactaaaattatttcttttttccttggaagaaattaaaagggcagagtgggagggtatctttcgaggaatgctgtttttcacatgtcagttttagctattttggaggtacatgagttgctttattccaaggatcctggcatttgaagtcacacaaaagaaaataatttcaaactccaagaatataccaaaggtagaaaagtgagcctgagcagcttgccataatttcagcagaaggcaaatctggtcccaatcgaaccaatctgttggtttatttgtattattacaacaaagcccaagattgaattcctcacctgaatcacttccttattgactgaatctatttagactcccctctaatttagcagagtatttttttattaaatccaggcatacaaacataaattatccaagctgcatctcatttccttcaccatttattttccttcgttggctgccagtggattcagaagacctgattcagaatttcatcagggacaattaaaaaccaacaataaagaaaaacagtttccacaaaacgatgcttaaaacaagagcgacaacattcagaaattaaataactgtgattttttctcacaaacaagtccttaacttgggtcatataaaccg

SEQ ID NO: 547689 - DNA, 530 bp, Homo sapiens
  misc_feature (466)..(466): n is a, c, g, or t
tggggtggtaaaaatggttgtttatactgatagaataaagcaaataagaaagtttataaaagctcagtgaaaattcaagagcactctaaatataagcttatatttctcgtatcatgtgttgtacaaaatttaggcttatgtgcaaaaataaaagatctgattaaaatgtttacttaaatgcataaatgaatacagtggactggtttaagccatgtcaagaaaatttggtgttaatctatttaaattttttggtaagcataaaaatcactttttctagtgtactggaagaaaagttatttactgactcagcactttgggaggccaaggcaggtggattgccgagcccaggagtttgagactagcctgagcaacatggtgaaaccctgtttctaccaaaaatacaaaaattagccaggtgtggtaggtcgtgcttgtaatcccagcactttgggaggctgaggtgggntgattgcttaaagccaagagtttaatactcgcctgagcaatatagtgagactgtgtttcttcaa

SEQ ID NO: 547690 - DNA, 351 bp, Homo sapiens
ttcatttaggcaatataaagttgaactaagcattctatcttgtacaggccgggctatcaccaggctcgtgtaagtttgtcgcctctacctataaatcttcccactattttgctacttatacaggtgtgctcttttagctgttcttgaagatagctcgtctggtttcgggggtcttaactatggctctcctagcaaagttattatctacgttcattcattatgcagaatatataggggttagtcctggctatattatgctaggttataatttttcatctttccctttcggtactatatctattgcgccaggtttcatttgctatcgcctatactttatttgccttaatgaag

SEQ ID NO: 547691 - DNA, 81 bp, Homo sapiens
taccagccaggctttcaacaaagttccttttacctagtttttcagcatgattctcaaaagcctcagcatcctcggtcgacg

SEQ ID NO: 547692 - DNA, 351 bp, Homo sapiens
  misc_feature (287)..(287): n is a, c, g, or t
tgcttaatagaggaagttaagactttaaataagtgagctacagtaatttagattatcttccaaatctattctaaacttttatagtcttttaatgcatgcatcataacgttctggagagaaaaatctgcagaatgcagcatgcaaacagctgtaaagtaaaccgtaaattttgttcatttatatgttgtctctaacatatttttaagtgtttgttaaaaatctggaatctttgctgggtgtggtaggtcgtgcttgtaatcccagcactttgggaggctgaggtgggntgattgcttaaagccaagagtttaatactcgcctgagcaatatagtgagactgtgtttcttcaa

SEQ ID NO: 547693 - DNA, 886 bp, Homo sapiens
gttcggccctgggatccgtcgccacctccgtgatcagaccgctctgtgcctgagagccgccgtgagcactcgcgattcaagccgaggcagtccaaacgacgtccagggggcatcagcccgctagcgtgccaaagactcatgtgcctgcgctgagcctgggacgccgactccagtctcagtcgagccggccgcacgtcggacgtgccgtcctccatccctctgtccggtgggtgggcaccgggcccagcataacgccatggtctggaatgactgctgggtacgggcgtcctgcgcgtcggatgcacgtgaccgatgaagtggacgtgtcgtcgcggagctgagtcccgcggtcgccgtgcccgaggcgtccgccggcgctgggccccggcggctctgatgttgctcgagcagccctcgcgctgatcgtcttgtgatcggagatgaagaagatctaagacaggctactcgtgtcgatagacaacatctcgacgagttgtgccggatgtgcaattagtacaaagacctatgcgttgcccctgaagcatatatcgcctggatgagacgatggagggtggaggctgcggggagcactgtggcacaagtgcgccccggggtgtgtgagcccccgcaagtaggggaacgtgtcagtgcgacgtgttccctgacatcgagacgaccagctccgcatttataatagttgcctggggtaggcatcgtccgactcccactgtcctgtcctgatcctcgccgggaggagcccctccagacccgcggaacggcaggttcttcacatgacatgtcgccttccccccaaaatgaaaggcctttccggagcgccctgccaaccacccaagaaacgggacatacctcttggcggacgattgcc

SEQ ID NO: 547694 - DNA, 161 bp, Homo sapiens
ctggagcggttttctctgcactgatagcgggggccattagctaaattcttttgctttgtttgtccactgatgagaggctgccttctcaatatttcacttcatcacctgtaaagttagggcctggaatcacacctttcattttctttttgtctccttttgac

SEQ ID NO: 547695 - DNA, 485 bp, Homo sapiens
  misc_feature (12)..(12): n is a, c, g, or t
  misc_feature (57)..(57): n is a, c, g, or t
tgttttttgtgntcccccggggggtggaggggccccccggggggtgagagatataanagagcccccttggtggtgccccccccccctcgcccagagtttggtgtgggaaggaattccccccagttggggtgtgtgggcccccccccctgggggcggggccgggggggggttttttttggggccaaagggtttttttggggtgtgttccccccgtttttttttctccccccaaaagggggggggggggccgggggggcctcctcttccgggtgtgtttccccccccgggggggccccccccctttggggtgtctcctccccccggggggggggcccccaaagaggggggggttttttcccccccccccttttttttttgggggggaagggggccccccccttttgggggggggggggccctttgggggaaaaatttttttttttttccccccgcccggtttttttttccccaataaaaaaccctgt

SEQ ID NO: 547696 - DNA, 340 bp, Homo sapiens
ggggggggggggggccccctttttccccccaaagccccgggggggattttttttttttcccctttccccccccccccccttttttttgggggggggggggggggcccccccccttttttttccctggccccctttttttttgggggaaaaaggggggtttttttccccccccccgggtaccccccccaggggggggggggggttttttgggccccccctggtttttttttttggggggggggggttttgggtttttttttttttacccgggcctttttttgggggcccccccccccccaattttttcccccgttttttggcccccctttaaaggtttttt

SEQ ID NO: 547697 - DNA, 204 bp, Homo sapiens
  misc_feature (12)..(12): n is a, c, g, or t
  misc_feature (90)..(90): n is a, c, g, or t
  misc_feature (105)..(105): n is a, c, g, or t
  misc_feature (133)..(133): n is a, c, g, or t
  misc_feature (157)..(157): n is a, c, g, or t
  misc_feature (170)..(170): n is a, c, g, or t
cccacggtaatntcctgcacgacaatggcgggggctgcatcgatggcggcgaacagccgtggcaggttgaatcaggctctcgatacgctnggcgcgccataaatngagagccggttggaatccatgccgatgnttgaacaaggcagctgcccataangtgttcttccttngaaattgaacagtgcccagaccggtccctcatcg

SEQ ID NO: 547698 - DNA, 188 bp, Homo sapiens
gtacacattgtgtccagtctttgctattgtgaatagatgccgcaataaacatacgtgtgcatgtagtctactatagacagcatgatttatacgtccttatgggtatataacccgagtaatagggataggctgaggtacaaataggtattatctagttactagcatccctagagcgaatacgccactta

SEQ ID NO: 547699 - DNA, 252 bp, Homo sapiens
tctcgtttcccttgtgctcatctcccgatgatcttttcactcctgccccgcatctgttcatgtggttaatttggagcagtagccagtggttcactggtttctgccatgtgtgcatggagttccctcagtctgtatctcgtagcctgtcggcctcgatagaactgataaaataagtcaagacagatttacagccatgatacgtgcccctttagttggagacacagaacttaaattcctgaaatattgaaatca

SEQ ID NO: 547700 - DNA, 110 bp, Homo sapiens
cagaatgccactccggttgcttttattgattgcacttcgtgattacgtgcaccgcgtcattttgccatccgaattccttggtccgcccgcaactcttcgatgcacagtcg

SEQ ID NO: 547701 - DNA, 644 bp, Homo sapiens
gtggatttgttttccaatagaaaaacatgctcttattcattattaggccaaaattataaagattaaatgccatttctcctctcatatttatgaaaataaaagagatgatgtattctatgatggcttggtgtatagaaacaggacctgataatcttgtggagggaatgtaaatgttcctatactcatcacaatttaaaatgtacacataccatttgacctagcagttctacttatagaaatttcatcctcgaaatatacatatataagctcaaagacagaaacaacaatatacattacaaatggtttatagaagcaaaaaactggaaatattcagaatgtctaccatagggtactaggtaaattaaatatatccatacaatgaaatataatacaaatattaacggaacattagtgagaatatagctacatctatatgaattaaaaaattccaagatatattgttaagcaaagacccagagatatatattcattacattatctttgtgtaaatgggaatggaggtgaggggtcagggggtgggggaacatatataccaatacataaagtttatacattgtcagactatctagcaggatatccaacaaagcaactgactctgcaaagggtaaataagaactaggggt

SEQ ID NO: 547702 - DNA, 185 bp, Homo sapiens
cctagtgcttacagcagtggcttactggcagagcgctcgcccggcctgccagggtcgtgatctcctgacagaatagtcatcttctggaagaggctggcccagtcagaatcaggagctgccttcctgctcttctaggtagccacacttcactaaagtgtcatccaccagtgtgttgaatgcgaagt

SEQ ID NO: 547703 - DNA, 269 bp, Homo sapiens
ccacgcagataacagcaccagcacggatatacgagtcataagagaagtatacggtgagctgtgctacctcggagcaccatctgcggcgctttgatatggatataccaggcaatgggcctgagtcaactgacaataaatagtccgggtcaagcacttcatcgcgatacgtcctgcctccataccagactgaaatgctttctggagaccttcttgtgccctcaacgcgggccgttaccctgactactccatctccaatgcagcgcaagctg

SEQ ID NO: 547704 - DNA, 223 bp, Homo sapiens
agtatacataccacataatcaggatcacccaaccgttacaacaagtatacacccccaacctggctagagttactgcctatcagcctatacctgccagctggcacaccagtccaacatgcatctcctgctttgtgaaatgtggtgatcctactagcagtctgaccctgcagtgctatgcaatgcttgtgcactaggcctgtacgttattaccaactgtacgtga

SEQ ID NO: 547705 - DNA, 135 bp, Homo sapiens
cccaaagaaatatcccactgtgctaacctgaatatatctgcaatgaactacaatccagaaacagcgtgcatgcctgtcagagattttctgcttcgtttgatattggtgaatccatgtcttggccagacaaaggag

SEQ ID NO: 547706 - DNA, 168 bp, Homo sapiens
tcctgcacagatcacaagctttttatctcaggctgcagcttggtagcactcatgtccgttgagagatcatccgatgaatgccttcccccggccatggtactatgtagtgtggctgctgtcctcctctgtgcatggaatggtagcgcactcacggtgggtacgtggtac

SEQ ID NO: 547707 - DNA, 1166 bp, Homo sapiens
aagcagtaaaaggagcagctctggtagaagctggcctggagggagaagctagagactcctctggcaatcccccataccccttggggcagactgccctgaatgatgtgatggctgaatgacagtggagtgccctggagaggacatgagaaacactggtgtgctgaaaaccagcagttcccattcctgaagcctgtgggactttttggatgcatgatgcatggccatagtatgtgtagcagctgagcaggccaaccaagatgtcccctcagaagtggccagaggcaagtccaatctttgccagcatgcgcccagcggtgctcccactgtctccccagcactctcttgatcaagtgaccacttgcccacaggttcctcgcatcaaggaaccccagtgggcaaggcagcacaagccctgagcgcacagagcgcgagtcttgctgcacagcagcgcagtggcaggttacacaacagttcctcccttatcacaaccaatcaacgtcactgtggcaagatggttaggtccccagcctggtggcacgcgcagcgacgtggacgattgaaggaaaagcttgccaaaactgcaaacagcacacgctaccacctatgaaaccattcctcactataccttgcgccctatgtccatccgcaatgcgaatcccaccaagccaccacgcccactcatagtcgcctagtcctataagcaccccaacgtcgggcgaagcgcacacgcgacggaaacgtaccagaagccacaacctgggaaagcgaaatcacgcacacgcacaccgacggacagaggcacacgctcacaacgggcagcccccacgggcaacaggaacccatacacaggctggtcccccaccccaccaccaactcgctcaccaccgcctccaccggaacccccaccaaggcgaatcccactgagggccacgccctctccgcgcatcaagcggcaagcacaggaggcggctcccaggacggccacacacaacgcgacgcggcaccgaagccggccaccaacccgcacacgacaccacacgatgggcggcaaacacggggacgcacacgcccatggcccccccagccggaccacgcggacaatccccctccgcacccccccatggcctccagccagggccgcccagaaacgccaggctccctgcgag

SEQ ID NO: 547708 - DNA, 364 bp, Homo sapiens
  misc_feature (3)..(3): n is a, c, g, or t
ttnatatgctgtctcaaaaaaagcaagaaggtaccaggcacggtggctcatgcctgtaatcccagcactttgggaggccaaggcaggcggattacttgaggtcaagagttcgaaaccagcctgactgaccaacatggtgaaacccatctctactgaaaatacaaaacattagctgggtgtggtggcacgtgcctgtaatcccagctactggggaggttgaggcaggagaatcgcttgaacccaggaggcggaggttgcggtgagccgagatcacgctgctgcactccagcttgggtgacagagcgagactccacctaaaaaataaataaatgagggaataaaagtatagtaatcaacagcaacg

SEQ ID NO: 547709 - DNA, 144 bp, Homo sapiens
caccaagtcctgcacacgcatgcgtcaaacagagaagctcaagcatgagaagaagaaagcaggctgtagaaattaggagaagaagcccacaattattcccaggagcaaaacagggaaaaaacaggctgatctccttgagtaggg

SEQ ID NO: 547710 - DNA, 524 bp, Homo sapiens
taaaaaagttgttggtgggactccataagtgaatttcaagcagtgaggatttggtggtgcctgaaatggccgagggcacgggagtgacctgtatgtgtgaggaattgggtgaccgaaataaaagtccacggtgtcaacccctaaaacatgtgggtgaccgtacattttttatacattctccactctagcggcctttatacaggctttccgattttacaggcctttccaagtttccattctccttagagagagaactgtgcttccaaacagaaatcaggagtgaccacaaagcctgaaaacatcttggccacccagcaaagaacgggccacaatgggattggggctctgcatggccatagttgcccgagtttaaaactgcaggccactctgccttgcaaacctcagggtggcctcgtgattccatggggggtgcactccacaggttggcccgagcgtgttcttatcagctgctccaaggattgagacccaagtcatcatgaaaagggcccaagtacagtctaaag

SEQ ID NO: 547711 - DNA, 938 bp, Homo sapiens
acggtggttcacgcctgtaatgccagcacttgtgggaagccaagccaagcggatcacctgaggtcaggagttcgagacagcccggcaacgtgcaaaacccatctctactaaaaatacaaaaaatcagccgggcgtggaggcgtgcgccaggtcacggtgataaccaagggtgcttgggagctgatgtgcaggaagcaaaacctttctccaacagatcccaattgccgcgggacacaccttcctgcaggacggggaaaggctctagtggaggccataattccttttcttttcaaggatcccatgagaatgttaggatttaaaatcttaaagaaaataggctggtatggggtgggtgatcacacattgtaatcccaactctttgtggaaggctgaggtcgaaggatcaacctgaggtccgaagaaatcattacaccgtgggaggcgaggtctggcgttgagccaaagatcacacagtgacattcaagcctgggagaaaaaaggcaaagactccatctcaaaaaaacacacacataaagcaagaacagaaaggaaaaccacacatgcggcgggacacggtggctatagcatgaattccacagcttttgggagggtgcacagaggacaactcaggaattaaaaaacgtgctgttacaactaaggggaaacacgagtttatattagcaataaacaattagacgggcgtgcgggcgacgtgatgtaatcaagaaataaggaaggtaagaggaatgtgagacggagtatgtgctagttggtctggacagataggacgatacttttcttcaagcaaacacacatgtgggtccgcaaaataataaattggtgggcaagatagtaagtaaactgacgtgtgctcaaagggcgtaccaaggcgtaagaccaccgacgtacatggtcgcattgttatgtattttactggt

SEQ ID NO: 547712 - DNA, 364 bp, Homo sapiens
ggaggctggcgaggctgcgagatccctatcgacaatagccgcctctgccgccggggagctccccgagtctcttgagccgcccgtaaccgctcccggtatccgcgggacgtagaggatggaagcgcacacgggagagcctcggaagtcgcgagcacaccgagcctccggccaggcctgcacttggctggaaagggcgctcaccaaggtcagcgcacaatggtagaaaccgagtgaccgattgcacctcaggtcatggccaccatgaggagggccacagaagggaaagacgcacaaggaggcgggtgaagggacgcggcgcgccatctaggacgcaactccgaaaagcacattaacagcgctggac

SEQ ID NO: 547713 - DNA, 442 bp, Homo sapiens
  misc_feature (317)..(317): n is a, c, g, or t
  misc_feature (329)..(329): n is a, c, g, or t
tctaacttaagcatgcatggctttaaaccatgtaaaggtttgcccaaaatgagaagaaaaattcgttttttagaacttattaccagtcattaaacgcactgaggctggtactgctgtctcagccgtggctccccagagtggagggatgaagactagtttctttctggttcctttcccagcctcttttcctgtaacttctctgtctggaatgctgatgggaaatgttattttgtttttgtttgcagcaggtctgttgttttgattttgtctgagtggtatggaaaacagtacgtcacttagagtgggtgtttgtgtancgccatttggcnttgcacatatatttctcatgcttattacatgatgacaagggaaccaaagagacacaagtttccagccgatttttttttctttccagtttaataatagtgagaaaaaaaaaaaa

SEQ ID NO: 547714 - DNA, 379 bp, Homo sapiens
ttgaagcatcctaacaggctcagcaccaacttaaaaaagactggcaaacttttaacacttttccttctcagaattcaggcctgtctcagaatgctacaaggtacaggccaatttgaagctctgtatagacgctcctttttattagggcccagtctcattccaggacaccagaacaacttggactgtggcccaaaaaacttgtcatacctactattttctgtctagtcgtactcctattcaccattctcaactactcatacatgccctgctcttgtttacactggcagtttacactgtttctccaagccatcacagctgatatctcctggtgctatccccaaaacggcactctgaactcttaaatacataatctttcctg

SEQ ID NO: 547715 - DNA, 116 bp, Homo sapiens
  misc_feature (22)..(22): n is a, c, g, or t
acagggacggggtagaaccagngctgtgggaactccctaagtgtcaaatggaattttcaagagatgaccctaatctttttccaattgttttatcaaggtgtctgtactaggataag

SEQ ID NO: 547716 - DNA, 334 bp, Homo sapiens
agacctataaggaaagtttgagagagcctgtgaatgtctcaaatccattcacaagtagatgtataaaatgtcactgaaaaggtaaaatgccaaacgtcgtttccaacggttcctctgaacttcttcccacataccacaccacaccccatatgcacagagcccaaaggccacacttttgaaaaaagaaaaccaagaataagccctgtgtgctctttaagagagaaaggaagaatctagagtctgctgggccctttcacatgtggcctgtggtgtgtaaagcatcttcacaacaacgagcgcggctctgttataggagagtgtctcaccttgtgtc

SEQ ID NO: 547717 - DNA, 325 bp, Homo sapiens
atactggagagaaaccctataaatgtgaagaatgtggcaaagcttttaaccaatcctcaaaccttactacacataagaaaattcatacttcagagaaaccctacaaatgtgaagaatgtggcaaatcctttaaccagttctcatctcttaatatacataagataattcatactggagagaaaccctacaaatgtggagattatggcagagctttcaacctatcctcaaatcttactacacataagaaaattcatactggagagaaaccctacaaatgtggatatggcaaaacttaatttgatcctacaggttaattacacttagg

SEQ ID NO: 547718 - DNA, 1211 bp, Homo sapiens
  misc_feature (331)..(331): n is a, c, g, or t
agtgggcaggtcctgggggaccagacggtctcagacaatgtagctccaggaaaggtccaatcagggaagtaaggtagcgtcaatcaaggaaagttcaaatgtgctgtctagacggggtggaaacatgattatacagagcatctcactagtaacaatagcgaagaccgaacgaggcgcacagacactgctcgagcaacctagaagaagccgaacgaagacgaacatgaggatgccctacagtgaggaccagggcaatcagagacatgagctgaatggagctccgcaggaggtgtgcaagtggagaccactgagtggcccgtcctgggaagangtgtaaggcctgtgctgaacacagacctgcagtgacgtttctacgcatggcgtctgcagatagtgcgctcaggcctggcttggccgccggcttgaggagttcctgagaccagagcgtcggccttctacttgctggatgacagtggtgaccgcactcgagctcccgtgcgtggaggaacgaccggcagcgagagcgcacatgtgctggactgtcatgcaggaccatttcagacgtgcgtccagcagtcatagacgagctcttccaggacaggttcttcacccgggagcccgaggatacgctaggcactagctgcccttcagtcgtggcccaggggaggcctcgactgtcttctttcgcaagttcccgcaatcggtccgggcgttgatgcgcttctctccgtgcgatcgcactggaacctgccacgccagtgttccagtgctgtcctcggagatagatacaaggagagctcaagaaggccatgggacttccacttccacaggcccggccttcaagaaccgacaacagattcctacgaaaagggacgaggaccggactgtggtggcgggagaactcggcacaaactcagggcggccagtggatgaaggacccaagtgacaagggcgggagaaaattggatttgtgaagttgctcccgaaaagccccccaggggaaagagtggggggaagccaaaaataccgcgggaggagaaagaagcaaaaaaaaaaaaagggtatgaaccaccagagagaaggaacacactatctggaaacaggacaatggtcggcagacatacgtaaacaaagacaaaggagcgcgacacgaaagcagcacaggagagagacaaagagacgacaaacaagacgaacaaacgcacacacaa

SEQ ID NO: 547719 - DNA, 482 bp, Homo sapiens
  misc_feature (112)..(112): n is a, c, g, or t
gaaatatgtaatttttatctaatatgattcactcttccttaagtctgaatataactcctctaattgcagaaatgttgtcatatggtcaccacatacaactttcgggcctgtncagtggttcctggctcctatagtcattagttagaagcctagtaatgctgaagtcctatttttctgaactccctttagggaaggagttgggtcatgtaggacaaggtaatgtttgacattatttttgtcaatcagttgtggaactgaagtgactcccctcaggcagggtttgtggctgaatatttagtgtctgaggcagttaactagatgcaagagtggaggccattgtagacataaacccttgtgtgactttgggtaagtctgtggctacctctcaagaatgttgtggagaattatggaaaactggatacgtttctgtgaagatattaagcactgcaaaatgttaagtgtgaatctggctgggatccaga

SEQ ID NO: 547720 - DNA, 111 bp, Homo sapiens
ggatttgctggtgcagtacaactaggcttaatagggaatatcaggccaaacacagaaacagacaaactagacatccaacataaaatgcccacccagctcacgtcctgacca

SEQ ID NO: 547721 - DNA, 819 bp, Homo sapiens
ataagaaagttgatttatattatatttacatgcatcttctaagattgcctttacagtagccaatcagaactttaaagaaaaagaaaggctaacaacatagatcctatgtgtggcccttaagactaaaatactttgcacgcgtgattgaatggcttcacttaagttgtcgaattctccttatacatttaaagtgtacttccgttaagaattattccattttaaatgggtaacttgcagcttccgaagtattttccgttaaacattccagttgtgtattactaaaacgatcaaaatatctctaggtggtagtacaagttccatttataacgtggacacagttaggctgtaaggtttaagacagttacgtattagtggtttgtgcaagttgctcatagaaaagaacagtgaatactggttttcatacaatttttgtaaagacattcttctcccagttggattccaaatgcttttccccaaatggtctaatatatcataagctagtgtttcctgtgtatttaatttttccttccaacacaatatttcaggaaaagtatgagtaacctttgtgagtaggggagacaacagaataagaaatcttttcaattgttgtggagggggtagcgggtcaatgtggattgaatgccgttcctgggggtgtgtttaattcctgctaattttctccaaacaagaacagggttttccttaaatacttaatttcgcaatgttggcaaagaatggctggtaaatagactcctaatatttagaatactgccttctcacagttgctgcaaggtaaaaatctttccaaattaattctaa

SEQ ID NO: 547722 - DNA, 1041 bp, Homo sapiens
  misc_feature (1041)..(1041): n is a, c, g, or t
cggcattgagcggagtccgctggctgacccgagcgctggtctccgccgggaaccctggggcatggagaggtctgagtacctcggccgcggcgcacgctgcatcgcggagccaggccgaggacgtgagggtggagggctcctttcccgtgaccatgcttccgggagacggtgtggggcctgagctgatgcacgccgtcaaggaggtgttcaaggctgccgctgtcccagtggagttccaggagcaccacctgagtgaggtgcagaatatggcatctgaggagaagctggagcaggtgctgcagttccatgaaggagaacaaagtggcatcatttggaaaagattcatacccccgatggaagtataaaggggggggagctaggcctcctaatgatattgcgggttgagggcgtaacgttggacttatttttgcccaacggtaagtccattttgaaagtcacacttccctggggttatatgaactcgggcaccaacaatctagaccctggttgattcattcgaagagcaagacagaagggggagtacagcttctcctggaacatgcacaagtgcacacgggctgtgattgacgtgtccgaacgatttgtcaccacgagccaagtctcagcggatttgcaacagttcgcctttgactatgccacccaagaaaggggcggggcaaaggtccatttgctgtccacaaggcccaacatcatgacacttggggatggttgtcctgcaggctgtgaagggaagttgctgagcggtaccccaaaatccattgggcacatggatcttgacgcctggcgctgcactggttccgaaatcttacccgttgttgtctctgtgttgcccccttttggcactttttcgacctgtgctcgcggtggggcatgggtgtgccggggagaacaagagaagcagcgttgagggggcgcccatccgagggggaatacacccagcccggcaggcggcaagggacccgaacggcaaaaggggcagcgagccgcccacaggcgcaccggcgtgctcggcccggcggn

SEQ ID NO: 547723 - DNA, 225 bp, Homo sapiens
  misc_feature (7)..(7): n is a, c, g, or t
  misc_feature (10)..(10): n is a, c, g, or t
  misc_feature (23)..(23): n is a, c, g, or t
  misc_feature (67)..(67): n is a, c, g, or t
  misc_feature (118)..(118): n is a, c, g, or t
  misc_feature (132)..(132): n is a, c, g, or t
  misc_feature (141)..(141): n is a, c, g, or t
  misc_feature (145)..(145): n is a, c, g, or t
  misc_feature (147)..(147): n is a, c, g, or t
  misc_feature (152)..(152): n is a, c, g, or t
  misc_feature (161)..(161): n is a, c, g, or t
  misc_feature (170)..(170): n is a, c, g, or t
  misc_feature (184)..(184): n is a, c, g, or t
  misc_feature (193)..(193): n is a, c, g, or t
  misc_feature (205)..(205): n is a, c, g, or t
  misc_feature (222)..(222): n is a, c, g, or t
  misc_feature (225)..(225): n is a, c, g, or t
ggggcgngcnggggaggggaaancgtaatttgcgttgaaccgtgttgtgagggggagggccgtgtangttggggtggggtgtgggggccgggggccgccccgggtacccgaggcagtncgcgacccacgagncacataggnaacngnaccgncaaacgccngaagagtancgtgttataagtgncacatgggnaacacagcaagnaaagacgggaacggccnccn

SEQ ID NO: 547724 - DNA, 301 bp, Homo sapiens
ccctgtcatcacgcatgtacatcaggaggcacttagtgcagagcagccacacacttgtacaagcaaactggcagcccccgtgtgggcctcatcgggggcagaagacaaagatgagggccctgttgctgaacaagtaaagaaatcaacgttgaaccctaatgctaaggagttcaatcctacaaagcctctgctgtctgtgaataaatccaccagtaccccaacttctccggggccctggagtcatgcaattccctcgataccgctgctgacagcaggccagagtgggctatacagcccccag

SEQ ID NO: 547725 - DNA, 152 bp, Homo sapiens
tcgagctcggtaccgtctgagcagctgggaaggtggggaacggaatgctgacagaggcaggtgaggcagacccagcctgtggagagttttgctgcctcgaaaggagttcggctattgatatctaagtggtgataggaacaccatgtgaagcc

SEQ ID NO: 547726 - DNA, 137 bp, Homo sapiens
cacggatccccgtcactggcattcactgtggtcatagggtcatagaattcttgaacgattctattgccagtaccagtgctgtggaatctaacaatagccagacctgccagatagaaatatcgcgcccccaagtgact

SEQ ID NO: 547727 - DNA, 376 bp, Homo sapiens
gatctctcgcatcgacggttctctgggatcgagagtgtacaggaagaccccaaacaagaaaccaggaggagaggttctttctagcggagacactaaaggattgcttggcttttcatgaattgggaatattctccaagggattgggaacgaagggcccatcttcggggcaggaccccaggcagatgtgtcggacaagcaacttcttttcctctggtgaggagacaagacttggagactcagcgatggcagggcagggccaatggcacactgggcccacacattcctttctacagagaatttctatgaatgccactcacttgccattccagggccaaaggacaggaggtttgcatatccgccccttgtatttgatttg

SEQ ID NO: 547728 - DNA, 762 bp, Homo sapiens
  misc_feature (210)..(211): n is a, c, g, or t
aacgaggtattatagtcgtccctggtttatttcgttacccttgctggcgttacgttgtactgaagtgtgccgtcgtttccactttccggctgtgaccctcctcgccgccgccgcttcgctgcgtcctccgactccccgcgccgccgagaccagtgctcccgctccggttgcggccgcaccgccctccgcggccgccccactggggtatanncagcgagctgcgtgtcgttaccttgggtggacaggaaccattgaatctggcatttcccccatcttcctctttggcctctgtgacgcttgccttccatctgctcccacttcaatccatctgtctctcgaggaactaggctccaacacggggatccaggttttcaatcatgattgtgaaggtcgaggcctcatgacaacattcgtgatctctccccatgggaattgcgtcggtcctggggatgcttcagctgggggcggactgtgcaggaccaagaagcagcttcgcccattggtgatgagataacggcgtaaattggagttggtaaacatattaacagaagatcaacaaggccatcgtctccagaagaataaagacttgtgacagtggctaacgccgtgttgtaagaatgcctctgaaattgaagttgccttttgttccagggaacaaagatgtgttccagtgtgaggtccggaatgtgaactttgaggatcagcctctgcttgtgatccctcagtgctgggttacaattaacccggtatttttgacacttc

SEQ ID NO: 547729 - DNA, 225 bp, Homo sapiens
  misc_feature (48)..(48): n is a, c, g, or t
  misc_feature (151)..(151): n is a, c, g, or t
  misc_feature (200)..(200): n is a, c, g, or t
tggtactatttcctgtaagaattgactcatctggagcctatgatagtnaaaaaactcaccttaccgaaagatttcttatggggcggcgcagttgccgctcatcaggtcgaaggcggctggaacaaaggcggaaaagggccgagcatttgtnacgttctgaccggtggcgcacacggcgtgccgcgcgaaatcaccaaagnagtcttgccaggaaaatactatcca

SEQ ID NO: 547730 - DNA, 324 bp, Homo sapiens
gccttagcctcatacgcatgagaagtcatttccacatttaaatctttctttggcagggcgcggttgctgatgcctgtaatcccagcattttgggaggccaaggcgggtggatcacctgaggtcaggagttcgagaccatcctggctaacagggtgaaaccccgtctctgctaaagatacaaaaaattagccaggcgcggtggcgggcgcctgtggtcccggctactcgggaggctgaggcaggagaatggcgtgaacccgggaggcggagcttgcggtgagccgagattgcgccactgcagtccgcagtccggcctgggcgaca

SEQ ID NO: 547731 - DNA, 211 bp, Homo sapiens
tgacctacggagttatatgtggcgttacgtagtcggattcgtataccactgcgccacgacgggcactcctagtcacataatatcataactaacttaaaatttttactattcggagttcccactagtggcacaacaggatcagcagcatagctgcaactgccaaggttctatcctccacccagcatagtgcgctaaacggtaacatcacagg

SEQ ID NO: 547732 - DNA, 173 bp, Homo sapiens
tctgagctggctcctattccaacctgtgtgtccacgttgcacaatatgcggtttacttggacctcgtgcctcatctttcttcttttgcgcttcagccgtgcgcattcgcttcttcctccagcttggctctcatggctgcagaggtttccaaaaaaatggcgctaaggccgaga

SEQ ID NO: 547733 - DNA, 669 bp, Homo sapiens
gcaatctgttagggtttgtgtctgtcgtgtggaagctctgttcattcggcttttgcaataaatcttgctacttctcagtctttgggtccacactgcttttatgagctgtagcagtcaccacgaaggtctgcagctgcacgcctgaggctagcgagaccacgaacccaccgggaggagcgaacgactccagacgcgctgacttaagagctgtaacagcttaccgctaaggtctgcagcttcactcctgagccagagagaccaggaacccacctagaaggaacaaactccggacatgccgcctttaagagctgtaacactcaccgccagggtccgcagctgcattcttgaagtcagtgagaccaagaacccacccattccagacacactgtcatcagtgggatatctttttaaacagagataacattgcacaatcttggaagtggaaatagacctcagctggggtttagtcctgttttcttcttagagcagaagtcctgggatgccgcttctggactgattgtcagttttcttctcctgcccttgagctattctaatggcagacatttgtggctttacacaagcaggctttcagttagaagaccttgttagctcacgtcaactgctgttctgagcacggcctcccatgtggggagactctggccctggcct

SEQ ID NO: 547734 - DNA, 396 bp, Homo sapiens
  misc_feature (1)..(1): n is a, c, g, or t
  misc_feature (76)..(76): n is a, c, g, or t
  misc_feature (87)..(87): n is a, c, g, or t
  misc_feature (90)..(90): n is a, c, g, or t
ngcccgcctgcattcgactctagaggatccccagtggtgttggtggtgatgaccgaagaaaaactgcaccagctgnaacaggacatnggngcaaaccgaagcgcaacttgacgaactgatgcagcaactgagtgccacaatgcggcagttcgaacaacccttcagtgaagcccagagcgcactcgaccaagctgatgcccgatccagcgaattgcatcaacaacttgggacggagttcgaacaacacgagcaggcgcataaggatgccctcgcggcgttaccaggctgcatgcgcttctcgccacacgcaaaagcaccgctctctctggcagaagctcttgagtctgttcaggaagatgcccgaagaaatcgagctgaacaaggtcaccgcatcaa

SEQ ID NO: 547735 - DNA, 141 bp, Homo sapiens
cttagtaccgacgtttgcagccagacgggtagggaatgcaagagagtgtaaaataaccaatctgaataaacagccatctcccaggtgcataatgcgcaggtcagctatttccaggtgaagtgcttgtgcttaaggaactct

SEQ ID NO: 547736 - DNA, 221 bp, Homo sapiens
gtccataaccataaccatatcgatattcagacaccgacatcggaataggagactgtagacgtatcccatccaaatgcaaatgcaatatcatggtctaggtattataattatgaaaatgataataatgctaagtctgtgtgtgcgccaactcaaaattcaggaagctgtttgaatcattagtgttgctttcttctaaatgaacacccttctgtcgtcttctc

SEQ ID NO: 547737 - DNA, 86 bp, Homo sapiens
gggacgcaagcgggaactcaaggtggggcagccgctggggagggtctgacagagcctcagttaaacacgtggcccagcaaccccac

SEQ ID NO: 547738 - DNA, 192 bp, Homo sapiens
  misc_feature (29)..(29): n is a, c, g, or t
  misc_feature (121)..(121): n is a, c, g, or t
  misc_feature (127)..(127): n is a, c, g, or t
  misc_feature (167)..(167): n is a, c, g, or t
  misc_feature (176)..(176): n is a, c, g, or t
ttataagtcttgtacttcttttgtaaaanttattcctaagtattttgttctttttgatgctaatgtaaatggaattgttttcttaatttcattttttaaatgttcattgctagtgtatagngatacnattgatttttataacaggtttttgagatgtaattcacatnccatacagntcattcattacaactg

SEQ ID NO: 547739 - DNA, 1229 bp, Homo sapiens
  misc_feature (103)..(103): n is a, c, g, or t
  misc_feature (139)..(139): n is a, c, g, or t
  misc_feature (142)..(142): n is a, c, g, or t
  misc_feature (144)..(144): n is a, c, g, or t
  misc_feature (206)..(206): n is a, c, g, or t
  misc_feature (385)..(385): n is a, c, g, or t
  misc_feature (555)..(555): n is a, c, g, or t
  misc_feature (573)..(573): n is a, c, g, or t
  misc_feature (612)..(612): n is a, c, g, or t
  misc_feature (647)..(647): n is a, c, g, or t
  misc_feature (668)..(669): n is a, c, g, or t
  misc_feature (961)..(961): n is a, c, g, or t
  misc_feature (1053)..(1053): n is a, c, g, or t
  misc_feature (1225)..(1225): n is a, c, g, or t
gactgtgctgtcagctgatatgcatgaatactgacctagtactctgcacagaaaactcggcatccgtacgtgtgctacaccctcaatttcttggacttgtagntggaggttcgtgcttcaagctcgtgtgtaactactncgngnagactgcgactatatctcggtatgccataagacggagtcggattctaaacaggtaacccggncctgtgtcaccgcaacccaccatgactggcgcttactgtggactctctcaggggtgttgtgtattctcgtgtatggcctggcagtgttgcgtggtgtaggccttgacagtgaattgcctagctgcgtcacctacaagggttacttacctacactaaaactgaaatgtttgtacctccgncaagcagactgatgcttcgtagagtgccaacaatagcagagaactacaacatttgggtgtatttctctaatgggtcagttgacttccgataccgacacactgtgtctgacacattctatccgtcccagggaccgggagactgagtaaacagacactctctcagggccagngtcactgacagtctcttncgggttgtgactcaggctctatctgtgttaatatgtatncgcggctaggagctaacacttagaccgaccaagtncgttgacttagtgagtgccanncacagggactctctttgtatcacactctcactctctgtagctgactcagtttttgactcatagatcggctgtataagtatgagggatacagtcaacacacatagtgaagtcttaaaaagcgatatttgacagtcttgggagattatacactcaaaacacttaatttggtgagttggaaattcacttaagtgaatagacatcatttctaggggcttcaccggtatagattgatttgatgctagaggccctattaaggaaaatcagtggtttctacattctgagaatctggtancaatgactcaggtgtagtaaccacctttcttttaaggatctagccaggaacaccgtggaattattttgacgctggtgtccctgcatggttgnattcattcctctttacctcacagaccactgaagggagaattcaaggagatcgtcgtttggtcgaacagacagcgagattcctcgccaacaacagagcgcaatcctcgtgtcaacaggagccactcctctccaacaacattgtgtaatctattacacccggaagaccgccctntagg

SEQ ID NO: 547740 - DNA, 414 bp, Homo sapiens
gtcgtatgtgaataccgcattttgtgagtcccgcattttgtgtgtgcgttcatcccttgatggacacggttgctcccaccttctggcttctgtgaacagtgctgctgtgaacgtgggtgtgcagatacctcaagtccttgctttccattccttgggcgcacacagcagatgcggtttgctcggccctctctgagcccaccgagtaggctgtgtctgtattttcaccaggactccttgggatgctgagctacagctagcgtggcagagggcaaggaaggcacttagacagctcagttgcctctgatcacgtccaccgtcactccaacctgccctcggggtctgacgcgcacacacagcagcagagacagagatgggagcatgagagctgcctgcaaggggacaatcctcaggccc

SEQ ID NO: 547741 - DNA, 111 bp, Homo sapiens
tgtactgagaagcatgacaaccttctacatgggaccaacaaagaaaaaggagaagatggtgagtgcagcattcatgaagaggtacatccatgtggccaaaatcatcaagcc

SEQ ID NO: 547742 - DNA, 208 bp, Homo sapiens
aaaaaagaaaaaagaattacgtgaacaaagaattagctcctttcatcgttagggatgtgaagacattaaggaagatttccctgaggaaaggcatatgacaatacccagctccgtatcaccttataattaaaaagcagcacctaccattctccgagctcatggtcctgtgcaatgtgctacacacattccagtatccgatctaactctc

SEQ ID NO: 547743 - DNA, 131 bp, Homo sapiens
agcgtgtgccgaatcgggcactgtgtggagccctggagctgagatcaggatgttccgcttcatgagggacgtggagcctgaggatcccatgttcctgatggatccctttgctattcaccatcagcctctgt

SEQ ID NO: 547744 - DNA, 788 bp, Homo sapiens
agcggaatagagatgcagcaccgtgatacgctatgatcatcgccgtcaaacgattcatccgtggcttggcggcgctgcgaatgacttaagctgcggcgtctgactctcgtctaactcggaaacgatcatcacttcctgacagaaaaacaaagatttatacctctgaccgtaccttgtcgtaccacagctatgtcgtcaagacgaacaagcatgattgtttcctcctttgaccaagttggaaacctctaagcatcacgaattcgaggttgaattcaagcgtaaattaaacgacacgagtcgtcattccccggtagacatttgtacaacatgaccgttgaatagaaacgtacgtcggaagtatggcaaggattgttactcaagaactataaagaatgtagcatgaggtccatcacccaatggagcttgtagatttactttgggaagacaagggctacatatctggtgatcatattaacttcggtgagctcatcattgtcatcatttcctattcttcaacgttcttctgaagagaaaattctttactcagacaggttgagcctagaaagacaaaagctgaccgtatgtcctatcatcaatgggggaagaccaccttcgtttgttgaacgtttcaacagaattttataagctcgagatacgaaatatttctaagtctacagaagttaatatcgttggatttatatgataaccagattgaagaaattagtgggctttcgaatctgagatgttcttcgtgtccttctgttggggaaaaaaagaatcgagaaaat

SEQ ID NO: 547745 - DNA, 340 bp, Homo sapiens
gatgtcatagcaaatggggtggaaagtagagttcatcatttactccgcccgactcatgtataaactctcccactatcagcatcctccaccagagtgtacatttgttacaatcagtgaacttatattgacacttcattatcaccccaaatccacagtttatatcaagcttcactcttggtgtacattcaatgggttttggcaaaagtataatgacatgtacccaccattacaatatcatacagaggagtttcactgctttaaaattcccctgtgctctgcctattcctccctctcttccccctaaccactgatctctgctattgaaacttctaaaactagg

SEQ ID NO: 547746 - DNA, 278 bp, Homo sapiens
ctgcctcagccatgcttcatttttattggatgacagacattgtgaattttacattgctggttgctagcttttgttgtattctacaaaatagtatggaagtttattctgatgcaaaattaagacactcagaatcggctggatccttttgtggcttgctttccaactttttttaggggatcccgagcagcttttagtctagggctgaattagccccattactaaaacatggtacccttctgaagattccactcaacaatccatgtattacgaggtctttt

SEQ ID NO: 547747 - DNA, 289 bp, Homo sapiens
taaattcgcggccgcgtcgaccaaaaaataaattggctgggggcgtggtggcatgcgcctgtggtcccggctgctcgggaggctgaggcgggagaatggcatgaacccaagaggcggaggttgcagtgagctgagatcacgccgctgcactctagcctggctacagagtgagactccatctcagaaaaacacacacacacacacacacatacagaaaagggtagaatcgccctgttgaatggaaagtggggggtctacgcacttggttatgctttataaacttcttctg

SEQ ID NO: 547748 - DNA, 548 bp, Homo sapiens
  misc_feature (166)..(166): n is a, c, g, or t
  misc_feature (255)..(255): n is a, c, g, or t
  misc_feature (370)..(370): n is a, c, g, or t
  misc_feature (397)..(397): n is a, c, g, or t
atttaatattataatctatttaatatatttatgtatgtacatatcttcctaaggagcaatagttcatcttttgctaattcaatgtttgctgtatgttttttagaacataactattatacagtaaataatgacaattgactgcgtgttactttgagaaaagtactanacctttctgaatttgtttccttaagtgtaaaatttgtgaatctctatctccctgtgtaggagctggcacctacagaatttgtctttgtntttctatgacaaagtcttccctaggctgagttggatattggactgaatgcgtcaggttagagcccagaggtttgactggagttggcagggctgcttgggtctgctggaagttctngggtcctcgtcctgggaaacctggccnttcacattcctcctcctgggggttttggctccttgccgggggtccaagtcccatcctaacccctccctaacaaccccttggccaaaaaattggtttcccctttggaatttcaacatccccctggtgtggttaaccggtttataaaatacct

SEQ ID NO: 547749 - DNA, 555 bp, Homo sapiens
tcgcccaaattagtaggatgcattctattcttataggctgagatggtacccattctgtatatgtccacattttctttatccattcatctgctgatgaacacttaggttgcttccaaagcttagctattgtgaacagtgctgcaacaaacacaggattgcagatatctcttcaatatcctgatttcccttcttttgggtagataccagcagtgggattgctggatcatgtggtagctcagtttttatttttgaggaactgccaaactgttctccatagtggttgtactaatatacattctcaccaacagtgttcaagggttcccttttctccacatccttgccagcgtttgttactgccttttagatataagcgattataactgcagtgaggtaatatctcactgtagttttgatttgcatttctctgatgatcattgatgaacactttttgatatgcctgtttgccatctgtatgttgcctttcgagaaatgtctgttcaaatcttttgcccatttttaattttgattactacacctattcctaatattctggtt

SEQ ID NO: 547750 - DNA, 525 bp, Homo sapiens
tcacagtggttggtaataagtaaaataccctattgtaaacttacaaccttggttttggttttatgtgggggtaaaggaaagcagaaagggaaatttaatcctcctcctttccgaaaagggcgtgggagatatttgagaaatcccccaaggtcccttgggacctactgatgagaagatagtttaatgtatggggagaagaaatgggatacttttaaaacctttttggggcagttcaagagggttgtaaatttaaaaatttggtatagggtatttcataacaaaaatatggtatttctttttgggtggtaattttatcttggaaaccggggtaacattatttatatgttattgggtggcaagaaaaaacaatgtctctacaaatgtaatttggtgtttatattttggtacccatcccatcttggtgggctcttaactggtaatctctggtggtcatggtccaatcatgttggtaaaccaatgggcattctttggaagcagtggtagatggagaattaggaatggtgg

SEQ ID NO: 547751 - DNA, 412 bp, Homo sapiens
  misc_feature (1)..(1): n is a, c, g, or t
  misc_feature (10)..(10): n is a, c, g, or t
  misc_feature (86)..(86): n is a, c, g, or t
  misc_feature (110)..(110): n is a, c, g, or t
  misc_feature (308)..(308): n is a, c, g, or t
  misc_feature (333)..(333): n is a, c, g, or t
  misc_feature (342)..(342): n is a, c, g, or t
nccgccgaanccacccgggcaggtctcagccacccgctctcctccggagagtcggctctgcggttccggcgcgcccatggtcggcnatgcggaccgggaggccggcccgngtgatgcggcgtgctgagaggccggcgtggagaccatgccgaccccgcgcggctgctccgggccttgccacttcctggctccggcttcgtgttgttgttgctgcccgctctgagcgttcctggggcggtaccgtcgatggtggtcagggaggtgcaggagtccaagtctcccaagcccgggccgcacacgctgtcgcngcttcctccgggccccaccgcggcncaagccttnggggccaagctcagtcttgatgctgccgggcttgccaggcgcggagagcgcaaattgacagcattcccgg

SEQ ID NO: 547752 - DNA, 397 bp, Homo sapiens
tctgtctcagcaacttccgtagtttacagactttggagagcccaagctaactatgggcagaagtggtacacccacacagcacagctgctttataaaagtgtggctagactgcttctttaagcagatccctgatcccactcttcctgactgggtgacacctcccaaccagtgtctccagccaccacctaccacctggttgtttgggccagcaaccaggtctgtacccctctgggacagagctcccagaggaaggggcaggctgccatctttgcagttttgcagccttcactggtgataccctcaggtactggaaaacctaaggcgactagggactagagcagatgcccagcaaaccacagcagccctgtgaaaagtggccagactgtaaaaaggaaaa

SEQ ID NO: 547753 - DNA, 166 bp, Homo sapiens
gtagagatgaggtcttgctatgttgcttgggctggtcttgaactcctatcctcaagcagttctcccaccttggcctcccaaagtgctgggattacaggcgcaagccaccatgcccagccagtctgtttccttctttccacccagtggtcccttctgtcgtcttctc

SEQ ID NO: 547754 - DNA, 759 bp, Homo sapiens
ttatactttgaagctttgaggaacaggatctgttatcttatagaggcccaggttacttggaaatagataaattaagaagttttgggtatctcatcaaacctaactttctgttagtcacaatatgaattccaattaagtcaatatatatagggtatattataagtacataaggaaattaagtcagacgaaagataatacactaaggcaactgataatgtagatatgataatgaatatagataaatctgaattattaaggtgtatattagaataattatgatatatgctatgatcttttataaaaacttatatgattattacagattatttatttaaagatgcataacgtatattaaggtacacatttaatgaattattattaagaagttaagaaccattcatgatatacgataatgaacgttcatattatttattaacaacttgtttctacatcatacaatatacataaaaatattgaccacttatgacataaaaggaaatgatgttaactaattttcaaaaatctgttgatcataataaattaatttcaattaaaattataaggaactatctgttggaatatctatttagggaatcatatgttacaatgaatttaaatactcttgtataaatacaatttacagctaatatgtcaatactatgagataaaactgatagtaatatattcttagattatatctgtgtgacttctcatatcgtgtatactgaataaataattaaattaatataaccagatgca

SEQ ID NO: 547755 - DNA, 270 bp, Homo sapiens
  misc_feature (43)..(43): n is a, c, g, or t
  misc_feature (107)..(107): n is a, c, g, or t
  misc_feature (114)..(114): n is a, c, g, or t
  misc_feature (130)..(130): n is a, c, g, or t
  misc_feature (152)..(152): n is a, c, g, or t
  misc_feature (180)..(180): n is a, c, g, or t
  misc_feature (257)..(257): n is a, c, g, or t
caagttcggatggatccgagccgggctcccgcgctccggggangtcaggcgccagtgactggagtcctgggtggcgcggggctctcggcgcattttgtgtggggcgngctcggnggcggggcagcgggcnttccaggcttgcttgttttttncaccctgactcgttaccccagacatctncgcagatgttagttcacagtttttcagccatggacccgtcacgacgcaccagcaacgggacggcacggttgcccagntgggacgtgtagg

SEQ ID NO: 547756 - DNA, 163 bp, Homo sapiens
cgcccctcctacctcttcatgtttacaaaaacccagtatctttgcccaaaccaggggttgggggagggtctctggctttatttttttgctgggcaaaatcctattttatattttttaaagccagtttaggtaataaactttattatgaaagttttttttttta

SEQ ID NO: 547757 - DNA, 133 bp, Homo sapiens
acctgtagtgagtagagatcatgccattgcactccagcctaggcacaagagtgaaatctatctcagaaaaaaaaaacaaaaggtgtctatggcaagcaaatacagattttcaagtgatattttacataattac

SEQ ID NO: 547758 - DNA, 335 bp, Homo sapiens
cccccgtttttttggtttttaaaaccttaaaccccggccccctttccttttgggggaataaattatccccccccaaaccctagggggggggggggaaaattaacggggctgtttttttcaaaaaggcccctttaaaaattcccccccccaagggggccccccggggggggtgggttttggaaaaatttttttggggccccttaatccaaaaaaaaggggggattttggggaaaagcctttttttcccggaatttttttaaaaaaaatttaacctcccgggacgggcccggtcctttttgttggtaaaccccctttaacccttttcccagggttta

SEQ ID NO: 547759 - DNA, 584 bp, Homo sapiens
gcacgagtacaggtaaggaatcaaaacagtgggtatacccaggttgtatatctagaaagtgatagagctgggattttaaactttataatctgattccagaatctctacctttaaacactatgttaccacttacttctcttcaaattttattgagcattagatgtttccagtatttagaagtcaaatgcttcgtttttaataggaacttacacagtcttttatgtttttttatagccctcaatgtcactgatgtggattctcccaaactcgatactttgtttgtttttatgtccccataataagtctttaagaaaacagggcaagtgagctcaaaatcaaaagaaaacccaccaacagtgaatgcattcagggctatttccaggtctttcttttgaagaaagataagactcagtccagagagcacatctgtgacacaccgtgcctcttgcctttggtgcgtggcagtcatctttggctcatgctgtacattattctacattagaaaactcactgtatgttgctaaataattttttgaaaacaggcagattaataaatggacatcttaatatttgaaacaaaaaaa

SEQ ID NO: 547760 - DNA, 257 bp, Homo sapiens
ggtacggaaaaaagccagctgatgctgacacttaatatggaaggagaggatggaaaatatcctgaagatacgggctagaaggaaaggacaggtgggacagtggcgcgatagagtaagtccacgcaaaagtgctacccaatgagggccacgtgtgtatgaattggaacaccgaacatgtgatgcaatgactacccgcaatgagtatactatcaatgtgccccgaaatgctttaatgatgacatgtgtgcatatgtgtg

SEQ ID NO: 547761 - DNA, 105 bp, Homo sapiens
tcccgtggcggagaggctggagttccttcagaggaagaaagcattcctgcggctatgtgaggaggagacaccgcgatgagccaccccaagcgccaccccagttag

SEQ ID NO: 547762 - DNA, 178 bp, Homo sapiens
aaaatctaggcagctgaacaagctcttcatccctggcccaggaaatagcctattaaaaaatgctgtccaggccaggcacagtggctcacacctgtaatcccaggacttcgggaggctgaggctggaggattgcttgagttcaagaccagcctgagcaacacagtgaaaacccatctca

SEQ ID NO: 547763 - DNA, 89 bp, Homo sapiens
  misc_feature (47)..(47): n is a, c, g, or t
  misc_feature (55)..(55): n is a, c, g, or t
cacatgccctgtttcctttagctgctgtactttctgcagatttccantcacctgntagcgcaggaacgcaccgccggaccagagaacag

SEQ ID NO: 547764 - DNA, 114 bp, Homo sapiens
ccttttctataacttggtagtatccttgagtacctcagtggtgtagtcattgagaataaaagatcataatgtatgggaaagtgctttataaacctttaagcatctttatcaaga

SEQ ID NO: 547765 - DNA, 116 bp, Homo sapiens
caggccatccgcagacgctcacagcacttcttgattcctgggcagtcagtatctttcaagcagcggttggagctgcctctctcatccactttccaataaagagttccttctgctat

SEQ ID NO: 547766 - DNA, 335 bp, Homo sapiens
tacaggatcttcttggaggggacacagagactcgtagacacagcctacacgtcacgtgcatgcttggacccggtattgtatacgtgtctgtgtgggtggagaaagacggagtaactagctctgtggggactgtcactactggcacagctccccaacccagttgagggaaacccttgaagagctggagggctcaggaccaaacaagctccgatcggccctggaccctggggagggttcccccccggaacggggcccccaagaaccccacagaactccacctacggttgagtacctgagatggtgcagacgctcccaagccaggggtccggctcaat

SEQ ID NO: 547767 - DNA, 353 bp, Homo sapiens
tctgatttgctttccaaagaactttccctgcttctgcctcggttgcctgtgcttccgaggtcttacgcaaaaaaatctttgcccagactaatgtcctggagcatttctcctatgctttctttctttctttctttttttttaaagccattcttctgcctcaacctcccgagtggctgggactacaggcgcccaccatcatgccccgctaattttttttttgttttttgtatttttggtagagacggagattcaccgtgttagccagggtggtctcgatctcctgaccttgtgatccgcccgccttggccacccaaagtgctcagattacagacaagagccaccgcgcccgacct

SEQ ID NO: 547768 - DNA, 328 bp, Homo sapiens
  misc_feature (322)..(324): n is a, c, g, or t
  misc_feature (327)..(328): n is a, c, g, or t
ccggctcaaagtgatccctcccccatcctcggccctccctgagtagcctggaacctacaggcacatgcccacccatgccctagcctaattttttatatttttagaagagacaggtttcgtccatgttagtcaggctggtcctcaaactcgtgggctcaagtgatccacccaccttggcctccgaaagtgccgggattacaggcataagccactgtgcccagccaatcaaatgagaaaagggcagtctcttcaacaaatggtgttgggaaaattgaatatccacattcaaaagaatgaaattagatgcttaccttaaactgtnnnggnn

SEQ ID NO: 547769 - DNA, 161 bp, Homo sapiens
gatctaaggatcccgagatatttggaggtgggtttgattagtcattgttgtgtatgttatcatttgttttaaggttagtttgattagtcattgttgggtggtgattggtcggttgttgatgagatatttggaggtggggatcaatgaccaacaatttattg

SEQ ID NO: 547770 - DNA, 522 bp, Homo sapiens
  misc_feature (283)..(283): n is a, c, g, or t
  misc_feature (289)..(289): n is a, c, g, or t
agctaaatattaactatctcaagaatattcccagaagtgactgctaaatttaaatccctgctcacaatgaaatactgtacagcaggggttctcaaactttttggtcttaggacccttacagccttaaaaattattgagaactccaaagaactttcaattatgtgggtcataactactgatacttactgtattataacttgaaactgaaaaaatttttaaatatttataaacatttaaaaataataaacccattgtaagctaatgtaaatagcatgtttttatnaaaaancactttgttttccaaagcaaaaaatgtagtgagaagagaggccttcttttacattttaatatctggcttatgagaaaatagctgagtttctcatttctgcttctccatttaatctgttggtgtatattttatttaaagtacagttaacccttgaagaacgtgggtctgaactgtgcaggtccacttatacatggatttttttctaataaaagttgcaaatatgaaaaaaaaaa

SEQ ID NO: 547771 - DNA, 100 bp, Homo sapiens
gcgctgacgtgtcagtgcgctgattaagaatcacttaaactccatctcatctccgtgcctggtagctcaatggcgcatcctgatacttcttatcaccagt

SEQ ID NO: 547772 - DNA, 207 bp, Homo sapiens
  misc_feature (114)..(114): n is a, c, g, or t
agcgatctagaggaccgtcatcaaccttggctacagtagaaaaaacctcagaatcttatggcttgtgttagggttcgatgactcatcgaaacctattagtgtgtgaacatcaancgcttggtgaattctgcttcacaatgataggcagagcgacatcgaaggatcaaaaagcgacgggtgtaccggaggctcgaaatttccggtaaa

SEQ ID NO: 547773 - DNA, 504 bp, Homo sapiens
  misc_feature (105)..(105): n is a, c, g, or t
  misc_feature (107)..(107): n is a, c, g, or t
catggccacttcttagagggaagagcaaacaccatagaggaaagtgctcacagctggaggacatgggtgcccgccggggctcagccccaaggggggcacaagctnanagtaggcagggcccaggcttctgcccccatccgctggtggggaggttctgtggctcagaggaggtgggtttggaggacagctggactaggtgggttctggcccactggggcacaggattggccgctgtcttggttgcgggtgtgatgtagggagctgtggtggctgggcccatggtggtttgagagctgggcaggctggggtgggcactgctgcttggtagcccggctctgacctgctcacaatcttggcatcttagtgggtgtcaggtgggtctgaggcctgagcctgggcctgcacagtggtaggaagcacaggcagggcagaggggatggctggcaagtgggggtgcggtcaagttgggggtcttggtggccaagtaaagacagtgcttccgga

SEQ ID NO: 547774 - DNA, 299 bp, Homo sapiens
  misc_feature (4)..(4): n is a, c, g, or t
acgnatggttggcagaaggatgtccacatgcctttagcacccggagctggcagacaagaatgtgcccaacctttcatgtcatgaaggccatgcagtctctcaagttcccgaggctacgtgaactgaacagtttgcctggcggacatttctactcggtacgcttaccaaattatgggtatccaagtatctcctgtgattaccattcatctgcccccggttgattgtgcctgccacccgtacgccgtcatccgtccagacgactggacaggcctcgagcctaataggtcttggagggtgag

SEQ ID NO: 547775 - DNA, 705 bp, Homo sapiens
tcccaccccctttgaataatcatgtaagactctcataaagggagtctccctagttccagtcttgccatctcacccttaaaagcagcccacccgaaattctcacaatctcatggtgtactgtctgttctaactttcaaaatttcttttgcaataaattactctatgctgcatcttctttgctgtgtgtctcttgtttaaattcttttaaactaagaagaatcaaggtgtcacaacagccatcaacactatgtaatatatgtgaattgttccatttaatactcatcacatcctgtgaacgggttcattcctcattttacataggagagggatgaagtccagagacgttaaacggcttatgtttggtgttgtgtggtcagcaggtggtatggctggatttggctccggggtctgggcgctcaacattacacaacgggcagggatatcgaagaggtagaatttagcacttacctgcgaggcagggatgtgaatgatgaagagctcagatatgactcctaggattctggattggcaccctggttcatgataatgcttgtttctgggtcagaggaatacagaacgaggaacatgtttggaaagttgagagagtgacaaattagtctggatatttgaattgaagtaccttgaggcacatggtaaagaagtccatcaattttgtggatctggagtccggaggactcgggcaat

SEQ ID NO: 547776 - DNA, 109 bp, Homo sapiens
ccgactagcccgacagcattgggagagggactcaatcagccgcgggtagcctctggcgggagatgtgggtacaaggcagcttccttcagccctgttgggctagtcggga

SEQ ID NO: 547777 - DNA, 344 bp, Homo sapiens
agctcgcatgtactcgctaagttcatgtacatttggtggccaattgatttgatggtaaaggacgggatcgttgacctcgtctgttatgtaaaggatgcgtagggatgggaaggcgactgaggactaggatgatgcgcgggcaggatagttcagacggctcttctattccctgagcgtctgacatgtcagtattagttgttttgtcgtgagtgtaaggacccgggcgtacaggactaggaagcagataaggaaaatgattatgagggcgtgatcatgaaaggtgataagctcttctatgataggggaagtagcgtcttgtagacctacttgcgctgcatgtgcca

SEQ ID NO: 547778 - DNA, 421 bp, Homo sapiens
ctatgtggcccaggctgggctctagcaattctcctgcctcggcctcccaagtagctgggattataggaatgagccaccacgcctggccaaaactgattttttctttaagccgttttaggtttatagaaaaacttagcagaggccgggcgcggtggctcactcctgtaatcccagtactttgggaggccaaggcaggcagatcacttgaggtcaggagttcgagaccagcctgaccaacatggtgaaacctcatctctactaaaaatacaaaaattagctgggcgtgggggtgagtgcctgtaatcccagctactcaggaggccgaggcaggagaattgcttgaacccaggaggtggaggttgcagtaagctgagatcatgccactgcactccagcctgagtgacagagtgagactccgcct

SEQ ID NO: 547779 - DNA, 325 bp, Homo sapiens
  misc_feature (5)..(5): n is a, c, g, or t
  misc_feature (76)..(76): n is a, c, g, or t
gttcncctcccctaagaagtgccttaagaattgtgaggaagtataaaaatagtcaaagctggctgggccgcgggtntcacgcctgtaatccccagcactttgggaggctgaggcgggcggatcacgaggttaggagatggagaccatccctggctaacacagtgaaaccctgtctgtactaaagatacaaaaaactggccgggcgtggtggtgggtgcctgtagtcccagctacttgggaactcgggaggctgaggcaggagaatgacctgagcccgggaggcggagcttgcagtgagcagagattgcgccattgcactccagcc

SEQ ID NO: 547780 - DNA, 400 bp, Homo sapiens
cccgattacgcgtcctatacggccagtgcgactactgcacaggctcatgtgagcccatccgcctgcaggtccccgtggaggtcgtgaacatgtaccatgcctctgtacctggtagccaccaccagcccccctcagctgctggcctgtggtcccaccgtgcaccagacttgcagtgagaacacgtatgtgaaagggctctgcttcctgtttggatccaacctacggcagcagccccagaagttcccagaggccctccgagggtgtcctcaagaggatagtgacattgccttcttgattgatggctctggtagcatcatcccacatggctttcggcggatgaaggagtttgtctcaactgtgatggagcaattaaaaaagtccaaaaccttgttctctttga

SEQ ID NO: 547781 - DNA, 165 bp, Homo sapiens
  misc_feature (165)..(165): n is a, c, g, or t
ggtcaggcactgaagcctggtcaggcactgaagcctgtggagacggggtttcgccatgttggccaggccagtctcgaactcctgacctcaagtggtccgcccgcctcagacttccagagtgctggaattgcaggcgtgagcaaccacaccaggcctaaaatagtn

SEQ ID NO: 547782 - DNA, 232 bp, Homo sapiens
ctcccagattcacgtgattcatcctgcctctactctcccgagatagctgggactgcaggtgcatgccaccatacctgggttaatatattgtgttttcagtaaagacaagatttcaccacgttagccaggatggtctcgatttcctgacctcgtgatccgcccaccatggcctcccaaagtgctgggattacaggcatgagccaccacgccaggctggtagcagtctttccta

SEQ ID NO: 547783 - DNA, 233 bp, Homo sapiens
tactactactaaattcgcggccgcgtcgacagctgggtgtggtggcgggtgcctatagtcccagctactctggagtgcagtggcatgatcttggctcactgcaacctctgcctcccaggttcaatcgattctcctgcctcagcctcccgagtagctggggttacaggcgcctgccaccatgcctgactaatttttgtatttttagtagagacggggtcgacgcggccgccaat

SEQ ID NO: 547784 - DNA, 358 bp, Homo sapiens
  misc_feature (8)..(8): n is a, c, g, or t
  misc_feature (15)..(15): n is a, c, g, or t
  misc_feature (135)..(135): n is a, c, g, or t
  misc_feature (168)..(168): n is a, c, g, or t
  misc_feature (195)..(195): n is a, c, g, or t
  misc_feature (228)..(228): n is a, c, g, or t
  misc_feature (285)..(286): n is a, c, g, or t
  misc_feature (341)..(341): n is a, c, g, or t
actctgtnacagaangtattgtgatgtatcactggcctgacacctaggtgaaggtactgcttctcctgcctgggcctgcataaattggtattttgcatgtcactgggttcaacacatgggtgattcaactctctnacatggccttgagcatggggtattaggacattnattttggtcatctcagtgatatgactnctttcctccctgaaccctgcaaaaaggattgtncatatcacttaaccagactaagtgatagactctctgctagcaccctatttgggatgnncatttactggccaacactatggaggtctgctagcctgcacattattgcatgattnatcatcataacatggaa

SEQ ID NO: 547785 - DNA, 196 bp, Homo sapiens
agcaccacttcgaggactgttcatgaggacatcttggactggtcaacataacgagctgcggagaccagttcaggcgccgccagcagtgtccgggacagaaagagctcgcgagtatgatgacgcagtgaaactgggaattaggaggtaacacaaggagcgtcctccatgctcttaagctctgtgatgcccagacgat

SEQ ID NO: 547786 - DNA, 820 bp, Homo sapiens
  misc_feature (429)..(429): n is a, c, g, or t
ctcagggtattcctttataggcaaacacagactggagggtacaactctggtctggtggcagagaacaggttggatatgtactgggttaaattttggacagggatcgcttggggtatgtaacacggtctcccttgggtccttcttcccttttgggaagccacagctggacttcacgaaggagcaaatggttctggccgtcctccagaggttatggtaagtccggcctacttcgggagaatccacgctgaatggggccaagcttccgtctcacacaaccacacagtaaaacgtgaatactttgggcttcccatcctttactccatattttcagaactgggaacaaaacgggatggctatattatttgggcatccccatcccaaacagccaagcaacaccccaaccttaacatggcgggcacatctataccnattaatggccattgggactcctatgcttcttggacaggcagggaatcaggctctctcttctcaaccttcactattccctagagtaagggtggcctagagcacaataggtaaatggctcacattttctatcctaacattcgggcacgagggggtctggtcttaatttttctaaacctggaaattcccggaaaaatattccctggtggcccccattatgtttttttcctctggaatgttaagtttgggcgtgtgctgttgggattatctcttagtaatacctccatttttttcggccccgaacttcttcaagtttcctgtctaggagtcaggctgactctcagctgggctttagacctaagattaatacgtttatcctgattttcctcctact

SEQ ID NO: 547787 - DNA, 128 bp, Homo sapiens
  misc_feature (68)..(68): n is a, c, g, or t
ctcaaatcggctgattctgcatctggaaactgccttcatcttgaaagaaaagctaccggtcccttctncagccacccagccccaagatggtgatgctgctgctgctgctttccgcactggctggctct

SEQ ID NO: 547788 - DNA, 659 bp, Homo sapiens
agacgtgattgtaaatcacccctctgaagattttatcatgtgctcgcgcccatatcattggggagagggtggaacctccttgaggaggaaaaagtttttttttttgtagtgcgcctgccccagcgttttgcagcattgagaatcctcggcaacgattgggcaatgactttaactaagaatacttacgagaactattgagatctcaaaccgtggagcaggtggattttggtaacgcaggtctgaacactttcacataggtattggccctagcaaaccgacttggagtgttgttattaactatcgaggggtggagaccatgttttgccttgagcccctattctgaattcatcgagccgacatgagttattaacgtgtcctcattgcaaaacaatagaacaccgcgggggaccattaattaatgggcctggttttctgacaggggaaacttaccatactgggaccggataggaaacttatcttatgggttttcaggaacggcggaacccgggttttggtcagccatatgggaaaatcaaaaacacaatttaggcgcggggaaatttaacttccgatctttcaccggggccaaataaaacctttttttgggtggaaaaaagaaatttctacatcttcttttatatcaaggagaggtaccaacc

SEQ ID NO: 547789 - DNA, 156 bp, Homo sapiens
tctgtgtatcagggtgcctgtatccccatcgttccaggtgtacaaggcatgagggccgggacagctttcctctcagtcatagttcaccccacttgaaaattcagacaaggtatagccgagagacaaggtagagccgagagacaaggtagagccgag

SEQ ID NO: 547790 - DNA, 757 bp, Homo sapiens
gcctgcagtgaccgtaggcagccatggcgcccagcctggaatggcatggtcttgaagccccacttccacaatggactggcagctggcgctgtggccacgtggttcaaccatgcctgtgccctgtaatgatcctgcagacgtaagtgccctggcaatgccaattgctgctgcctgcatctgcccctgctgcccctgctgtctgtggtcccatcctggcccatctgttgctgcttgccccactgtgttctggtacctacactgaatgtgtgctgctgcctgtgcctgctgtgcttcatgccttggtgatgtgatgctcatgtggtgtgcctggcattcacaatgaatgtgttggccctgtgagccatctgtgcactttacttagttgtgactcctgatgtgatgtgctgtgacacaattgtccactgtgatgtcccttgcatgtgccagacgttgcaatgctgtgctttgaatgtgaggtacctgctccaaaaactcatcctcttccccagtgaatgccctctgtgcccccaatgaagtggtgacatgttcttgcttgaatggaacttgaaacttgggccacccagcttgacctggacccgtgtcattgccctgtcctggaacgttctatcagagtgtgaggaaatgcctctgagtcatcactttgatgaaacgagaagaaatttcaaatgccttcgctaagtctccagtattggccctgtcccaactgccctggttcttcggcatacgtggcaactgg

SEQ ID NO: 547791 - DNA, 130 bp, Homo sapiens
atgagctggcaccagataagatgaatatagcagcagtgaaactactggtgaaagccagagcagaacgatgatgacaccataaaatctcaggaggaagatcagccaataattattaaaaggaaaagaggaa

SEQ ID NO: 547792 - DNA, 109 bp, Homo sapiens
ccctggacgctaattatgagggaggcgtgtagcttcttatcattgtaactatgttatttagaaataaaacgggaggcaggtttgcctaattcccaagaaagaaagaaaa

SEQ ID NO: 547793 - DNA, 949 bp, Homo sapiens
tttgtttcgagtactgggtaaaagatcggccgggaacctcgtataatggctcatgtggtggaggcgagtaccagtcactacgaccgaaaatttcacggtaccatattaggcaatctttcgacccaaccatgaaccaattcagctcattctccttttcatgttatacgtctgaatcctcgccttttgaacctttgggatactcgttgaatgtactatacagtagatcagtgagtttctgcaatccgatattctccgactggttttcgttaggttatagtacgtttaagataacatatttagagcgagatttccggcttttttattcgcgagctgtgcctgagtatcagtggtgggcagtggattttagatgcgtcgcagccgtttcctcggtgcctaagatcgttgattggatggacaactttaagcttgtgggtttgttgaacaattatagatatgcttcgcttacgtctaacttctttggaaggctctcaacttttcaggacggatgcctgatccgcatgcggtatcggcttgctcgtcgagtctcgcaaaactatagtacgacgattagcgggactacgaagttgattgtacaaccgaacgcccgcaagtacgagtctttgttccaaccctgttcgtggaggtccgattgtgtcagtctttagctttgcatgagagttgtcaagcgaatccgtaccttcaaaacgccgtaagaccgatgtgttattgttcccttctgaatgagcaccgacgttgggatgatcgagttttaataaagtgtgtaccaatgcgaaacccctttaatactcccctagagagtcacgtatcgaactcatacccaatgggaaaagattgtgaagcctgtggaaagtttcagctccccgagttgggggaaaaccgctaaactggcagattaggatttttaaaataaagattggattataactct

SEQ ID NO: 547794 - DNA, 381 bp, Homo sapiens
cgggacagtcagtaggatcattttcataaagcaaggacatcatatgtttctagaaattacaagcatataactttagcctacaatcttttattaaaaatttttaacaaaattgtattacaaatgcatttcatcagaactcaaatttaaatggtgtttgttttgggtttttatttataatgctgaagttattccatacaagcctcaagttaaacacaattcattttgattggtaactatgtgagttttcaaaatcttgtgacccagttaagagataaatcaagcagtgatgcatccctatttattgcaccctttaaagtgtgagatcattttttagaatcttggggccacgaataaagttatattctgattttaaaaaacaaa

SEQ ID NO: 547795 - DNA, 703 bp, Homo sapiens
  misc_feature (556)..(556): n is a, c, g, or t
ggacaagtctgtggctcgctgagtcgtgtgtgcgtcctgagcctctgatctgtgcagtgtattaacgtttcaaggctgaatgctactggtcatttcgtctacaacgctggacagggacacttcttacgtggtcccgttcttgcggggtcctggcagaggtctaggaaacgttcatgggcgctatgagcttatgcttctaaccttgttcttaggctcgaagtctcttggctaagatacatgcgtgcgttctgtcatgttgctatcgaaggtaggaaccggatttgcgtaataggccgttctcacatgggggttccattccttcaaaattagtgtagaggctaagagccctgtgactccacatgtgcttgattcattgtgcatacgaaggagtgatcacaccagaactcttcccgtgtctctctacgtgacttgatttgacttgttgatgcaatccattttacgtgcctcctcgaggggacatctacctgcttcattctcgctggttaatacgaggaggaggaaactacgagatacgtttgacttgcctcgcaacagnctcatacacagaaacaccaagaccttactgagagaggcacacgcggccacgatccaggacaagggagaacgaaccccgagagaacggggcgattggcccacaaccaaggttggtgggacggcttgtggaaagcggttgcgcgcggcg

SEQ ID NO: 547796 - DNA, 467 bp, Homo sapiens
tctgctatgactgtggaaagattacatctggggatacagttatgactatatgacctattagcactgagtaatacagttatgacctatgtcatcgcgcgtgacgacgtgagtccctttatacagtacaaaacaagtgttggaattggggcattttagcacaaagtaatctcatttacaacttggaacaacacttggggcataatctttatacaaccttacatttccaaccaccaaatttctaatggtctactctgatttctcttattattgtgtatgttctcattgtgacatcatctagcaagagtagttacaaattgttgtcactagaccagcaagaattagcatcaccttgggaacttgttcacaaatgaaagattcccatgctgtaagcactcattgaatcagaaagtctgggcgtgaggcccagccacatggatgcacaaccccggaaggggctcctctagact

SEQ ID NO: 547797 - DNA, 299 bp, Homo sapiens
atatctttcttagaaacatgactaagaggaagatttataacgtgagggagttttgtatacaaattccttttacaagatagcatttataaaaaactctatttgttcttttaagaaacttggaaaatacctagttgtttataggtattcaatattcactcacaccaaaacatatgcccagagatgcaagttggatatgaactagaaagagctattcgtcaaaacgatggaccaggaatcccctctctgagggaggatcatgtaaagatcacaccatattaaatatgtactataacacatct

SEQ ID NO: 547798 - DNA, 121 bp, Homo sapiens
actctagcaggatcccccctccacatacacaggcttcccatctaaagtcatgcttaacttaacagggaaaaaaaagtgaaccaatgcaataatgtatattgacgtatccgtgacatttgca

SEQ ID NO: 547799 - DNA, 478 bp, Homo sapiens
acctggaggtaagcttgtgtgtgcaggagatgccctcttagctgaggcttaaagaacagcagcaagacagggaaagggaaatccatgtgaggtcataagaccagcatttgaaggttcatttacgtgggccctgactaacccaactagagtggagacgctgagctgggaagcagtaagacatgaggacaaacaggactaaggaggagtaaggaggagtaagaaggcaaggtctgaatgccagatgaaaacagtctcaatccaaccaaagaccaattcagaaccgatttaaggcactgggtatggagaaaaaggcctgagaagtctctgaatagggtttggaatataaatacaaaggaatcaccaagtgcggtggctcacacctgtaatcccaacactttgggaagctgaggcaggtggatcacttgaggccaggagttcaagaccagcctggctaacatggcaaaaccccatctctacc

SEQ ID NO: 547800 - DNA, 401 bp, Homo sapiens
  misc_feature (41)..(41): n is a, c, g, or t
  misc_feature (53)..(53): n is a, c, g, or t
  misc_feature (59)..(59): n is a, c, g, or t
  misc_feature (61)..(61): n is a, c, g, or t
  misc_feature (64)..(64): n is a, c, g, or t
  misc_feature (89)..(89): n is a, c, g, or t
  misc_feature (95)..(95): n is a, c, g, or t
  misc_feature (99)..(99): n is a, c, g, or t
  misc_feature (123)..(123): n is a, c, g, or t
  misc_feature (160)..(160): n is a, c, g, or t
  misc_feature (166)..(167): n is a, c, g, or t
  misc_feature (170)..(170): n is a, c, g, or t
  misc_feature (173)..(173): n is a, c, g, or t
  misc_feature (202)..(202): n is a, c, g, or t
  misc_feature (230)..(230): n is a, c, g, or t
  misc_feature (257)..(257): n is a, c, g, or t
  misc_feature (291)..(291): n is a, c, g, or t
  misc_feature (316)..(316): n is a, c, g, or t
  misc_feature (391)..(391): n is a, c, g, or t
  misc_feature (393)..(393): n is a, c, g, or t
cctcccccctgccttcagtaggatctggctccgtggctggnggaccaaccccnatagtnanatncagagcttaacgtgtactgcttgtntgtgtncgtnagtgtgtgtgtgtgtatgagtgtntgttccggctcccaccctctccccatctgctctgggnattttnngtnttngtttagttttaggtttacaacagagagtnattaatttatcagcagcctaaaactggngtgtttttcttatggtttaaaaaacgncatgtcatttataactccctttctcccttccctnctcccggtctgctgatcactctttnatgcctgtgtattcagggtgctctgtttcccaccgttccaggtgtacgaggcagagggccgggacagctttcctntnagttcatt

SEQ ID NO: 547801 - DNA, 754 bp, Homo sapiens
tttggttttcccctactgtgatgtgatgtgtgtgtgtgagatgatgtaattttggataacatagtgatgtaagtttggaagccgccctcattcttaatagctaccttatctatctaaaggaatcaactgctaatcccatcagtaaattactcttagtaaagacaaagggttagggctgggcaccgtggctcatgcctataatcccagcactttgggaggccaaggtgggtggatcacctgaggtcaggagtttgagaccagcctggccagcatggcgaaaccccatctctactaaaaaaaatacaaaaaaaaaattagcagggcatggtggtgtgcaactataatcctagctactcaggaggctgaggcaggagaatcacttgaactgtgggaggcggaggttgaagtgagccaagatcatgccattgcactccagcctgggcaacaagagtgaaactccatctcaaaaccaacgaacattttccccggattataagagtgccctcctcctctattactataaccagatagagagtcaaaagcttgtgtgtccacccgagtttctacaaagcaagacacgtttgcggggcttctcaattgccggcaaaaggtgtggccctatcagggggggccagttcggggacgaggctcttccaggagaaagtcagagtcagacatcaactgtcattataaccggggcgtagcgcttggacacacgttgcatgtacgaaattctcccctatggcgcgacttc

SEQ ID NO: 547802 - DNA, 820 bp, Homo sapiens
ccacagtcaggaagcagagagaggcagccgccgctgctgctccgcttacttcctcctttttattcaggagaggagcttatcccgtggaaggctaccacatttagggtaggtctccttggctgatttactcagaggtttgtcttctaggcagttctcgatcctgtcacaggacatccctcaccccgctgtgtggctctgtgggcagcgttggggatgccataggtggcatcagcacttgccttggtgaggggagcctagatgagaatggtgggctctctgacagggagggggcattgggacggtagctttggcttttcaagtaaggggtatcgtgctgagggttggaagggtggcagacctccatcttcacatccaggagggaagtgaggccaacatggccaacagccagtcagccttacatgctctcagaagctgctgtgaaggtggagaactaactattagacctaacctcaccgttcatcccagttcctttttcatgtccgttttctaattagaagcagcaaaaggatgcatcaaactgaccccagggcgacccagcttgagctctagcctctcctctgaagatgactcaaacgtggggaaggcaggtgctggcctgtgctaaagacaccaagagaggcttgaggcctgagggcatggtcttgcgggcatcggttggtggtggtgattgtggtcttgggtagagagacgggacctgcgagatcagtagtgcaggtggtcagtccatgttcacgatgctgtaatacgtgtgtgtgtttgtggtgtgtgttttacttttaggtttatgttgtgccctttc

SEQ ID NO: 547803 - DNA, 435 bp, Homo sapiens
tcctacacaatacaacagaccactctgcgcatccactccccctcaatataggacgggctgatggatgctttggtaacggaagacttaaagtatacagggttggcaccgtgctggtcaatgtgggtatgcaggtacacgaacacagcaaagtgagtggaagtgcgtccctgtgtcctacaagctttgagcgggcgcacctgtttgccgggggagccataactaagtgtctcccaggtgtgtgtgtggctgtgccttcctctcatctctctctgatctctgacccttctggacctccgacactgtgtctgtgtgtgtgtgtgtgtgtgttatgtgtgtgcacagcagtgtgtgccgtgcaacgtgtgtgtgtagcagagcaatgtgtgtgcgtgtatgtgcacatgtgtgtatctctttccctctcttgcagcaaag

SEQ ID NO: 547804 - DNA, 1694 bp, Homo sapiens
  misc_feature (995)..(995): n is a, c, g, or t
  misc_feature (1000)..(1000): n is a, c, g, or t
  misc_feature (1027)..(1027): n is a, c, g, or t
  misc_feature (1664)..(1664): n is a, c, g, or t
ggaggcaggtcagccgtcccccggctgcagctgcactcacatgtggccactgctcaccatgcacataacccagctcaaccgggagtgcctgctgcacctcttctccttcctagacaaggacagcaggaagagccttgccaggacctgctcccagctccacgacgtgtttgaggaccccgcactctggtccctgctgcacttccgttccctcactgaactccagaaggacaacttcctcctgggcccggcactccgcagcctctccatctgctggcactccagccgcgtgcaggtgtgcagcattgaggactggctcaagagtgccttccagagaagcatctgcagccggcacgagagcctggtcaatgatttcctcctccgggtgtgcgacagggtaagaggattaaatgacacagtggcacctggcacatagtaggctttctgctgtgcgctccccacggaggcgggaggcgcctgcaccgtcctcggggactccgatcgccgttggaccgaaatcacctcggtggggaggacctgaccactcggagttcgccgacttgcgctcgggggtgacgggggccagggctgccgcgcgcaggggtctggggagcctccgggcggagcgacccagcgagaccccgccggctcccggagtgtcctggggaccgccacctccaggagccccggtggtgatctcggtgaagcaggaggaggggaagcaggggcgcacgggcagaaggagccaccgagccgctcctccttgcggttttgcccgcacgcgcgtctgcccgcccacctttcctggggcggatgcgttcccgcagtgaccgcactcgcgattgtagaaaattcgctcccaattgttgaatgcttacataaactgcatagttacccatattttctactgttctcataagggaaaaagaaatgatttggaagaaaaaaaaagcctcaaactaaacaaaaacaaaaccagcagccctggctaagctttngatantggaaccattataagctgacaagctanattttcacctgtggatttgctggacatgagcacaagcctaggcttccaatttgaatttcagggctgtagtcactgatgtgtcacatttagtgaaggctctcggccccccggcagccgcctggtcctgggtcactggggagaattctgggtgggtggaagaggcgaggagcactgtgatgggcgctgttcacactccggctccacccagcgccagctgcgacaaagccctttacccctcccaggccaggtgtttcttctgtgtgaaagaggagcttgatccctactcacaggttccttaattcattgctcaaatagggaaacggcaaggaaaaagacaaattctgttctcatgaagcttaccttctagtgggggaagagacaacaggtaactggtatataagagggtagaagggccaggtgcggtggctcaatgcctgtaatcccagcactttaggaggccaagatgggcgattcacgaggtcaggagatcgagaccatcctggctaacaaggtgaaacccccgtctgtactaaaaaaaaatacaaaaaattagccgggcgtggtggcgggcacctgtagtcccagctactcaggaggctgaggcaggagaatggcgtgaacccgggaggcggagctngcagtgagccaagaacggccacggcacccc

SEQ ID NO: 547805 - DNA, 1282 bp, Homo sapiens
  misc_feature (847)..(847): n is a, c, g, or t
agcattggggacaagggtggtcagtccggtcgacattgcagcgttgtacatccataagtggctttcaacatgagtagctaactggttgcggagtgacaactttccatggcacagagttaattggattggtagcgaccaggacagcaagtatgctagggattgagctgtattgagcatatatctaacatggtcctttgaataagcatatcagaacatgaccgagcaagtgacatgcaactattgatacagtgctaggcagcaaaggacgacttgcgcaggaaaaaggtcagctgagcccagtacgattctaaccagaggcgtgtaccacatgtgcaagtaggcatgccgtgaagattgcctggtggattatccatggggtagggaagggtaagtcgtgcacattcacacataccttgagttgggattggcctgtactcgtacaaggagggacgctctagcacaagtatagaatacggaaggctttgggaatgtcagacgccacaagactcaaaagttggtaataaattgtaaagcattatgtgacccaaccacaaattataaaagaagccacttggaaagggtccctagaattatccgttaaaggcaaagatcactgtgctgagacacgatttctctaatactaaaagttccagaagctcgcccttactatgtcagaggtttactggggaccattacttcagataactatggaaattagtgtggaccacgattagttgccaccaagggaggaattggtagcgatcaatcgagtaaggcatcgtcttcactataaaacaacttgcttcattggttaaaccctgttgactatatgactgatgatcctttntagagataaatagactccatttgagaatatacgggcgaccactgacctacacattcataccaatataaggtggacgagtacagggtccaactaagatatattgccctacagacggggagttccccaagactattcttgtggctctgcccaattgttcattctgacactaaaattattgcggcataatttaacgcgggaatggttctaagaattttgcaattgcgtaaaacggaggtttgagaactgcgttcggacttgactaagattggttggctgtagctgcggaactccagtggaataagtttctgaggatgcttaagggagaagagaggagcgcaaatatagttcgagggggtggagtagagcgatagatgtggacacaggaattaccttggcggagaggaattgtagaggtttgaaagaggtaaattctta

SEQ ID NO: 547806 - DNA, 580 bp, Homo sapiens
ggaggcaggtcagccgtcccccggctgcagctgcactcacatgtggccactgctcaccatgcacataacccagctcaaccgggagtgcctgctgcacctcttctccttcctagacaaggacagcaggaagagccttgccaggacctgctcccagctccacgacgtgtttgaggaccccgcactctggtccctgctgcacttccgttccctcactgaactccagaaggacaacttcctcctgggcccggcactccgcagcctctccatctgctggcactccagccgcgtgcaggtgtgcagcattgaggactggctcaagagtgccttccagagaagcatctgcagccggcacgagagcctggtcaatgatttcctcctccgggtgtgcgacaggtaggccaccttgcctcctgagcagtgctggccccgctagctctggcttccctcttggggggcagggaagagcaaattacgagaccaagatggctccaccttcggggcgcctcaaactaggcccaaggcagacatccagaccgcccaaagcagggtccccaggagacaataaaatcatgagggaaac

SEQ ID NO: 547807 - DNA, 168 bp, Homo sapiens
cttgtcggcatttggtaggggttttttattgaccaaatatgttcccacaacctagttttttgtgactactaatatagtagagtttaaattttatcatcaaatctatagacaatttttgatgaaatagactcatctctatgtcctgcttttctcctcttattaatacat

SEQ ID NO: 547808 - DNA, 190 bp, Homo sapiens
actctagaggaccccgatgagaatatcaagatcacactggttgactcaaggacatcagaagtcaaagagctccggtcttctcgttgtcttcagttccgtagtattgctgcaacccatgcagcgtcaacttcgtctcatcatccacgaagatctccattggatcttgcatgaacttgcggcagactggacg

SEQ ID NO: 547809 - DNA, 1403 bp, Homo sapiens
ccattccattccattccattcaattccattccatgccatcccattcgggttgattccattccattccattccattccattccattcctttccattccattccattccattccactctggttaattccattccattccacggctatattcggaggcattctccaaaatgaggttaactgcctcatatgtgggacagaatctagaaagtttgatccattcctagacctttcattagatattccaagtcagttcagaagtaagcgctctaagaatcaagaaaatggaccagtttgttcgttacgagattgtcttcgcagttttaccgacttagaagaacttgatgagacagagttatatatgtgccataaatgcaaaaagaaacaaaagtccacaaaaaagttttggattcaaaaactacccaaggtgctatgcttacatttgaaaagatttcattggacagcatatttaagaaataaagttgatacatacgtagaatttccactgagaggcctagacatgaaatgctacttactagagcctgagaacagtggcccggagagctgcctgtatgacctcgccgctgtggtggtgcaccatggttccggggttggttctggacattacacagcatacgcaactcacgaaggccgctggttccacttcaatgacagtactgtaacactgactgacgaggagactgtggtgaaggcgaaggcctacatccttttctacgtggaacaccaggccaaagctggatcggataaactttaatacctcctccaaatcatcattcaccaaccataccagagaaacatttccagttttccacaaatacttgatacaagatttaatttcattatgcacttttcaatttcctattttggatttagttttgtcaatggtagtgacttactgaacatgggcaccaactaattttgttgttgttctaccagaaaacctcagcagatgttttgatttgctgctttagttgtaataattcaatttttataggtagttgtaagaacttagtcttatttgacttttttattttatgttaatgttttcagttctcactttgaggcacatttacatcaatgcttttgttcctctcacatgctgaaagcaagatgtgttccttattgtgaagagcgacacaactgcctgctgcctttccacagctataatggacatcaggttgactctaaatcaaggatcatgtgtgcacaatacttgtggcccacaaaatttcacaatgactgctgaggaatcattctttttgcctgtaaaatataacaaagggcatcattaagtagaccaggtaattactgcttgtctctcaaggctgctgtctttatcagcactaactaaataaatttgttggttcagttgtacttgtcctgcaaa

SEQ ID NO: 547810 - DNA, 105 bp, Homo sapiens
ttcactgtcagggctttcatgccctacaagttcacgccagctcacacacatgcccacatggaaatggaaaagggtggaagcaggcatgaagggcctcgacatgaa

SEQ ID NO: 547811 - DNA, 226 bp, Homo sapiens
gaggaaagaaggccgatttgccgggccgaacttggcaactccttctcggggcggcccccttggccccttttcctttcccttccctttatacaagccccttccttcccggcccttccttaagcccggaagggccccttccccttggaggccccccaaagaaattaaaccccctttttccaaccttacaaacaaattttctttaacggccttgttcaatttttccaca

SEQ ID NO: 547812 - DNA, 389 bp, Homo sapiens
cccctatgggtccctgccgcatccacacagtccgtgtgtggggaggttacaagaaataccgtgccctgtaggttgtacgtggcggaatttctcctggggctctagaatgttagtactcgtaacaacaacggcatcatcgattttgtctacgatgcatctcataacgagctggttcgtaccaagatcctggtgaagaattgcatcgtgctcatcgatagcacaccgtaccgactgtggtacgattcccactatgcgctgccctgggccgcaataagggagccaagctgactcctgagcaagaagagattttatacaataaacgatctagaatacttcagaagaaatatgatcaaaggaaacaagaatgccctaatcagcagtctcctgga

SEQ ID NO: 547813 - DNA, 1325 bp, Homo sapiens
agaattctactctgtctgcaagtaacaagtgttgcataaatggagcatctactgttgtcacggctatattcggaggcattctccaaaatgaggttaactgcctcatatgtgggacagaatctagaaagtttgatccattcctagacctttcattagatattccaagtcagttcagaagtaagcgctctaagaatcaagaaaatggaccagtttgttcgttacgagattgtcttcgcagttttaccgacttagaagaacttgatgagacagagttatatatgtgccataaatgcaaaaagaaacaaaagtccacaaaaaagttttggattcaaaaactacccaaggtgctatgcttacatttgaaaagatttcattggacagcatatttaagaaataaagttgatacatacgtagaatttccactgagaggcctagacatgaaatgctacttactagagcctgagaacagtggcccggagagctgcctgtatgacctcgccgctgtggtggtgcaccatggttccggggttggttctggacattacacagcatacgcaactcacgaaggccgctggttccacttcaatgacagtactgtaacactgactgacgaggagactgtggtgaaggcgaaggcctacatccttttctacgtggaacaccaggccaaagctggatcggataaactttaatacctcctccaaatcatcattcaccaaccataccagagaaacatttccagttttccacaaatacttgatacaagatttaatttcattatgcacttttcaatttcctattttggatttagttttgtcaatggtagtgacttactgaacatgggcaccaactaattttgttgttgttctaccagaaaacctcagcagatgttttgatttgctgctttagttgtaataattcaatttttataggtagttgtaagaacttagtcttatttgacttttttattttatgttaatgttttcagttctcactttgaggcacatttacatcaatgcttttgttcctctcacatgctgaaagcaagatgtgttccttattgtgaagagcgacacaactgcctgctgcctttccacagctataatggacatcaggttgactctaaatcaaggatcatgtgtgcacaatacttgtggcccacaaaatttcacaatgactgctgaggaatcattctttttgcctgtaaaatataacaaagggcatcattaagtagaccaggtaattactgcttgtctctcaaggctgctgtctttatcagcactaactaaataaatttgttggttcagttgtacttgtcctgcaaa

SEQ ID NO: 547814 - DNA, 415 bp, Homo sapiens
ccgtataccctattgtccctcagtataatagcacatgtgtaaacttacttctacagaggaaatgactttgtctattcaaggtataaaggtaagtggtatttctggtaagaaggctatataaggagaagtattggtagacacaaaaaatctgtatggtacattcttgtcctaaagtaaaatgactggtggtttaaaaagagggatgtttaggacaagtaaaaaagtccaagcatgttgtaggtggtctgtgtaagtggttaaaaaaagattggtgaaagggaatttatgaaagaactactacacaattttaaaggttactatgccatctaaatgcttcacaaactgccactatagctcttaacagtacaaattccctgctttaaagctaggtaaggccttggaacatacagagtta

SEQ ID NO: 547815 - DNA, 1603 bp, Homo sapiens
agaattctactctgtctgcaagtaacaagtgttgcataaatggagcatctactgttgtcacggctatattcggaggcattctccaaaatgaggttaactgcctcatatgtgggacagaatctagaaagtttgatccattcctagacctttcattagatattccaagtcagttcagaagtaagcgctctaagaatcaagaaaatggaccagtttgttcgttacgagattgtcttcgcagttttaccgacttagaagaacttgatgagacagagttatatatgtgccataaatgcaaaaagaaacaaaagtccacaaaaaagttttggattcaaaaactacccaaggtgagtgttgaattttgagttatgaagcaatttcaatgggaaagtgcttgactgctaagaccatgtctataactttacactatgtgaactgttctgtatttttctctaggattttcagtaaaagctaaaccccttacagaatgaatgcataaggtatgcatggaagaatgattgatagggcagctaaaatgttatttactgaactgatagtagtatcaaactttgactgaaaggtaaattaggtgttcacaatctttgaccgcatctctgtcctccaggtgctatgcttacatttgaaaagatttcattggacagcatatttaagaaataaagttgatacatacgtagaatttccactgagaggcctagacatgaaatgctacttactagagcctgagaacagtggcccggagagctgcctgtatgacctcgccgctgtggtggtgcaccatggttccggggttggttctggacattacacagcatacgcaactcacgaaggccgctggttccacttcaatgacagtactgtaacactgactgacgaggagactgtggtgaaggcgaaggcctacatccttttctacgtggaacaccaggccaaagctggatcggataaactttaatacctcctccaaatcatcattcaccaaccataccagagaaacatttccagttttccacaaatacttgatacaagatttaatttcattatgcacttttcaatttcctattttggatttagttttgtcaatggtagtgacttactgaacatgggcaccaactaattttgttgttgttctaccagaaaacctcagcagatgttttgatttgctgctttagttgtaataattcaatttttataggtagttgtaagaacttagtcttatttgacttttttattttatgttaatgttttcagttctcactttgaggcacatttacatcaatgcttttgttcctctcacatgctgaaagcaagatgtgttccttattgtgaagagcgacacaactgcctgctgcctttccacagctataatggacatcaggttgactctaaatcaaggatcatgtgtgcacaatacttgtggcccacaaaatttcacaatgactgctgaggaatcattctttttgcctgtaaaatataacaaagggcatcattaagtagaccaggtaattactgcttgtctctcaaggctgctgtctttatcagcactaactaaataaatttgttggttcagttgtacttgtcctgcaaa

SEQ ID NO: 547816 - DNA, 1681 bp, Homo sapiens
catcaggaaaccattttatcagaattatccagatgaattatcattaatagtaaaaccaacacaattgatcatcaccagatgtcaggcatgatgccaggtgctctacacattatttctcttccttataatagttcttcaaagtaggtattattttttgtctccagtttgcaattgagaaaggttaacttttctaaggtcgtatagctaataaagctgagattttaaacctgggtcttttttctacagtacattgcctctacaaaaggcatcttgttttaatgctgccaaaatcaatttgtttagattgtcttcgcagttttaccgacttagaagaacttgatgagacagagttatatatgtgccataaatgcaaaaagaaacaaaagtccacaaaaaagttttggattcaaaaactacccaaggtgagtgttgaattttgagttatgaagcaatttcaatgggaaagtgcttgactgctaagaccatgtctataactttacactatgtgaactgttctgtatttttctctaggattttcagtaaaagctaaaccccttacagaatgaatgcataaggtatgcatggaagaatgattgatagggcagctaaaatgttatttactgaactgatagtagtatcaaactttgactgaaaggtaaattaggtgttcacaatctttgaccgcatctctgtcctccaggtgctatgcttacatttgaaaagatttcattggacagcatatttaagaaataaagttgatacatacgtagaatttccactgagaggcctagacatgaaatgctacttactagagcctgagaacagtggcccggagagctgcctgtatgacctcgccgctgtggtggtgcaccatggttccggggttggttctggacattacacagcatacgcaactcacgaaggccgctggttccacttcaatgacagtactgtaacactgactgacgaggagactgtggtgaaggcgaaggcctacatccttttctacgtggaacaccaggccaaagctggatcggataaactttaatacctcctccaaatcatcattcaccaaccataccagagaaacatttccagttttccacaaatacttgatacaagatttaatttcattatgcacttttcaatttcctattttggatttagttttgtcaatggtagtgacttactgaacatgggcaccaactaattttgttgttgttctaccagaaaacctcagcagatgttttgatttgctgctttagttgtaataattcaatttttataggtagttgtaagaacttagtcttatttgacttttttattttatgttaatgttttcagttctcactttgaggcacatttacatcaatgcttttgttcctctcacatgctgaaagcaagatgtgttccttattgtgaagagcgacacaactgcctgctgcctttccacagctataatggacatcaggttgactctaaatcaaggatcatgtgtgcacaatacttgtggcccacaaaatttcacaatgactgctgaggaatcattctttttgcctgtaaaatataacaaagggcatcattaagtagaccaggtaattactgcttgtctctcaaggctgctgtctttatcagcactaactaaataaatttgttggttcagttgtacttgtcctgcaaa

SEQ ID NO: 547817 - DNA, 870 bp, Homo sapiens
ctgtggtatgcgccgtgccccatgttacctggtcccgtcggcggttgggcccctattctacatatatgttctggcgtgcgaatcggacgccttcgcggtccaaactgcatgatctggggattttccgccgttttgtgcatctcccagggcccacccaccctgaggcgggcccgcgccctgggtttgcccacacggtgtccacagaagtgcccaatcttgggcaaattgggacccctctgggattcaaaagccctgggcggtaaccctcaagaaggaggggttcacgcaccacaacggatgtgggccgattccccagcaagggtggcccaaagttccccaaaaaggcgttttaatagtggggcccaaaaaatccccaattttgggcgaacacccgctttgtaatttgggccctaaaaggggccggttccccaggaaggggcgttcccaccccggcccccgcaatccttgtgtcgccaaatcaaacccctcctcccgtgtggggggaagcgggcaaccccggaccctccggggaatcaaaggaatgctccaagaaagagccgcaaattaatttttcatagagcaccaagaaacctgagtggtgtccccgccaaatagagaaaatggcgtataaatcacccgtgatttgtttaaaaaatatcattgggtgttcccgttttcccaattagggagacctggacttgagccccacagtatgtgaagttatatctgctcgattatatgggaacattcttttgttttgggaagtccctcacctgtaagacctgatggaagtcccacgattatttccggggcccattttcccctaaaggtttttaaaaaaaaaaaatttttttaaaaattttaaaaaaa

SEQ ID NO: 547818 - DNA, 1518 bp, Homo sapiens
tctcaataaaagattggatttattcaaggttggtgaaaactttctaacaagggaaactcttattagatgcgtgcagtgtacgggggctagtggaccacgcacatacagccagtgcggtttcagaaagacttgaaaggccatggatagttataaaaactctacacccgagggagaatcgaggaagacaatttaaggttccatctggaatccagaggtggcttcaatattaatatggaacggctcccatctggggcaaataataagctggtgaaacttgggagggttatccaagaagaaatgggttgggtggatgggataaattcagaatatggtccttccccaaagggtggggtgggtgtttataaaaaaggtgttcagggtgcaacaaccgcttgggcaagacaaaccacctggatgcgccacaagaaacacctgagattccgcgggtccaggggaaacccaggggttcttcccaaagttccccaaggggcgcctggggtgtctcccccaaacgagatgcaagtgtctcacgggtgcgcgtggtgaactccaagagagggggctccttggaggaacgtggagaatagcgggagaacgccaccttgtggaggacgctgtgtgaccacccaaatacgaggtgccaatacatgcggagctggggcacgtggctaacaaagagtgactccaaatgtgacctatgtgtaacacaggggcacacaacgagggtcaataaaaccctttccctctcggggagcctccccaggtgtgccaccccaatatttctttccctcattcaatctggcaaggcaacatgcggcgcgagaaaatcaaaagacggtgcaacagagggaattaccctaggaatttggaatcaccaggacgcagaaactcttgagagaaaggggccccctgaaagggcacttggggttggccccccaagcaacccaggggatagtgcgcaccactaggaaaggggcatagacacaccttaaggagcatcaagacacaaatccacaaacacaacacaacaagataccaagaagaaaacaaagggggccttcccccgtgggatattccccaaagaaacccccgggtaaagggtgagaaagcaagcccccaaaaaggagaacccccacgcggacaccacacgcacagtgatcctggtcggcgacccacggtaataagctaaccaccttataaaaaaaaaaacacccaattaaacaccaacaggagagggagggaggacgtccaggagaggcaactactacaagagggcaagaaactaagtgaggcgccgcaggttagacacacgagggtcagaagaggacgaccaccaacacgagggccagacaggagacaaacacacacggcgaggacccgcgcagcactgagagcgacggaacacaaaaagcaacgtcagacaaccaccgcagctacacgagcaacacagccgccggagcgaggccccaccaacaagagagccaacgcaagagagaagaagaagcacacaagagcacg

SEQ ID NO: 547819 - DNA, 123 bp, Homo sapiens
aagcttttaccgcaggtcatcgaatagcaggaaaaaaagagtgctcccttataccgaagtgagtcgaagatctattcttaaattgactttgctatttatattccgtaatcagtctaaaagcat

SEQ ID NO: 547820 - DNA, 2187 bp, Homo sapiens
  misc_feature (1154)..(1154): n is a, c, g, or t
ttttttaatggagtcttactctgtccctcaggctggagtgcagtgtggcatgatcacagctcactgtagcctcaacctcccaggctcaagcgatcctcccacttcagcctcgaagtagctggcaccaccacacccagctaatttttaatatttttactagagatggggtttcaccacgttgcccaggctggtcttgcactcctgggctcaagtgatccacccaccttggcttcccaaggtgctagcattacaggcatgagccaccacgcccagcctgttctattaaaaacatcttgaccttttttttttttttttaagtttatgatataaaaacagtctggtggctttccctcaggttggatatctgaagttgtgggagcagatgtagctccatttccattttaatattaactggataaatcccacatcttcccagaacacatctgctaaacactttaacatgacaaggagcaaattacaattatgtgtaaacttatatcatccagtacaatggcccctagccacatgtgactgaaatttaaattagaaactcagtgccttcagtcacactagccacatttcaagtgctcagcacccacatacggcgtaggacaatgctggtctaaattttcactccaaagaataaaactttgccatcatgtttaggtcttacaactttgagtcctaaaagataatagggagatgtgtgcttaaattaatttacaatgctaaattatattaggttaaactgtatgaaaccctgctatttgatgagttctgatctacaaaaatgacagctccacctgatctgatgtatcacacattaacatcacatctaattcaacctgaaatgtgagtctcctttgatcttgcaaagtatctcctatgaatccgggctcttttgcttagaaggtagacagctgtaacctctaacattgatacttcgatcttcagtctctctgaatgggcagctgttaaacagtaaaggcctgggcagagttgatggtgaaaaaaagctgtatttttataccaaatggaactttagcaacacgttggactactttgtcgggcagagtggtcttcagacaggtgatgctgttggcttaagagatgaacacgtcttctctctgaatttgtttttattggttggtttnacttgaacagaaacgtttgaatggtgtgaagattctttagaaaagtgattggatccatctcaattgtgcacttgaacagcagtgatgtaaatgtgcttatttgtgttttcatttttaactgtgcagccttaccacacctattttgaaagctgatcttttgtcctcttcagggcttttcccttgtgccatgttgtctccagcaatatatgtggcttctggctcagagcttctgctgaggcagggcctcgcgctgagtcacatggctccttggaacaagaaaactttctcagaagtccccacacgggtgggtgacagaaacagtttgtggcaacacaaatctctctccatggtggagaaacctttgcttatccactgtattctactcagtgtatagtgatgacagatgtactagaattaaaccagtcaagtgtactggcccagggtgagtgttaaatgtgtatctcgcctgtggaacctactcagcagcttggtttctggggttgggggcatatttatttcttaaagccaaacctctccttcattggtttagtgtacataagtctatttacatacacttatcccactttaatctccaccagcccctaaactctctcctgtaccctctgttgctgaagtggcctcttcacctgggccctggaaaagccgatggaaaaagtctgttcctgcagccaaggcctgggtcccaggtgactaggagtagccataggaaggtgaggaaggagaagtgggcatgtggtgtcatctgtagtccaaggtctctgcgtctcgtcagtgggtgcagtgccttccccctcaggtgtgagcgtgatggactctagactgccttccatgagtgttggtcatgctatgatgtcatcatttgccattaaaacccagtttgtatgatgccaagaggattaattgtgcaagtgactgattcatttaaattgtaatcacatcccttttctgcttcaccaacctgaactgtttttaaaaatatcattaaaagtctgttctctttccttttgaaaaa

SEQ ID NO: 547821 - DNA, 409 bp, Homo sapiens
gcatcagtgcagcccaataatgtgatcagatgggcttgtgggtcctgatgggtctcaaggcttcgaacagtcgaacagataaatgctggcaatgaaaagatgccgccgtggctgccgtgcaccgtcctcctgggtcgtccggccaacgggttgcactgccgtggtggacagctggacttgagcagagggagcgacctgacttacttgacgctgtgatccctcccttgtgccgttccacacctggtgtagaccttgaatcgccgcgcattgacacgtgtggactcgtccacccacttctcggcctcattttccactgtcgtatttggcacatcgacaaagggctgtcaccaaagtctgtgcgagcacgggaatgggggagcggcttaagctcagggtgagtccagccacc

SEQ ID NO: 547822 - DNA, 2289 bp, Homo sapiens
  misc_feature (2032)..(2032): n is a, c, g, or t
  misc_feature (2232)..(2232): n is a, c, g, or t
ccattccattccattccattcaattccattccatgccatcccattcgggttgattccattccattccattccattccattccattcctttccattccattccattccattccactctggttaattccattccattccacggctatattcggaggcattctccaaaatgaggttaactgcctcatatgtgggacagaatctagaaagtttgatccattcctagacctttcattagatattccaagtcagttcagaagtaagcgctctaagaatcaagaaaatggaccagtttgttcgttacgagattgtcttcgcagttttaccgacttagaagaacttgatgagacagagttatatatgtgccataaatgcaaaaagaaacaaaagtccacaaaaaagttttggattcaaaaactacccaaggtgctatgcttacatttgaaaagatttcattggacagcatatttaagaaataaagttgatacatacgtagaatttccactgagaggcctagacatgaaatgctacttactagagcctgagaacagtggcccggagagctgcctgtatgacctcgccgctgtggtggtgcaccatggttccggggttggttctggacattacacagcatacgcaactcacgaaggccgctggttccacttcaatgacagtactgtaacactgactgacgaggagactgtggtgaaggcgaaggcctacatccttttctacgtggaacaccaggccaaagctggatcggataaactttaatacctcctccaaatcatcattcaccaaccataccagagaaacatttccagttttccacaaatacttgatacaagatttaatttcattatgcacttttcaatttcctattttggatttagttttgtcaatggtagtgacttactgaacatgggcaccaactaattttgttgttgttctaccagaaaacctcagcagatgttttgatttgctgctttagttgtaataattcaatttttataggtagttgtaagaacttagtcttatttgacttttttattttatgttaatgttttcagttctcactttgaggcacatttacatcaatgcttttgttcctctcacatgctgaaagcaagatgtgttccttattgtgaagagcgacacaactgcctgctgcctttccacagctataatggacatcaggttgactctaaatcaaggatcatgtgtgcacaatacttgtggcccacaaaatttcacaatgactgctgaggaatcattctttttgcctgtaaaatataacaaagggcatcattaagtagaccaggtaattactgcttgtctctcaaggctgctgtctttatcagcactaactaaataaatttgttggttcagttgtacttgtcctgcaaatacaagaattactctctttgttggtttttttggttttggggcatacttgtttgcggggaggtaagatgggagtaaagaccaaatacatgtaatgtttaaaaaaaatgctgtgactcactgacatggtataggtgttaccagtgaggtaaagccatggcgtctgcctccttttgaatcagtatctcattcccccttagttgtaccactggaagtcacgacatgtccattatagacttacttactgcttgtgtttggcatctgagtctgaggtgtgaccctctgggatttacttggatcatcacccgcacttcagtttatcactggggggtgtgcttccacaggaggaaatttagaatcttcgctgctctgggttttaacacctctctctggcctatcctgattgataggacaagttgaaaatactgttggagtaagtaagtggagttttcgttttgttttttgggggtttttggagacaagagtctctctctgttgcccaggctggagtgcagtggcacgatctcagctcattgcaacctcggcctcccgagtagcaattctcctgcctcaacctcctgagtagctgggattacaggtgcccaccactacacctggctaatttttttttngtatttttagtaaagacgggggtttaccatgttggctagggtggtctcaacctccctcctgacctcaggtgatccgcctgcctcagcctcccaaagtgctgagattacaggcgtgagccatcacgcccagacagtttggtttttaaaaaacagatttaactcaaagattcaaatctggaaccagaatcccatttaaaganagcagttgtggttctacaagtgttctaagacagtcctgtggtggttttttttttctt

SEQ ID NO: 547823 - DNA, 376 bp, Homo sapiens
  misc_feature (1)..(1): n is a, c, g, or t
natatagagtgtaaaattgagacatgagtaataatttgtttacttaatatgtctttcttgtctaaatctgaagatacccttaagttctatcaaatggaaaccatgtcactacacccttcccatacaaaacttttgcaaaagaggaaggccaggaagcatgggcaccatatttctacagccatgattgcccatcacatactattcagttaaatgcagcctttaagctaatccagtctgaaaagctcatcgtgcaacctgtgcatatctaacgagcacatgtgtgaagaagactcaaaatactctatatatgctatgtatgcatcctgtgcattaatccgcgtttccgcgtgccgtattcgtacagcccgggggatcc

SEQ ID NO: 547824 - DNA, 3335 bp, Homo sapiens
  misc_feature (1549)..(1549): n is a, c, g, or t
  misc_feature (2636)..(2636): n is a, c, g, or t
  misc_feature (2641)..(2641): n is a, c, g, or t
  misc_feature (2668)..(2668): n is a, c, g, or t
  misc_feature (3305)..(3305): n is a, c, g, or t
ccattccattccattccattcaattccattccatgccatcccattcgggttgattccattccattccattccattccattccattcctttccattccattccattccattccactctggttaattccattccattccacggctatattcggaggcattctccaaaatgaggttaactgcctcatatgtgggacagaatctagaaagtttgatccattcctagacctttcattagatattccaagtcagttcagaagtaagcgctctaagaatcaagaaaatggaccagtttgttcgttacgagattgtcttcgcagttttaccgacttagaagaacttgatgagacagagttatatatgtgccataaatgcaaaaagaaacaaaagtccacaaaaaagttttggattcaaaaactacccaaggtgctatgcttacatttgaaaagatttcattggacagcatatttaagaaataaagttgatacatacgtagaatttccactgagaggcctagacatgaaatgctacttactagagcctgagaacagtggcccggagagctgcctgtatgacctcgccgctgtggtggtgcaccatggttccggggttggttctggacattacacagcatacgcaactcacgaaggccgctggttccacttcaatgacagtactgtaacactgactgacgaggagactgtggtgaaggcgaaggcctacatccttttctacgtggaacaccaggccaaagctggatcggataaactttaatacctcctccaaatcatcattcaccaaccataccagagaaacatttccagttttccacaaatacttgatacaagatttaatttcattatgcacttttcaatttcctattttggatttagttttgtcaatggtagtgacttactgaacatgggcaccaactaattttgttgttgttctaccagaaaacctcagcagatgttttgatttgctgctttagttgtaataattcaatttttataggtagttgtaagaacttagtcttatttgacttttttattttatgttaatgttttcagttctcactttgaggcacatttacatcaatgcttttgttcctctcacatgctgaaagcaagatgtgttccttattgtgaagagcgacacaactgcctgctgcctttccacagctataatggacatcaggttgactctaaatcaaggatcatgtgtgcacaatacttgtggcccacaaaatttcacaatgactgctgaggaatcattctttttgctcaactcgtgggcctcctcagtcaacaggtagcaagctcttacagaatccccacgatttggagctgcagtacctgggccaggatgaagtgacctcgcagggcccgagtcctcctcggtaaatgagtccactcggtcccatggggcggttgggtagctttaacaagccagtgagccccgggtcaccgcactctcctcacaggtgccccaacctggcgtccgtcacgctctcgggctgcggccacgttaccgacgactgcctggcgcgcctntgcgctgctgcccacgcctgcgcgcactgcgcctggagaactgcgcgcgcgtcaccaaccgcacgttggctgccgtggcggcggacgggcgcgcgctgcagacattgcacgtggacttctgccgcaacgtgagcgcggccggcctgcgccgcctgcgcgccgcgtgcccgcgcctggccctgcgggcagagcacagcgccgccatgctgcccgaccagcccccgcgcccgcgcgcgcccgccgcggccctcggcaagctgctgcagcgctagacgccgccccgccgctgcccccggggaaggagcgcagccccagaccgtcctggcttcgaacccagctcttccaccttcagaccaccaccgcatattctgagcctcattttccccgtctgcacagtggggataagaaagcctacctcacgttacgattttatacataggataaacgcaagattaaatggatatttggaaaacactcggctggttctcactcaacaccaccgcctttcccctcttgcttccgccccaggctttctgctgtgcgctccccacggaggcgggaggcgcctgcaccgtcctcggggactccgatcgccgttggaccgaaatcacctcggtggggaggacctgaccactcggagttcgccgacttgcgctcgggggtgacgggggccagggctgccgcgcgcaggggtctggggagcctccgggcggagcgacccagcgagaccccgccggctcccggagtgtcctggggaccgccacctccaggagccccggtggtgatctcggtgaagcaggaggaggggaagcaggggcgcacgggcagaaggagccaccgagccgctcctccttgcggttttgcccgcacgcgcgtctgcccgcccacctttcctggggcggatgcgttcccgcagtgaccgcactcgcgattgtagaaaattcgctcccaattgttgaatgcttacataaactgcatagttacccatattttctactgttctcataagggaaaaagaaatgatttggaagaaaaaaaaagcctcaaactaaacaaaaacaaaaccagcagccctggctaagctttngatantggaaccattataagctgacaagctanattttcacctgtggatttgctggacatgagcacaagcctaggcttccaatttgaatttcagggctgtagtcactgatgtgtcacatttagtgaaggctctcggccccccggcagccgcctggtcctgggtcactggggagaattctgggtgggtggaagaggcgaggagcactgtgatgggcgctgttcacactccggctccacccagcgccagctgcgacaaagccctttacccctcccaggccaggtgtttcttctgtgtgaaagaggagcttgatccctactcacaggttccttaattcattgctcaaatagggaaacggcaaggaaaaagacaaattctgttctcatgaagcttaccttctagtgggggaagagacaacaggtaactggtatataagagggtagaagggccaggtgcggtggctcaatgcctgtaatcccagcactttaggaggccaagatgggcgattcacgaggtcaggagatcgagaccatcctggctaacaaggtgaaacccccgtctgtactaaaaaaaaatacaaaaaattagccgggcgtggtggcgggcacctgtagtcccagctactcaggaggctgaggcaggagaatggcgtgaacccgggaggcggagctngcagtgagccaagaacggccacggcacccc

SEQ ID NO: 547825 - DNA, 316 bp, Homo sapiens
gaagaatccgggtggtgatagctgcattatctagcacccgatgtgtttttttaactataaccaggtttcattctttttccacggaagggtgacatttggttagtacatttcagggtagtcattcatttctagctgtacataggatgaaggagagatcagatacatgaacatgtcttacaggggtggcggtatttagaattataaacatttttcattatggggaaagggtaacgggggaccttctggcatacctggtttacgaaccataaaccacatgcaccaccagggaatccttccggggtaccggagctcgaat

SEQ ID NO: 547826 - DNA, 1401 bp, Homo sapiens
ccattccattccattccattcaattccattccatgccatcccattcgggttgattccattccattccattccattccattccattcctttccattccattccattccattccactctggttaattccattccattccacggctatattcggaggcattctccaaaatgaggttaactgcctcatatgtgggacagaatctagaaagtttgatccattcctagacctttcattagatattccaagtcagttcagaagtaagcgctctaagaatcaagaaaatggaccagtttgttcgttacgagattgtcttcgcagttttaccgacttagaagaacttgatgagacagagttatatatgtgccataaatgcaaaaagaaacaaaagtccacaaaaaagttttggattcaaaaactacccaaggtgctatgcttacatttgaaaagatttcattggacagcatatttaagaaataaagttgatacatacgtagaatttccactgagaggcctagacatgaaatgctacttactagagcctgagaacagtggcccggagagctgcctgtatgacctcgccgctgtggtggtgcaccatggttccggggttggttctggacattacacagcatacgcaactcacgaaggccgctggttccacttcaatgacagtactgtaacactgactgacgaggagactgtggtgaaggcgaaggcctacatccttttctacgtggaacaccaggccaaagctggatcggataaactttaatacctcctccaaatcatcattcaccaaccataccagagaaacatttccagttttccacaaatacttgatacaagatttaatttcattatgcacttttcaatttcctattttggatttagttttgtcaatggtagtgacttactgaacatgggcaccaactaattttgttgttgttctaccagaaaacctcagcagatgttttgatttgctgctttagttgtaataattcaatttttataggtagttgtaagaacttagtcttatttgacttttttattttatgttaatgttttcagttctcactttgaggcacatttacatcaatgcttttgttcctctcacatgctgaaagcaagatgtgttccttattgtgaagagcgacacaactgcctgctgcctttccacagctataatggacatcaggttgactctaaatcaaggatcatgtgtgcacaatacttgtggcccacaaaatttcacaatgactgctgaggaatcattctttttgcctgtaaaatataacaaagtacaactgaaccaacaaatttatttagttagtgctgataaagacagcagccttgagagacaagcagtaattacctggtctacttaatgatgccctttgtcgatc

SEQ ID NO: 547827 - DNA, 188 bp, Homo sapiens
atccttagtagctagtaatgatatgcaaagctgatggccttttaattatagcagttccgtgtggggagaaataggagaactattataataaggagacacagtaagcaaaagaacacctttgaatgggcattttcttgctggggtaaaggtaacatggggggttggggggcgataccccacagggttcc

SEQ ID NO: 547828 - DNA, 166 bp, Homo sapiens
  misc_feature (43)..(43): n is a, c, g, or t
aggagatcaagcttttggcaatgagatctaaaccagacaaagncctccttatggaagaagatgacatggccttggaaatgtagtcatgcaggaggctcagaagaggctcatctcacaagttcagagagagggtttcatagaaaatattatccccttatcatctccc

SEQ ID NO: 547829 - DNA, 191 bp, Homo sapiens
gatctgtgctcttgtctgtctcaagtggacgattaatttctagtggttatgtaggagaaatatccttctttaatagatcacaaaatcttccttagttttacatcaaagctactctattttgggccatccaaatcctgcactttttttgttctggtttttttccctggtatttttcccacggctccgtttat

SEQ ID NO: 547830 - DNA, 342 bp, Homo sapiens
tgtattggtggtgctggctttgggcttctattgatcccattacctagacagtgaacatagtacccaataggaaggtttttcagcccttgactgcctccctctcttcctccttttcaagtccctagtgtctgttgttccagtctttctgtccgtgtgtccctaagttgatctacccttttctaagtgttgaagacaaaatttgaaaaccagtactatattaactaaccagtaactctactgtaataatatagattaattgcaacacattctacagctatgtctgtctgaaaactgtgggtgagaactgctatttttggaagcaccaccaatacagggtaccga

SEQ ID NO: 547831 - DNA, 480 bp, Homo sapiens
agaatttttacaaagacatttcttaccgccaagatggccggaacatgtctaccaggggcgcgtgtcttgtcatgacacgctcatgagctacacacttatcaccctatccatccactatgcactcaccaaactcttttcctagaccggaaccgatcaaaacatctcacacaatcggaggctagacaccccgagaacttcctcttatcacatatgtaacccccctgaatacctactctgctatatcttctagaggcacagaattcccatgagccacttttccccttattagatcaacctatactcccaaacatttgattatatactatgtctagactcaacaccatcactgcaccgtacatcctcacaaatgtaatcaatcataccctccaacacccccctttgatacacttaactattactcctcttcacacccttactcctttgctctacccttgcacccattctttttccttcctctct

SEQ ID NO: 547832 - DNA, 851 bp, Homo sapiens
gtgatatgaagggagagaagaaagaaaagtgcatagccattctgtaacaatattgtgtaaacctatagtttgaaggaatgcaaggagaaggatttctgtgttttactcattttaggctgttcagaagatgcttcaaaaattgtcctgttagaatttccatcatggaaggtggtatggaagaaggtatggaaatactttgtattctaaaaactcactgacgtggtcagttagacatacgttggtttccaggatggaggcccatatatcctggggagctttggtctattagtttgtgacaatattcaaaggccaaaacactactcagacactttcctgggaagagcaactaaaaatgtaaaattggttaaaaataaaatctgaaaagtatgtatctcacattgaactaaaatccactgtctcataagttcatggaatgaaatggctttctgcctccattttaatcatgcataaaatgaattagatggctttgagtggattttcacaatggctcaagactatatgaaattataaaaaaaaagttgccctggggtttctgcatcaattagaatatcattaatttctttgtaaccaagtgaaaaactatactttttggaaattatgaatttgtcctaggtttgtttgagatttgaaattatacatcatgcttctcattttttaaactatgttctttaaatcaacactggaaactctgtattatatacaagtgtaatacatgcatataatagaaaaaaaacatggaatttcaaatatactaactagattatccccagtagattaatgttgtgactattcagaaaaggtgaataaaattgggatataaaatggaaaaa

SEQ ID NO: 547833 - DNA, 509 bp, Homo sapiens
aatgcttgagcgtgggagggggaggtgtagtgagctgagattgcgccattgccctccaccctgggcagcaagagtgaaactctgtctcaaaaataaaataaggtaaaataaaataaaagcattattgtatgtgctgcattgaatggaacgtttatattagaattatcaaaaaagtttgcgtcatagcaatttatcctcattgaaaaccttgcagcatcctttgatttgggaatatcctctcaccagtcataccaccaggacatgactgtataacaataaaatattctcttgcattaaatgggggatatctattcaataaaagacaataaagaaaatgtaggaagtgtacttagagctgttactttctaagtgcccaacaccgtggacaattcaagcatcgtaatctctgtaaataacaataacaaaaaaaattttggtcctgctgttaaaatccatcattatagacaaaactggtgaggatggattagacagattcatctaacactgat

SEQ ID NO: 547834 - DNA, 448 bp, Homo sapiens
  misc_feature (58)..(58): n is a, c, g, or t
gcaacccggccattacgggcggggcgggcgcgggctaacccgcttaattttagcgccncgggagaccgagggagagagagggggcatgaggtcaagggacagcccccccacatacggggggcgcgtggcccccaataaacaagagggcgcggcggggccgtggctcaacacccaaaaacaaacagcggcgaggggcacggccgcaccatcccccggccaggagttcgaaaacagacacacgcacaaggggaaaccccggtgcgagtaaagaaaccaaaccccagcgggccgcgggggcacgcccacagagacccactcaccgggacggctgaggcaggaggaccaccagaccccgaagccggaggccgcaccgagcccagaccccaccaacgacccgcagcccgggccagaacacgactcacgggccaacatgcccggcgggggctcg

SEQ ID NO: 547835 - DNA, 1040 bp, Homo sapiens
gatgtcgtgtgttacaatgatgtgctggatcttgtagtaagttacctgctgtgcgtgcgggatgagcaatgcgagccctgtgtggtggcaaacgagactgtggcagatgttgtggttgtattgctgcaggagttgaatgttgacgatgtgtaactggtggccatcctgtggctgtgcagagtgccctcagttgtgctccttgtcaacccctttctcagctggcttgaaccattttgagatgccactggtgacattcagtggccttctcctgaaagcctgcctgcctgcctgccacctgacactaccttgcctttacctgtcatcctaatgagttgacgggatgctgctggaacagatgtggtcacatcgctgatggcacggcgagcatgccttgtgatgctggttgcgatgcacatgccagctcaaccatagtccgtgactaaccgctggctgtgctgacgtcgcaaggtgtctcataaccccttgaaactgaatgcaccgtgcaaatgggcgaactgaacctggaagtgcaccccggggccacggttctcctttcacaactctaacgtcgcggatagagcagactccaactcggcgcgcatagttcagcctgctctgggtcctccgcgagacaacgaacgttccccgcaacggtgcaattcaactctaacatccttctggcgcaacttccacacagcgcactacacacttccccgaacaattaacctgggaccataattcccaagaactaaccacaccccagtggcaccggctcaagttctcggctctacctcctctctcaacatctcttggaaccagtacacccttccaattccttggtgcaactcaaaccatggactaacggtacttgcacactccttgaaccaacaaaaggggccgtacacaccacaagcccttttccctgtgaacccaatggcaccacgccaataccactgtgttgcggagctaacaaccaaagtagacatccagcgtgctggttacatctcatcaaatggtaacgcctcaaaccacgtttatac

SEQ ID NO: 547836 - DNA, 135 bp, Homo sapiens
cccttcccccaagtgagcagtattgatctgagaattgagaatcactatttctttagtcagtctatagtttctgcatgccttctgtgtgtctctttgaactgagggatactctagtgtgtgtacgtgcgtgtgtgt

SEQ ID NO: 547837 - DNA, 320 bp, Homo sapiens
  misc_feature (42)..(42): n is a, c, g, or t
  misc_feature (59)..(59): n is a, c, g, or t
  misc_feature (71)..(71): n is a, c, g, or t
gctaaactctgtctcacaaaaaaaaaatttgtgggtgccaanactcaagaccatggganctggtcgggcanagtggctgacgtctgtaatctcagcactttgggaggccgaggcgggtggatcgcctgaggtcgggtgttcgggaccagcctggccaacatggcaaaaccccgtttctgctaaaaacacaaaaattggccaggcgtggtggttcatgtctgtagtcccagctgcttggaggctggggcgggagaatcgcttgaacccgggaggcatcggctgcggtgagtcaagatcgagacactgccctccagcctggg

SEQ ID NO: 547838 - DNA, 243 bp, Homo sapiens
  misc_feature (68)..(68): n is a, c, g, or t
  misc_feature (120)..(120): n is a, c, g, or t
catgctttcattcatctgagacattcctgtctattccattccataacatacgatttgatcattctgtnctattccattcaattctttttcattccattcgaatcctttctatagcagtcnattccattcgagtccattccaatcccttccattccattccattacaggccattccaatagattccattcctttgccttccattcgaatccattccattctagtccattccatttgagtcaatt

SEQ ID NO: 547839 - DNA, 339 bp, Homo sapiens
cgaggggcagctgacatcctgcagatacagaagatggggctcgaaggactcgttatgttaatcacaggatccacaggcgtgctggctggtaacaacaactctaccagttcactctagtgcaggatcactgcctgaatgaagggtccttatagaattcctccagttgagtgctttcataatatgtttgaagattatttcattataaaattttcatctatacatgagagacagaaggaactacagtctacagattttcaagtcaggtttcaaactcaattctcccactaagtaactatatgaccttggataaatcactttctctcattgggcgtacgggga

SEQ ID NO: 547840 - DNA, 108 bp, Homo sapiens
ggtcgtagctcagtgcgtgactgtctgcagcgggctgcagaataagagctgtaacatggagctgaggaccggacccagaacattatcatggccatggagtaatttgca

SEQ ID NO: 547841 - DNA, 809 bp, Homo sapiens
aactagtctccacacctaagctaactacagaaccagttgggctaaggacttaaccttggtaggggcactattattacctttgtattttaaggacacattcagttgctggctgaaagtattatcttccccatcaatctccggctaataatttgttttggaggggcagggggctcactgggaagaggcttctggttgtatatttaaaatttatatacctattttttattacatgaacaggctatacctaaaataaattcacgtaatttcaatggcagattactatttttactaattactcattactattagagattattatctctaatagaattaaatttgggagggggtaaatctggacattccgaaatttaccaattccaatgggatttcttatagaaatcctatagaatagaattcacccactggaagaagttgaagatttttatagaagcaaatgagtatttaatttggtggttttgtggtagggagattgagggcttaacttggtattatgatgaatagaatatacattacaggagggtttcggttttcagggaacggtcttggtccaaccaggagaattaaccaaaccaaatggatttgggggacacctttcaggcaactccgaattccatttccctgccttcagaagtcggattattggcagatacggccaggtttacccaagtaagagacttttggaattctgtttgatgtccagaacacctgttttgtctttgtccgaccgtaggccgaagcacagttgggggccatttaacaatgggccccctgggctgtccccgtggggc

SEQ ID NO: 547842 - DNA, 168 bp, Homo sapiens
agaaactctgtacccgattataaaatcatagtccatttccctctttccccacctcttggtaaccacttttatgcttttgctctccattgagccaccgtgcctggcctcacttagcatgttttaaacgatgcaatcatgtctaacatgcacatcaggtggatccgtcta

SEQ ID NO: 547843 - DNA, 380 bp, Homo sapiens
tagtagagacgggttttcaccatatgggtgaggctggtctcgaattcttgaccttgtgatccacccacttctacttcccaaagtgctggaattacaggcgtgagccaccgtgcctggccataagcttggattttttggtgcactcacttggtgtgctaggggcaggctacccagaaattatcattgtgtctgatgaacccagtttgaatttattaaaaggaaattttgtgtgtgtttaatctcctataattgactgattatcagggctttatttcattttatagtcagccgtgttgttgtcttgtgttcctttcattaggtttgactactacctttttagttgttcaaaacagcatttatttgttcaccacagcattttg

SEQ ID NO: 547844 - DNA, 445 bp, Homo sapiens
cggcgtcgacttcaggccgcgcatgaactgcgaataggtcaggccctcggcccggacaccggcgttgatgcgctggatccacagaccacggaaggtccgcttcttaaccttgcggtcgcgatacgcatattgaccggccttttcgacggcctggcgcgcgatgcggatggtgttcttgcgacggccataatagcccttcgcctgttccaaaatccgcttatgcttcgccttggtggtcgtgccccgcttgacgcgtgccatatctttctacccttccagaaatcagttcaggccgtaaggcgcccaggccttcacggtcttggtgtcggcatcggacaggaccgaggtgccgcggttctggcggatatacttgccgttatggctgatcaggcggtggcgcttgccggccacaccgtgcttgagcttgccggtcgcgggtcgacgc

SEQ ID NO: 547845 - DNA, 117 bp, Homo sapiens
ccggtcctttatttccttctttattgaaatacaagaaatcagccaggcgtgtcggcatgcgctatatagtcccagctacttgggaggctgagacaggagaatcacttgaacctggga

SEQ ID NO: 547846 - DNA, 748 bp, Homo sapiens
gccaggtgcagatacggggatgctcttattgctcataagaggggcttcgctggcagctactagaacggcaagccttgacgtcaggaccccttaattaagtatcctcaacttggctggaggcggcacgatcctcgcgtagtagggcaacgcggctaaccaatatcgcttcgcgctgggtgacgcggctacagctgcccaagggcgttcgtaacgggaatgccgaagccgtggcgaaaaacgggagcggtggcggcaagacggcggcatgagctcaggacagagcccagaggccaagaagagtaagcacgcgccgcaaagaaaaatgacaaagaggcagcacggagtagggcccagccctgtatgaggaccccccagatcagaaaacctcacccagtggcaaacactgccacactcaagatctgctcttggaatgtggatgggcttcgagtcctggcattacgaaggaacaggattacatcgcggtacatcgacacgaagccccagatataactgtgccttcaagagaccaagatgtcccgagaacaaactaccaggctgaaacttccgcgagctgccttggccctctctcatcatactggtcacctccttcgtcacattggcagcggttccgtgccgtggccctgccttcccgccagcttgccactcaaccggtccttccgcgcctacgcgcggcggacttgcccccgaaggcggctgtctgtgcctgcttcgaccgcctgtgttcgcc

SEQ ID NO: 547847 - DNA, 443 bp, Homo sapiens
tgcggggtgcccctgtgggagactgactgtctattgctcgataccctcttcatcttgctcatcctccacttgtctccatacctcattcttcctggtcgcagaacaagaactcaggacctgtcgaatggtggggctagaagagctgtagcacaaacagggctgagacatgccccctgctcgccacactgtgggtgaagagaaggagagaacagctgtagcccttcagggagcccagacctgggagctcccggagctaggcctgtgactccatctttgggaccctgtggttcctggtatctccaaacttccaggagctaccatgttcctcagtgtcaaccatggaagctgcttgcagtgtgtctggtctggccgcagcctcacagagagcccgcccatgctggcacctggagctgcccaccctgctgcagcacccagcgtgcctg

SEQ ID NO: 547848 - DNA, 859 bp, Homo sapiens
  misc_feature (3)..(3): n is a, c, g, or t
  misc_feature (81)..(81): n is a, c, g, or t
  misc_feature (83)..(83): n is a, c, g, or t
  misc_feature (92)..(92): n is a, c, g, or t
  misc_feature (114)..(114): n is a, c, g, or t
  misc_feature (126)..(127): n is a, c, g, or t
  misc_feature (131)..(132): n is a, c, g, or t
  misc_feature (134)..(134): n is a, c, g, or t
  misc_feature (156)..(157): n is a, c, g, or t
  misc_feature (160)..(160): n is a, c, g, or t
  misc_feature (178)..(178): n is a, c, g, or t
  misc_feature (182)..(182): n is a, c, g, or t
  misc_feature (191)..(191): n is a, c, g, or t
  misc_feature (193)..(193): n is a, c, g, or t
  misc_feature (199)..(199): n is a, c, g, or t
  misc_feature (207)..(207): n is a, c, g, or t
  misc_feature (209)..(209): n is a, c, g, or t
  misc_feature (214)..(214): n is a, c, g, or t
  misc_feature (218)..(218): n is a, c, g, or t
  misc_feature (221)..(221): n is a, c, g, or t
  misc_feature (225)..(225): n is a, c, g, or t
  misc_feature (242)..(242): n is a, c, g, or t
  misc_feature (291)..(291): n is a, c, g, or t
  misc_feature (308)..(308): n is a, c, g, or t
  misc_feature (330)..(331): n is a, c, g, or t
  misc_feature (338)..(338): n is a, c, g, or t
  misc_feature (347)..(348): n is a, c, g, or t
  misc_feature (350)..(350): n is a, c, g, or t
  misc_feature (361)..(361): n is a, c, g, or t
  misc_feature (377)..(377): n is a, c, g, or t
  misc_feature (380)..(380): n is a, c, g, or t
  misc_feature (445)..(445): n is a, c, g, or t
  misc_feature (626)..(626): n is a, c, g, or t
  misc_feature (788)..(788): n is a, c, g, or t
  misc_feature (798)..(798): n is a, c, g, or t
  misc_feature (811)..(811): n is a, c, g, or t
agntcttcctctgatggcgctgcctccatgccatgccctctgccagttctatgtggtgaacagtggagctgtcctgccagntnaaccagagntcgggagactggggctacgtancgctttacaacnncgcnnancacgcccgtcacacgaacaagnnganacacaacacggaccgaangccngtgaatttnanacacanttgggcgngncactntttnacngatncactccggccacgaaantcgctcgcggaacccgaccttcccaagccgggttctcgaaagtggaaantgtgactcaagcgaganttcgttgagggtacaatccgcnnccaactnttaaaatgnnanatggctgtttngggtgctttcaagggnctngaaggatattgtcagtctttaggggttgggctggatgccgaggtaaaagttctttttgctctaanagacaaaggaactaggtcaaaatctgtccgtgacctatcagttattaatttttaaggatgttgccactggcaaatgtaactgtgccagttctttccataataaaaggctttgagttaactcactgagggtatctgacaatgctgaggttatgaacaaagtgaggagaatgaaatgtatgtnctcttagccaaaaacatgtatgtgcatttcaatcccacgtacttataaagaaggttggtgaatttcacaagctatttttggaatatttttagaatattttaagaatttcacaagctattccctcaaatctgagggagctgagtaacaccatcgatcatgatntagagtgtgnttatgaactttanagttatagcttcttttatatgttgctataataaagacgtgttctgcaa

SEQ ID NO: 547849 - DNA, 1358 bp, Homo sapiens
ggggacgagggggtcaggcttgggccgacatcgcggggacagtgtgtggccatagcggcggcggccggggagtgaggaggcggaggaggaggcggctcgggagtcagagctgcccagcccaggcggcaggggcctagcagctctagagcagcctgccagagaggagctagctagctgctacatctaagctcctacctaggacatagcagggccctcgggcactgtctagagaccatgagtagtagccgactggcatgcgagcgcttacaccagctgcgcatctgctactggcgccggatagcccgggcctcgactcaactccggacttcacgcggcatcggcaaccgacctagatgaccagtgtacccagtagacggaacgagatgcaaggtgtctcaggacactgcgagactgcgggacgcctgccgcagcagcgggcatatcgtgctgcacacgtgcgacacgactggcagctccaccactgccctgcgccgccagccctcagaccgcgcatgacaaacagaagaaacaatactcaggcacagagacaaagaaacacaccagggagacccaacacaagaaaccagaaccagacaggacagacaagagaggaaactacagcaggcgccacactaggagcaggcacaaaaaggacataggagacaatgcagacggacacgcagaacggcaccaagcagcagcagcgacgacacccaaacccacgacacccaaccagcaaacagacggacacagacagaacgaaacaggacaacagcaagcacgccaaacacaaacagaatcgaccaccagcacaccacaccagagagaacccacacggccagccgccacagacccgaagacccgaacaagtcagcgcaacgacaacgcccaacgaacggcaacagcacagtgaacaggatgacatgaaggaaggaagagacggcaccacggagaaagaaaaacagcagcgcaagcgcacgaggtgaacaagaccacaccagataactacgacaagagacacagagcaacgaccacgcaacacaggcacgcaaccaaaagcacacgtaagcccaaacaccatatgatcaacccacgacgcaacacaacgtcaaccgcacaactaagtgacaatatattacaatatcatagtcgcaaaataaaacagaggagcagcaacacaaagcgacagacctatgaatagtcctcagcgatatgaaatccaccagatatcgacaacaacgcagaaaatcgaggcaactaaccacgatcgtgaacgctcagagaagccaacacgcagaccacaacaataaatcaacccagtcaagattgaactacccttatccgtgctaagcaaatag

SEQ ID NO: 547850 - DNA, 807 bp, Homo sapiens
  misc_feature (278)..(279): n is a, c, g, or t
  misc_feature (286)..(286): n is a, c, g, or t
  misc_feature (295)..(296): n is a, c, g, or t
  misc_feature (298)..(298): n is a, c, g, or t
  misc_feature (309)..(309): n is a, c, g, or t
  misc_feature (325)..(325): n is a, c, g, or t
  misc_feature (328)..(328): n is a, c, g, or t
  misc_feature (393)..(393): n is a, c, g, or t
  misc_feature (574)..(574): n is a, c, g, or t
  misc_feature (736)..(736): n is a, c, g, or t
  misc_feature (746)..(746): n is a, c, g, or t
  misc_feature (759)..(759): n is a, c, g, or t
gcgcgacatgggcctcggtgtgccttttctacatcgccatctacgccctgctcacgtacattgattgcgcacattcacgggcctgaagccaggtgactttatacacatctttgggagatgcacatatttacctgaatcatcatcgagcctgctgaaaattcagcttcagtcgtagaacccaggacctttcccttagtctcaggattcttcgtaaaagtttgagaatagttgatgacttcaaaggctgaagactttcagattgaagggtacaatccgcnnccaactnttaaaatgnnanatggctgtttngggtgctttcaagggnctngaaggatattgtcagtctttaggggttgggctggatgccgaggtaaaagttctttttgctctaanagacaaaggaactaggtcaaaatctgtccgtgacctatcagttattaatttttaaggatgttgccactggcaaatgtaactgtgccagttctttccataataaaaggctttgagttaactcactgagggtatctgacaatgctgaggttatgaacaaagtgaggagaatgaaatgtatgtnctcttagccaaaaacatgtatgtgcatttcaatcccacgtacttataaagaaggttggtgaatttcacaagctatttttggaatatttttagaatattttaagaatttcacaagctattccctcaaatctgagggagctgagtaacaccatcgatcatgatntagagtgtgnttatgaactttanagttatagcttcttttatatgttgctataataaagacgtgttctgcaa

SEQ ID NO: 547851 - DNA, 259 bp, Homo sapiens
  misc_feature (22)..(22): n is a, c, g, or t
  misc_feature (42)..(42): n is a, c, g, or t
  misc_feature (94)..(94): n is a, c, g, or t
tgtccttcccgctgcccagggnatggccaggccggagctcgngtgtgccgttgggaccaggcctgggaacccctctggcttgtttccccttttnagttacacaaatactttatgatcacttctgaaaatttaggaattttaggaatgaacaaggaagatagctttagagttatatacattttcttttacttgccattagagtcttcctagaccctgttttttaaagatgcctgactctccacgcccggctgtgaccaag

SEQ ID NO: 547852 - DNA, 415 bp, Homo sapiens
tacctattgggtactatgcttaatatgtgggtgacaaaatatgtgggtgacaaaataatctgtacaccaaacccctgtgacatgtttaactatacaataaacctgcacatgtacccttgaacctaaaataaacgtgttaaaaaaaaaagagagagagacagagacagggtctggctctgctggagtggctcgatcatagtgctctgtacccttgaacctccagcaatgctcccacctcagcctcaggagtagctgggactacaggcacaagccacaacacccagctggaactttataacataatggagaatataatataaagggcacttgagttaggggagataaatcttgaagtacaacattaatcgggcattttggcacaatgtacaaaatagattaattgaggactgggaga

SEQ ID NO: 547853 - DNA, 334 bp, Homo sapiens
gtcgaccccgggccgcgctgaattgaacggcattgccacggactgctgggcccgctatgaaacagagcctctttgaaagccgccatcagcccgagtggcaacgttttgcccaatggctcgagcagatggagcgcggcaaggcgaaacgaccgacttgcgcgaattcccagcccattaccgccgcctgtgccaacaactggccctgacccaggaacgcggctacagcagccatctggtcgatgccctgcaacagctggccttgcgtgggcaccagcagctctatcggcatcgcagccacctcggcgcctcggtgctggggttcgtcttcgtcgac

SEQ ID NO: 547854 - DNA, 135 bp, Homo sapiens
cccccttggccaaaaacccaattcccattgaaagggggggttgtttgaagtttttgtatcccagggttacccgggactttttcctgcaaccccaccccccaaaggtttttttatttcattccaggatcaatggta

SEQ ID NO: 547855 - DNA, 1460 bp, Homo sapiens
  misc_feature (569)..(569): n is a, c, g, or t
  misc_feature (711)..(711): n is a, c, g, or t
tatcgcacaagggattatttgttggagggtacagagtgacactgaacagatcacaaagcagcgaaaaactattagttctctccctctccccgaggcgttctcctttcgtcctcccgggtgtttctccgagtgttccacagaaggtgagaatgtgtcccataagtaacgtgcatgtgactcagaaggtgcgtgctcttatataagaacttcttcatctcaggggttatctccaattctcagcaatgtgtgctttcatctcaaatgtgcgcggtttgtgtgccgaggcttacggggcctgtttctcaggaagaagtttataaaactctctccattagtctataaaaaactgtgagaaaacatttatagtgtgccacgaacccaagaaccaaattgtgcggtgtggtgtataggcctgtggcatttctctttctcttataccatatatttctacacagatgtgtcttctcgctgtgggataagcccctgtgagcgtggagaagttctgcgaccacccaggtggggtgtgtggtgatgtgagtgtgaggtctctccccgagaaatgatgctcnacactctctcgacgaaaaagaaaaatatatcccttatataaaatatatatctctcttcctatagatcatacaagagacactgtggagacacaaattctatacgtgtggcgcgaagaacccctataaacagcggcccgcccgncttggtgtgtgggcgtgacgagcaccatgtgtgtctctctaatgaggtagatctcccccgttggaaaacgtctcttcccaagacatatatatgtgggggggagaagtatcacctcaacacaccccaaaacatttcgaagtgggagcggggcggggaaaaattttcgccccgtgtgtggcgcaactccagtgtgcgacaattaacacgtggggtgcgtgggggcccagaacaagaaatatgtggcccccacgtgtgtggagcgctctgcacgcgaacaaacgccaacgacccttttggagcgcctttcaaccccaaggagagggggggcgggggggacaacaacctccaaccctggtgaggagaaatcagcagcgggttgtggggaaccccggtggcgttgcatccctcccccccaatattatgtgggccacgaacaaactcccacacgcggccccccgaggttgcaccaaacagaattcccccccaaccgacgtggggtgccctttaggaaaacccacgcgaccacacgaacacggggtctctctgtcagcacgcgccgctgtgggcgaaaccacacatcaccacgccccagacggggctcccttaaacgcccaagtgtgtgtccgtcgggaacacacacacaacgctccccgtggaaaaaacaccctggggagcacgcgtttggagcagaacatcatttccgggggccccaacaaaaaggcgcggcgggcgcacccatccgtgggagc

SEQ ID NO: 547856 - DNA, 849 bp, Homo sapiens
ctctctcaggacaggacgtggggaccggcgtggaacctgaggcagaatgctatctctctccttgctaaattacggacctagaatagcaagcagataaaccattgatacccctctgggtgagacattgtcgatactgatatatggaatcgagtcacctagaatatcaaacagagtctttatagagatgacaagctgatggaaacatcaagatgggttctactcaccgtggttgtatggtagaatgttacatgtatcgagagtaattcatggaagcaaattatccaggagtaccaccaattcgatatacgtattgtatgtatttcaaagaatcaacaagagcaaaagtttctatgggatcagagggaatccatcatagctttatgtactcacctgcaacaattgataagaactattgaagacctagatgaaaatcagctgaaagatagagtgtgtaaactatctgcagatctcactgtggcgaaataagtgtgatgctgtctctctcaggtgggaaagtagttctcagaatacccaatgtactaaattcattggaagagctaaaaacctattccagtgacacttgaaagtgactaatggagacaatctttgtgggtccattgcatttagacaattttgccagggaaacccaatgaagagagaaagcttctggcataccttaggagctggtatactaggttctccgcactaagtttctggcactctgtgaggccggattaccaggcattttcacatcaatgttggccgaacatcttggtagtgccatctgaaaattggcataactggaggattacacatatgtagtaggaacgacacccaagtccagggaga

SEQ ID NO: 547857 - DNA, 490 bp, Homo sapiens
ctcctaccccgagaagagacagcgctgagtgtgcctgggcatctgcgtccatgcccatggatgtgagtagacagaaccctacttttgagaaaacgcctatccagcccactttgtaagaaccccctttttctaaactatgacaaaaggcggctttgcactttctgatcaaacaacactgtcttttgtctcctgcttaacttttaagactattctgtgaccgacatttgtagatttttttgttgttgttgttaatattttgcctggaaaaatgtgactctctccttgggaggtttagtagactaataaaaattatacatgaaggtggttgctattttgaggctaaaggtttttctaagaatcgccctcgtatcctgaccgtgaaggcttttcaggataccttttatagacgatcagatgcattcgagctgtgtttcctacatgatttctgttttgttttatgaaggacacgccatgtttaaatctctcattg

SEQ ID NO: 547858 - DNA, 330 bp, Homo sapiens
gtggtacctgtgggtagcacaacctagggtcagttttgcagagtggtaaagccatttaccaagatagttgtaggtaaagaagggcagatttattagagaaattgtgaaaatatgttgcagtgggcagctcagcagagaaggggctacctgcaaagaggcaagggctggaggaaagttttatagggtcctgctgaagggtgctacgtgtggaatgaggtcattgtgcccgcaggttgtttgtgattagctgtttctaacaattgttcatacaataattgttcattattgttctcaacttggggctctccccaacctggggacccttcctta

SEQ ID NO: 547859 - DNA, 348 bp, Homo sapiens
aggatccccggtgcagtgctgcattgttccatcatgatgggagttgatgccagctgagtacgtgtgttttggagacttcctagcctggctgtttgtagaacttgtgttctgaggacacatagaaacccctggaagggttcatacttatggaacttctattaaatcacagttaaatgatttaggtgccgagaagttggcaaactttgttcatagaagagtttcactgtaaagactaggaagttacacatgtaattgcaaattgatggctatgttttctttaagtgtacaactggcagaattttagcatcctagatattcttgtataatcttagaacatatgtttacaac

SEQ ID NO: 547860 - DNA, 171 bp, Homo sapiens
cagaatcacactcaaaatagatgttcaaatacatgcctcacaatagcctttgtaaactgtattccagatgtttgatacaaaaattaaatgggtggctttatatttaacagtacgtgctcatttagcacccactattatttaaaggggtctacccaaagttttccagcaaaa

SEQ ID NO: 547861 - DNA, 214 bp, Homo sapiens
cagcatgttgttagtgcaatctggtaataccctgagtaacctctgaggactgagatgctaaacatgcatatctgtgtgctaacctgactcctggctatattacttttctacccttattattccctttaacaagttatcacctatggttactttatatttgctatctattggtcgtagctccatttcccgtaaagtacctctgacatctccgtta

SEQ ID NO: 547862 - DNA, 1225 bp, Homo sapiens
agcggtgcgaggtaccgacaatacgtctggtggttggcatcttccgtcaacctcaacttgtcttcccggcagcgtctgggagccgacgtgcgtaaggagggaacctggtggctaacctgtggggaaggccaggtaggacatgccgcctgggttccgtggccgcaccgagcacggcgccgtcgcgtgtccgctgtgccgcagtcccggcgcggccatcaggcatcgcgatgcgtaagcgggtacctcgtgacgcagagcgatggcaggggggcgggctgcacacgtctgctggagtagtccatgctggccccctctgagcctgggactcctcctagcctgggccctgtgcacgggggcctgagagtaggcgtcggattgcctcgcaccattccgacgtcgcctgtgttctctcggtcaggacctgggctggatgcacgctatcgaggtgccaggagaggcgctcgtcgtaagagcgtgacgggcggggagcccagacctcgcttgcttgagtttccccataatacttggtccctacaggtggctgggaaagaactcttcggcgtggaattccaggcgtgccaagcgaaaggtctacgagaggcctgagggtggtttactccttggggggtgggaactgcgaaagaaagccgctttcggcaaagaaggatcgactcctttatggcattacaacacgagggatctacagtagtacttgaaacaacgttgggtgcggatcgaaagcaacgccgtaattccgaagaggtgaagtggtttggcgttgtgtttggtggacgcaagactgtattaatgttgggtaaaggtgcgtacgttattgggttggttttgaaccacaccgttaaatgaatttcgacacgggaataactttatttcagaaaggcaatttcacattttaaggttttgggccaagagtattgatagcggagtttgctaaagacgatagttagcattttgccataagttaaaacttctttggtatcagaaatttggcgtgcggtggatttacaaagtttacacacactcgattggtagaccatgggaagttttttagatacaacggggacccatgagggaggagtaaaaacgtataatagagtgcgaattagatagaacgtgtgagcctattatgagataggtactttatcccgaaaaagggggtcttggactggaagaagtgaattattaattgcgcaacatgtaatcaagt

SEQ ID NO: 547863 - DNA, 664 bp, Homo sapiens
gtacccactttgtgtgggaggacccagcctcactcgtgaaggagagagcggcaagcaagagtccatggtggaccacgcagctgagcacagagtccgctccgaaacacacaggccattccgtagtagtttacaaaaaagaccacccggatggacagcggtgacacagcgagacactagccagactaccctactcacctgatttacgcgttgctgtagcatgtggtactctatgttctacgtgatagtctcctccaccacaaacctgggatccgtcgcacgttaacaccttaacaacggtactatgcagataccctactaacaagcgtctaggaggccgtaaggggactgtctaggccgggaagtttgttgtgatagcccgggccttgcaaaggttttaggcgactacaggggtggtgcagatatcgagtgctcatcctccaccgtcgacactactataggtattaaggcctcttggacaccacctagggtgtaaggctgtttgctcttttggttatacctattaccttagttagtctgccaaggacactggtgcttgcaaagagaaaagtacctcttaaaacaactataaaaccttctgtagtaataaaggtcctcccaccacaaacgtgggatccgtgcacgttaacgataccaggacatagag

SEQ ID NO: 547864 - DNA, 222 bp, Homo sapiens
  misc_feature (142)..(142): n is a, c, g, or t
gtgaacattcctcctttggcctacaggtcagattgcggcagttgagcatcgtcattcttcaggattgccctactggccctacctcacagctgaaactttaaaaaacaggatgggccaccagccacctcctccaactcaacancattctataattgataactccctgagcctcaagacacctcccgagtgtctttcactcccgttccaccctcagctctacct

SEQ ID NO: 547865 - DNA, 843 bp, Homo sapiens
  misc_feature (538)..(538): n is a, c, g, or t
ggatcccttgcgttactgtggagaccctactctcttcgctgagaacggtcgtctagcggggactgaaggccgggagcccactcccgacccggggctaacgtgccgtccctagagtcgagtcggtgggcaatgggagccagatggtccgccgacgggggaccgggaaacttttctgggctcctgggcgcttgccctgatatgccgcagtctcctatgctccggctatgcaggtccagacaatcccagtcgctcctgcccgcatgactggtcagcctcgcctgacatcctgcgagtcaaggcgcgccaattgccactgtcgtcgtctccgtggtggtctgtacgtgactgcctagccgagcacggaggctccaggtaagcctgagctggtggagcagcctgcttgtcgttgctgtgtagcgcgtcaacatcgggatcagcccacatcgctacgctaacaaatcattccatcatgagcttggcagctaaggatgcatctggcggcccatagggccagtagcctagactcactccaaaggtngtaaattcggatagctaactcgttgattgcattgcccactagttgtaagccgactggtttattattgtcgtaaaatctgagactcagcgtcctgcttctactatggacttcattgataccgtcagaaactgaaattccccagatcacccatggcttggctggactctcttgcaagcacgacagacgatcttgccaaccaaacagagcccgaaacactctgaccacataccaattgatgctgtctaagactgtcattacgagggctgcgagtcttctcctccagtaagccccggcagacggtacta

SEQ ID NO: 547866 - DNA, 388 bp, Homo sapiens
  misc_feature (103)..(103): n is a, c, g, or t
ttcatgcgcgcaagaaacccccgcacgcgcgaagaatgcgtgggctccggcgccgtgaagatcatgtacgcgtaggccgcgagcaccggccagatcacgaagngccagtcgaacggcggcgtggacagcgcgcccaagagcccgagcgcgagcacgacccagatgcgataccgaggagcgatcgtcacgggcgcgcagcctaaatcagcgagcatgattctcgtccgagaatcatgcccagctgagtttggttcctctgcacgaggccggaaaagagagcgtcagctcagaaataaaacgtgatgccggcggtgaggaggccgccgcccgacgcgttggtcgtctggccggtgctgtccgtgaactcggggtggttcgtggagtcccg

SEQ ID NO: 547867 - DNA, 314 bp, Homo sapiens
  misc_feature (47)..(47): n is a, c, g, or t
  misc_feature (60)..(60): n is a, c, g, or t
  misc_feature (63)..(63): n is a, c, g, or t
  misc_feature (118)..(118): n is a, c, g, or t
  misc_feature (177)..(177): n is a, c, g, or t
  misc_feature (235)..(235): n is a, c, g, or t
cactcttctcaaccagcgtgtcgacgtttcacaatcatccttaatgncaaccagcgtgtngangtttcacaatcatccttaatctcaaccaccgtgtcgaggtttcacaatcaccctnaatgtcaaccagcgtgtagacgtttcacaatcatccttaatgtcaaccagcgtgtcgangtttcacaatcatccttaatgtcaaccagcgtgtcgacgtttcacaatcatcctaatncaaccaccgtgtcgaggtttcacaatcatcctaaatgtcaaccagcgtgtcgacgtttcacaatcatccttaatctcaa

SEQ ID NO: 547868 - DNA, 778 bp, Homo sapiens
  misc_feature (16)..(16): n is a, c, g, or t
  misc_feature (63)..(63): n is a, c, g, or t
  misc_feature (89)..(89): n is a, c, g, or t
  misc_feature (94)..(94): n is a, c, g, or t
  misc_feature (102)..(102): n is a, c, g, or t
  misc_feature (124)..(124): n is a, c, g, or t
  misc_feature (146)..(146): n is a, c, g, or t
  misc_feature (148)..(148): n is a, c, g, or t
  misc_feature (151)..(152): n is a, c, g, or t
  misc_feature (154)..(156): n is a, c, g, or t
  misc_feature (160)..(160): n is a, c, g, or t
  misc_feature (167)..(167): n is a, c, g, or t
  misc_feature (184)..(184): n is a, c, g, or t
  misc_feature (204)..(204): n is a, c, g, or t
  misc_feature (207)..(207): n is a, c, g, or t
  misc_feature (216)..(216): n is a, c, g, or t
  misc_feature (227)..(227): n is a, c, g, or t
  misc_feature (231)..(231): n is a, c, g, or t
  misc_feature (236)..(236): n is a, c, g, or t
  misc_feature (243)..(244): n is a, c, g, or t
  misc_feature (249)..(249): n is a, c, g, or t
  misc_feature (251)..(251): n is a, c, g, or t
  misc_feature (256)..(256): n is a, c, g, or t
  misc_feature (261)..(261): n is a, c, g, or t
  misc_feature (271)..(271): n is a, c, g, or t
  misc_feature (275)..(275): n is a, c, g, or t
  misc_feature (287)..(287): n is a, c, g, or t
  misc_feature (293)..(293): n is a, c, g, or t
  misc_feature (305)..(305): n is a, c, g, or t
  misc_feature (322)..(322): n is a, c, g, or t
  misc_feature (328)..(328): n is a, c, g, or t
  misc_feature (330)..(331): n is a, c, g, or t
  misc_feature (335)..(336): n is a, c, g, or t
  misc_feature (345)..(347): n is a, c, g, or t
  misc_feature (353)..(354): n is a, c, g, or t
  misc_feature (357)..(358): n is a, c, g, or t
  misc_feature (370)..(371): n is a, c, g, or t
  misc_feature (381)..(381): n is a, c, g, or t
  misc_feature (383)..(383): n is a, c, g, or t
  misc_feature (386)..(386): n is a, c, g, or t
  misc_feature (390)..(390): n is a, c, g, or t
  misc_feature (412)..(412): n is a, c, g, or t
  misc_feature (529)..(529): n is a, c, g, or t
  misc_feature (610)..(610): n is a, c, g, or t
  misc_feature (765)..(765): n is a, c, g, or t
gcctcggcagggggcnggggggccaggagggggggggggggcgcggcgggcggccggggaatnggggggggggggcggggggggcgagnagggngacagggnggggtctaggggagggggagcnggggggggccccggggccgggngnagnngnnnatgnaggatgnggggcaccagggtgggnacccagagaacaaaagggcnggntaataaagnagaaaatgggngggnagatnagaaggnnacagntnatganaatgnctttgagggntacnttactgggcagngaaatnagggaggggagngtggaaacaaacaatgngggggnannagtnncttacatgnnntaacgnntgnntttgaaaacagnntaaaacacgngnggntggncaggtccagtgtgtggtcccgngggggggttgagtgttgcatctttgcctttcttgtcgttgatttttgcccagatggatctgcatttatttgtactttttctatgtattataatcctgtagaagtcactaataaaggngtattttttttgtcagcttatcaatcagactgatctaatgtgaaatgtaagtatccttaaaaacaaagcatctattttggnagaaattgtgttcttaaattcagtcatttgatattctgtgagacttcatatttctcatccctttattgctttttagcaaacataagaaaccatgagtcattttgtcatttagagtattctgataaaatctcttgaaaatactgaaatcaaaaggntaatgattttttg

SEQ ID NO: 547869 - DNA, 89 bp, Homo sapiens
caacaggatcgcaacggaagtgaggccacgcatcaaagagtctatatcgcgaggtcgacgcggccgcgaatttagtagtagtagtagta

SEQ ID NO: 547870 - DNA, 439 bp, Homo sapiens
  misc_feature (3)..(3): n is a, c, g, or t
  misc_feature (81)..(81): n is a, c, g, or t
  misc_feature (100)..(100): n is a, c, g, or t
  misc_feature (132)..(132): n is a, c, g, or t
cgncgtcgagcctgttactgaatctgataattataggttctgatctacatggccaatggacatcatcgtggcagctgcctnacgagcgctccttgatggncctggactggaaggatcccggatacagaggcngaaaaaaagggaagatctttaatctgacgtgaagtggctggttacatccggcagcgggtgacttcctcaggtattattcgaggtggaggactaaccctatgaccgcctctgagagcttttgacatgattaatcgattcatttatggaaaaggatgggatccttatgttggataaactaccttcccaaaagagaacatcagaggttttcattgctgaaaagaaatcgtaaaaacagaaaatgtcataggaataaaaaaattatcttttcatatctgcaagatttttttcatcaataaaaattatcctc

SEQ ID NO: 547871 - DNA, 187 bp, Homo sapiens
aaaaacatctcctagctagaaccctaaccggggctgggcgcaggtgctcacacctgtaatcccagcaattggggaggccagcctgagcaacacagtcacacctcatctctaaaaaaattttaaaaagagaaataaaaataaagaatgggccgggcacagtggctcacgcctgtaatctcagcacttg

SEQ ID NO: 547872 - DNA, 191 bp, Homo sapiens
aattttaatttttgattgtttattggtaaaataaaaaaaagcaattggtttttgaaattgactttggaccccgcccctgaaataaactcactttcagttttaacaggttatttgcagattttttagggttttttgaaaaaagacaaaattgtttgtgaaaaaacaaaaatttatgtttccctttccagtca

SEQ ID NO: 547873 - DNA, 312 bp, Homo sapiens
cggtcccctttttgcctgcggatggtaaccgtggtaactgcttcattaaacatctgcccatatgcacttacatatcaggtagcctcacatttaagaagcctctgcaatgcttttactgttatacattgaaagaaatgagagcgaagcgtcgtagctgagtgtactctaaaggaaagtgcagctctcacccagattctaggcagaagggtaagtcatggcggaggggtataaatgtttatggtaaccgtggaactgcttcatttaaaatctgcccaaatgcacttacatatcaggtagtccgcaaggcgcaaa

SEQ ID NO: 547874 - DNA, 966 bp, Homo sapiens
  misc_feature (489)..(489): n is a, c, g, or t
  misc_feature (576)..(576): n is a, c, g, or t
ggacactcctgacacgcactccttccataccctatgctttgcaggtctatccccagagctccgctgcttgttgcatgcggggcactgggggccatgtgtcccctactatcagtgacattcttggtcctccgtgcaccactatacgtgtgctcacacaaaaggaagcatgtgacctgtgtatccctaggtccccctacccaggcaggagctggctcctggagccaaccccgtccacgcctgtctcctgaatcgctcgcgtgttttccagatgttggtgacgctgggagcatcatgccgccatagggtatggatagcctatcacgcaactcatcaggtgcctctgttcggcggagagctttcctgatgcatgcttgcgaaagtgcctcaacattcagatctggcgcttacctcactatactcccgcaaggccagttccgagactgtacgcatctcccggtgtcagctcccgttgcaagcttcctgcaacantgcacgagaactgacgtgattgttatctgcactttccaaggccaaatgaaccgtctgactccttctggtctacctggcgaaccaggntctcgagttgcccagcagccaacccacttggtctgcactgcccactactgcgtggaattctcgcggatggaacttgtgatcctcgtctgggcacagcgcagctcccagaagtccgctactggaggtagcagaagtgggccatggccctaggacactgccagctcctcacccactccagtccaccgagatcacgtcagagtaagagcctgtggccatgtggccgctgtcaggagccccacagtgcaagggtgaggatagcccaaggaagggctgggcatctgcccagacaggcctcccagagaaggctggtgaccaggtcccaggcgggcaagactcagccttggtggggcctgaggacagaggaggccaggagcatcggggaggcacgtg

SEQ ID NO: 547875 - DNA, 331 bp, Homo sapiens
tggcgggcagaaaactgaagtaattatccagaatagttagataaaaaaaaaaaaaaagcccacttcagcccccaagactaaactaggaagaagtcgaatccccgaatagaccaataacaagttctaaaactgtggtagtaattaatagcctaccaaccaaaaaaaaaaaaaaaaaaaaaaaaagcccaggacgagatggattcacagccgtattctaacagaggtacaaagaaagaggagctggtaccattccttctgaaactattccaaacaatagaaaaagaagggctcctctctaactcattttatcacatcagcatcatcctgatac

SEQ ID NO: 547876 - DNA, 152 bp, Homo sapiens
tattcccctattttgagcccataaaagacccagactcagctgcagtgaggagagaaatcaccctgctgtgggggttggggaccactccctgcatcccctttccactgagagctgtttttttggtcaataaaatttttttctacccatcctca

SEQ ID NO: 547877 - DNA, 140 bp, Homo sapiens
tcctgtaaagaaacatctcaatgtggcaggagagctcatgtatgggtaaactccgaccatgtagctctgtaggctccggcaggcgcattcttaggctgcttgagtccactgtggcatatgctcaactgaccatgagaatc

SEQ ID NO: 547878 - DNA, 370 bp, Homo sapiens
  misc_feature (42)..(42): n is a, c, g, or t
  misc_feature (114)..(114): n is a, c, g, or t
  misc_feature (171)..(171): n is a, c, g, or t
  misc_feature (217)..(217): n is a, c, g, or t
acacgtaaacgtctggattataaagactgatatggtagtgtnggaaatgtggggcactggatgcttatcattgctgtggtaacaactgcttgaaatattgcactttctttcttnttctttttcttttttcttttctttttgagacaggtctcactttgtcacccaggctgnagtgcagtagcatgatcttggctcactgcaacctccacctccaggnctcaagaggtcctcctgcctcagcttcccgagtagctgggactacaggcgcgtgccaccatgcttggctaatttttttgtatttttggtagagactgggttttgccatgttcccaggctgatctcaaactcctgggcacaagcagtcctctcg

SEQ ID NO: 547879 - DNA, 132 bp, Homo sapiens
cactcgtcactgttgccaccgcctccgacttactgactgggtcttacctactgaccgacacgacttacttaccacacactgcctgggactgtgaccgactaaccgcttgtacgactagtggatcggttaccc

SEQ ID NO: 547880 - DNA, 393 bp, Homo sapiens
  misc_feature (326)..(326): n is a, c, g, or t
  misc_feature (363)..(363): n is a, c, g, or t
ggcacgaggtgaaagtcaccaaaactcgaaccatacaagaatccccatcttcctttgaaactttgctgaaactctttagttttctggctttgctcatagctgtcttcttgattttcctgtaagtgaaagatctaactggcttttcaaatgtatggagtataacgttccaactcctctaatgtaacaactttgtcttcataatcataaaccatatccaaagaatgaaaccctaccccctcccctttccggttcacctcactggcagcttggtattgctgggtctcttgcagctccattaggtttaatgccagaagataaggtccagnacttttggttcacttaaaatgttggaaggatccaggnccttttcaggaagaagctgcccccagagaa

SEQ ID NO: 547881 - DNA, 1014 bp, Homo sapiens
ggtagagtgagccccgggggggcaggtgggatgaggatgagcagtggtcggtggtggtggagtgcgaggactgtgaactgatcccggcggaccatgtgattgtgaccgtgtcgctaggtgtgctaaagaggcagtacaccagctttcttccggaccagggctgcgccatcagagaaggtggctggcatccaccggctggggcatgaggcaccatcgacctagatctttctggaattcgaggagcccttctggggccctgagtgcaacagcctacagtttgtgtgggagaggacgaagcggagaagtcacaccctcaactacccacctgagctctggtaccgcaagatctgcggctgtgatgtcctctaaccgctgagcgctacggtcatgtgctgaggcggttggatctgcgcgtggatggatggccctcgttcatgagatgaatgatgttgattggggatggcccatgatgagccagatgatctggacggagatgctagcgtcagtttcaccagggaaccccaggattccagaaacctcgtggaatcttgacgctcgagtcttggagggcagcagacccttacttccgtggctccctatttcttatcacgcgggtgggcttcagtggcgcggatgtggacgaagcttgtcaaggccccctgccgtacaccggggaagctctaaagtactgggcccgatgcaggtgctggatcgcggtgagggcaacccatcgtgtgtgcctaatccaccaaccaagggctcaggtgtccggcaagcgggaaggttggccgctcattgagaattgtacgagacctctccagcaggggactgaggagtctacgcgcaagaaaagcataatcgggactcagctggccctgtgcggttgccgctctgacccggaaaggaatgacgtaaagacacgaagtaaaggggaattacaaggggagaaagggaacaaaaagacgcaccaaacaagcgaaggaaacgaaagcccaaagggacgcacaacaaaag

SEQ ID NO: 547882 - DNA, 712 bp, Homo sapiens
tcaaaaacgattgatttaaaaacagccctcccatcttagcaatgtcccggggtggttggagccaggggtcatttctttggtcctggtccaaaatctgtcggtagcgctccaacattgcaagttcattcacttgaagcttcctgtgcttcgatacctcctttccttcgatgtggaagctgagccctcacgcttccggcatgcctttggccgcggcgcctccttcatgagaagacagggttggtccaaaattcttagtgggcattcgccagacatgtgtgccggtggcctcccttgatagcgggatttggtggattgggtggagccactccgtgtttcaaccaagcaagcacggggaaagagctcgtgctataagcctttggcggtgcacaccgaagtgtgtagttgaagcgcccgtgcttgctttgtcgagctctcgcccaggaggatattgtttgcaggcgcgcggagttgcagggtccggggtggccctttcacgggtgcctctgcctttcagccggccaagcaggcttgcccacggccgccatattcctttcttttaagagcccccgagtgtggcaccgtggagtgtggttcagtacaggcccgtggctttgcaaccaacttttcccagaaacctttgggattttctcagaaccgccagcaacaggagcctgggggctggtccaggagggtcttcgggaaaagctccctc

SEQ ID NO: 547883 - DNA, 276 bp, Homo sapiens
  misc_feature (17)..(17): n is a, c, g, or t
  misc_feature (19)..(19): n is a, c, g, or t
  misc_feature (28)..(28): n is a, c, g, or t
  misc_feature (60)..(60): n is a, c, g, or t
  misc_feature (213)..(213): n is a, c, g, or t
  misc_feature (271)..(271): n is a, c, g, or t
ccctcaggaattacttngnatttttccncatgaccttaacctgtgtgggctgacagaggnacccagatcttcaggtttctgcgatgcagcaccagaacagtgctgggaactgaacagagactggggtggaggccggctgcagcctccgccatctctgtgggcccgcaccctgctggtctttgaagtgcagcagcccttcctcttcgtgctctnggaccagcagcacaagttccctgtcttcatggggcgagtatatgaccccaggggcctnagaac

SEQ ID NO: 547884 - DNA, 345 bp, Homo sapiens
ttcccaggctggtagttgaactcctgagctctagtgaccaccacctgcctcgtgtctccctaaaatgctgggattacgtggcattagccatagctctttccttgtgtataagagactttaacccttcttgtttcctcagtgttcattggacctagttttctttttcttttttatttttttctaacagagacaggtctcactattgttgcccaggctggagtgcagtggctatacacagacatgatcatagtaccctgtggccttgaagtcctggattcaagtgatccttttgcctcttgattatctgggactgcaggcatgcttgtgcctgactcaggtggtgtg

SEQ ID NO: 547885 - DNA, 253 bp, Homo sapiens
cagaggtagcttcgctcatgtacaaggagacttggggaccgttgatttctttgactgatgaatggaggtaattccccttcattaggccccattcccctgtaaagccgtcaagggcaatgttgttgtaatggtcaggacttagaagtcctcgaagtggcccaacgtcgctcccttggttgaaccttgcgtctgggactcacccttcaacccttcaaggcattccatgttctaacttttaaaacccattggctgt

SEQ ID NO: 547886 - DNA, 190 bp, Homo sapiens
aacccgcgacctcctttggaaattcagagatcacccatcttctgtgtcgcttacgctgggagctgtagactggagctattcctatttggccatcttggaacctccccccagttacttatttatttttacctctaaatactttattatttcattcatagacacatcattatgtattgcctaaggatgttct

SEQ ID NO: 547887 - DNA, 664 bp, Homo sapiens
acaaactagtctcgacgttttctctcttctttcttaggaactactacaaattttaatcttttactacgagctactcttaacaaatccttatcaagtaagatattaactttacctttataaatctttgtgtgacacatgaaaaaaaaatcaaggctataacaaatttcattgtgtatctacatttttaaataccatcctttggtctccggttaaaagattttcatccatttattcaaaaaccttttaagttcaacgtgtccaatttaagacagagtgaagacattttttgagtatctgaactaaggcattgtcttgattggaaacgaagtaaaggaactacaatggagaagtcctatgtagggcctacctcagtacatagccttataccgtgaatataagggagactatacatatctataggtaggggtacataccacgcctggctaatagttctaaatatgtggcccatcttaaggcatagatgttaacgaatatttcttatcacaggaatagctggccagcgtggtacctatgcttcctggcagatactgttatatttcccaatggttggtataacattcagcaagtctggtcaattctagcaacctggtctaggtgataaatgttcgaagagaggcttcctccagacagggtcccctgtttc

SEQ ID NO: 547888 - DNA, 282 bp, Homo sapiens
acgagagctagcagacgcacataagatgcttatagctcttccagctggaggaggaggtggtggtgtacttaatggtggaactgccgactccaacagagctgaggccacccccaatggctctgccaatgatggaactgaagccaactccaaagccaagaccactgacataggagtagctgcttcctccaaccaggcctaagccactgacgacatcactggaaccgccaaagccacatggagacggtggactgcaccacagagatatagccttacggagaaaag

SEQ ID NO: 547889 - DNA, 352 bp, Homo sapiens
  misc_feature (15)..(15): n is a, c, g, or t
  misc_feature (73)..(73): n is a, c, g, or t
  misc_feature (75)..(75): n is a, c, g, or t
ctaagcgcactgctntccagtactggtcggcctattgcgtttgtcagaaaaattccttggaccgcggcagagntngagctgagagaacattttgcacagtttggccatgtaagaaggtgcactgtaccttttgacaaagagactggctttcacagaggcatgggttgggttcagttttcctctcaggaagaacttcagaatgcactacaacaagaacatcatattattgatggagtaaaaatccacgttcaagctcaaagagcaaaggctttgcacggagctcaaacatctgatgaagaaagatttctgagatgatcagtgtaccgtccactaaataaacagaattgagaca

SEQ ID NO: 547890 - DNA, 907 bp, Homo sapiens
  misc_feature (102)..(102): n is a, c, g, or t
  misc_feature (107)..(108): n is a, c, g, or t
  misc_feature (117)..(120): n is a, c, g, or t
  misc_feature (122)..(122): n is a, c, g, or t
  misc_feature (125)..(125): n is a, c, g, or t
  misc_feature (158)..(159): n is a, c, g, or t
  misc_feature (161)..(161): n is a, c, g, or t
  misc_feature (224)..(224): n is a, c, g, or t
  misc_feature (228)..(228): n is a, c, g, or t
  misc_feature (269)..(269): n is a, c, g, or t
attctagaggccgaggctgccagatcgcttgaggtcaggggttcgagaccagcctggccaacatggtaaaacccgtctctatctactaaaaatacaaaacgnagctnnccgggtggnnnncngantcacttgaacccgagagtggaggttgcagtganncnagattgcaccattgcactccagcctgggtgacagagcaagactccatctcaaaaaaacaaacnaatnataagaaaacaataataaaacaaaataaataaatgtatatnaccatgtaactactaccacaatctagttacaggacaatttcattcccccaaattccctcttgcctcaccccatccactggcaaccactgacttgatttctgtctcttaagtaaacatagaatattattgattcataaaatcatgattttgaaaattaatgacatgaaaaatatgcacaatatatttcagaaagcaaaatgtataatttcatttaaaaaatgcatagcatggtcccatctttgtgtgtattctgtgccaataaagctcacagcaaggaaatattacttttctgcacgtgatgaatgtacatcctttgtacatttttccaaatgtctacaatgagcctgtagttctctcatgctcagaaaatatgaatgcctttttctaaaaggaacaaggtcattatagctacttatttggacttttttttcctttaaaaacttagatattacatacagtaaatttactcttgcaatttatgatgcagggagtttgataacgtgtgttttaacgaatgggcatgtggtgactcaggctataatccaaacagtggggaggccgagtgcaaatggttgaggcaggatccggatcggcggcaaaatggtgaactcatttataaatcaaatttgcaggggagg

SEQ ID NO: 547891 - DNA, 11972 bp, Homo sapiens
ctggctccgcgtcggccggtcggtttggtcggttgtagtggcctcgccgcccggtccgctgtcgcagcgctcatccgcgccgggagcccttggctgcgtcgcccggcagccgcgggagcatttcctgaagacgtagtcatgcagcacgtcagcagctcccagagcagccagcgccatgtccagtggcctggggcctgccccggcgcgggcgaggagcagccagcgtgctcccagccgtccctgcccctcacactgccatcccccagccaccaactacagcagctgatggtccagacccagagtcccacgcagcccagtccggggccggggcaggccttgcagaatgtgcgtgcaggtgcccctggccctgggctgggcctctgcagcagcagccctacaggggacttcgtggatgccagcgtgctggtgaggcagatcagcttgagcccctccagtggtggacactttgtgtttcaggatgggtcagggctcacccagatcgcccagggagcccaggttcagctccagcacccgggtacgcccatcacagtccgagagcggagaccctcccagccccacacacagtcagggggcaccatccaccacctgggaccccagagccctgcagccgcgggtggggccggcctgcagcccctggccagcccaagccacatcaccacggctaacttgccaccgcagatcagcagcatcatccagggccagctggttcagcagcagcaggtgctgcaggggccgccgctgccccggcccctgggcttcgagaggacgcccggcgtgctgctccccggggctgggggcgcagcggggtttgggatgacgtccccacccccgcccaccagcccttccaggactgccgtgcccccaggcctttccagcctcccactcacgtctgtggggaacacgggaatgaagaaggttcccaagaagttagaggagattcccccagcctctccggagatggcacagatgaggaagcagtgcctggactatcattaccaggagatgcaggctctgaaggaggtcttcaaggagtatttgattgaactgtttttcttgcaacactttcaagggaacatgatggatttcttagctttcaaggagagactgtatggaccattacaagcatatcttaggcagaatgatttggacattgaagaagaggaggaggaggaggaagaggaggaagaaaaatctgaggttatcaatgacgagcagcaagccctcgcagggagcctggtagcaggggccggaagcacagtagagacggacctgtttaagaggcagcaggcgatgccctccacaggtatggcaggaggaatgccccccacgccgcaggccgcgcagctcgctggacagaggcagagtcagcagcagtatgacccctccacggggcctcccgtgcagaacgctgccagcttgcacaccccactgccgcagctgcccgggaggctgcccccagccggtgttcccactgcagccctctcctctgcgctgcagtttgcacagcagccgcaagtggtagaggcccagacacagctccaaatcccggtgaagactcagcagcccaatgttcccatccctgcaccgcccagcagccaactccccatccctccctcgcagcctgcacagctggccctccacgttcccacacctggaaaggtgcaggtgcaggcctctcagctttcctccctgccacagatggtagcatcgacaaggctccctgtggaccctgccccgccctgcccacggcctctgcccacctcttctacctcgtccctcgcgcctgtgagtggctccggcccaggaccctcccctgctcgatcctctccagtaaatagaccttcctcagccaccaataaggcactatctccagtcacttcccggaccccaggggtggtggcatctgcccccaccaaaccacagagtcctgctcagaatgccacctcgtcccaagacagttctcaggatacgctgacagaacaaataactctggagaaccaggtgcatcagcgcattgcggagctgaggaaagcaggtctgtggtcccagaggcgtctgccaaagctgcaggaggccccacgccccaagtcccactgggactatctgctggaggagatgcagtggatggccacagactttgcccaggagaggaggtggaaggtggctgctgcgaagaagctcgttagaactgtggtgcgccatcacgaggagaagcagctccgtgaagaaagggggaagaaggaagagcagagcagactgaggcggatagccgcctccacggcccgggagatagagtgcttttggtcgaatattgaacaggttgtggaaataaaactacgagtagaattagaagaaaaaaggaagaaggccttaaatttacagaaagtttccaggagagggaaagaattgagacctaaaggatttgacgcattacaggaaagttctctggattcaggaatgtctggaagaaaaagaaaagctagcatatctttgactgatgacgaagtggacgatgaagaggaaacaattgaagaggaggaagcaaatgaaggcgttgtggaccaccaaacagaactttctaatttagccaaggaagctgagctgcccctcctggacctgatgaagctgtacgaaggcgccttcctgccgagttctcagtggccccggccgaagcctgatggggaggacacaagcggagaggaagatgcagatgactgtccaggcgacagggagagtcgcaaggacttggttctcatcgactcgcttttcatcatggatcagttcaaagctgccgagaggatgaatatcgggaagccaaacgccaaggacattgcggacgtcactgcggtggctgaagccatcctgccgaagggcagtgctcgggtcacaacctcggtcaagtttaatgctccatctttgttgtatggggctctcagagattatcagaagattggcctggactggctggccaaactttacaggaagaatctcaatggcatattggcagatgaagctgggctgggtaaaacagtgcagatcattgctttttttgcccacctagcttgtaacgaaggtaattggggcccccatcttgttgttgtgagaagttgtaacatactcaagtgggagcttgaattgaaacgttggtgtcccggactcaaaatcctctcatatattggcagccacagagaactcaaagcaaagagacaggagtgggccgaacccaacagcttccacgtctgcatcacgtcctacactcagttcttccggggcctcaccgccttcacacgagtgcgctggaagtgcctggtcattgatgagatgcagcgcgtgaagggcatgaccgagaggcactgggaagcggttttcaccctgcagagccaacaacgtctgcttctgatcgactcgccgctgcacaataccttcctggagctctggaccatggtgcacttcctggtcccagggatctccaggccctacctgagctcccctctgagggcccccagtgaagagagccaggattactaccataaagtggtcataaggttacacagggtgacacagccatttattttgaggagaactaagagagatgtggaaaagcaactaacaaagaaatatgagcatgttttgaagtgtcgcctttctaaccgacaaaaagccttatacgaggacgttatcctgcaacctggcactcaggaggccttgaagagcgggcactttgtcaacgtcctgagcatccttgtgcggctgcagcgcatctgcaaccaccctgggctcgtcgagccccggcacccaggctcttcctacgtggcggggccactggagtatccgtccgcatctctaatcctgaaggcactggagagagatttctggaaggaagcagatctttctatgtttgatctcatcggcttagaaaataaaatcactcgtcacgaggcagagttgctgtctaagaaaaagataccgcggaaactcatggaggaaatctccacttcagcagccccagcagcccgaccagcagcagcaaagctgaaggccagcaggttgtttcagcctgtgcagtatggccagaagcccgagggtcgcaccgtggctttccccagcactcacccgccccggacggcagcccccaccacggcctctgctgctccacagggcccgcttcgaggacggccgcccatcgccacgttctctgccaatccggaggcaaaagcagcagcagccccgtttcagacctctcaggcttccgccagtgctccacgacaccagcccgcctcggcctccagcacagccgctagcccggcccatcctgcgaaactgcgggcccagaccacagcacaggccttcaccccaggccagcccccgccccagccccaggccccctcgcacgcggccgggcagagcgcgctgcctcagaggctggtgctcccctcgcaggcccaggcccgcttgcccagtggagaggtagtgaaaatagctcagctggcatccatcacaggaccacagagccgcgtggctcagccagagacgccggtgacactgcagttccagggcagcaagttcaccctgtcacacagccagctccggcagctcacagcgggccagccgctgcagctgcaaggcagcgtcctccagatcgtgtccgcccccgggcagccctaccttcgagcccctggccctgtggtgatgcagaccgtgtctcaggcgggcgctgtgcacggcgccctgggaagcaagcccccggccggcggtcccagccctgcacccttgaccccacaagttggcgttccgggccgcgtggcggtgaatgccttggctgtaggagaacccggaacggcctccaaaccagcttctcccattggagggccgacccaggaggaaaagaccagactcttgaaagagcgcctggatcagatttatttagtcaacgagcggcgctgttctcaagctccagtctatggcagagacttgctaaggatttgtgccctgcctagccatggaagggtacagtggcgtgggtccctggatggccgtcgtgggaaggaggccgggccagcgcacagttacacttcatcctcagaaagtccaagtgagctgatgttgacgctttgtcggtgtggagagtctctgcaggatgttattgacagggtggcctttgtgattcctccggtggtggcagcacccccgtccctacgggtgccgcggccgccacccctgtacagccacagaatgaggatcttgaggcagggcctgagagagcacgctgcgccgtacttccagcagctgcggcagaccacggctccacgcctgctgcagttccctgagctgaggctggtgcagttcgactcagggaagttggaagctttagctatcttgcttcagaaattgaaatctgaaggacgtcgggtgctgattttatcacagatgattcttatgttggacattttagagatgttcttgaacttccattacctcacctatgtaagaatcgatgaaaatgccagcagtgagcaacggcaggaactgatgaggagtttcaacagagacaggcggattttttgtgccattctctccactcacagccgtaccacaggtataaaccttgtagaggcggacaccgtcgtgttttatgacaatgacctgaatccagtgatggatgccaaagctcaggagtggtgcgataggatcgggagatgcaaagacatccacatatacaggcttgtgagtggcaattccattgaagagaaattgttgaaaaatggaactaaagatctgatccgagaagtggctgctcagggaaatgactactccatggctttcttaactcagcgaaccatccaggagctgtttgaagtttattctcccatggatgatgctggcttcccggtcaaagctgaggagtttgtggtgctttctcaggaaccttctgtcacggaaaccattgcacccaaaattgcaagacctttcatagaggccctcaagagtattgagtatctggaggaggatgcccagaagtccgcacaggagggggtgctgggaccacacactgatgctctgtcatcagactctgagaacatgccgtgtgatgaagaaccatcccaattagaggagctagctgacttcatggagcagcttacaccaattgaaaaatatgctttaaattacctggaattattccatacttctattgagcaagaaaaggagagaaacagtgaggacgcagtgatgactgcagtgagggcatgggagttctggaacctgaagaccctgcaggagagggaggcccggctgcggctggagcaggaggaggcggagctcctgacctacacgcgagaggatgcctacagcatggagtatgtctacgaagatgtcgatgggcagacagaagtcatgccgctctggaccccacccaccccgccgcaggacgacagcgacatctacctcgactcggtcatgtgtctcatgtatgaagccactcccatcccagaggctaagctgccccctgtgtacgtgaggaaggagcggaagcgacacaaaacagacccctcagctgcaggcaggaagaagaagcagcgtcacggggaggcggtcgtccctcctcggtccctgtttgaccgcgcaacaccaggacttctgaaaattcgcagagagggcaaggagcagaagaagaatattctgctgaagcagcaggtgccattcgccaagcccctgccaacttttgccaaacccacagctgagcctggtcaagacaaccccgagtggctcatcagtgaggactgggcgctgctgcaggctgtaaagcagttactggagctgcctttgaacctcacaatcgtgtcacctgctcacacacctaattgggatcttgtcagtgacgttgttaactcctgtagccgaatctaccgctcttccaaacagtgccggaatcgctacgagaatgtcatcattccacgagaggaggggaagagtaaaaacaaccgtcctctccgtacgagccagatctatgcccaggatgagaatgccacacacacccagctgtacacgagccactttgacttaatgaaaatgactgctggcaagaggagtcccccaatcaaacctctgcttggcatgaatccctttcagaagaaccccaagcacgcgtctgtgttggcagaaagtggaatcaactatgacaagccgctgcctcccatccaggtggcatctctccgtgcagagcgaatcgcaaaagagaaaaaggctctggctgatcagcagaaggcacagcagccggccgtggcccagccacccccgccccagccgcagcccccaccacccccgcagcagccaccgccaccgctgccacaaccacaggcagcgggcagccagccgccagcagggccaccagctgtccagccccaaccccagccacagccccagacccagccacagcctgtgcaggccccagcgaaggcgcagcccgcaatcacgacggggggcagtgcagccgtactggcaggaaccattaaaacatcagttactgggacgagcatgcccactggtgccgtgagtggaaatgtgatcgtgaacaccatcgcaggggtcccagctgccaccttccagtccatcaacaagcgcctggcgtcgccagtggctcctggggccttgactacgccgggaggctctgctcccgcccaggtggtgcacacccagcccccgccacgggcagtcggctccccagccacggcgacccctgacctggtgtccatggcaacgactcagggtgttcgagcggtcacttctgtgacagcctcggccgtggtcactaccaacctgaccccagtgcagaccccggcacggtctttggtgccccaagtgtcccaagccacaggagttcagctccctggaaaaaccatcacacctgcacatttccagcttctcaggcagcagcagcagcagcagcagcaacagcagcagcagcagcagcagcagcagcagcagcagcagcagcagcaacagcagcagcagcaacagacgacgacgacctctcaggtgcaagttccacagatccagggccaggcccagtccccagcacagatcaaagctgtgggcaagctgacgccggaacacctcatcaaaatgcagaagcagaaactgcagatgcccccgcagcccccaccgccacaggcccagtctgcgcccccgcagccagcagcccaagtgcaagtgcagacctcgcagccgccgcagcagcagagcccccagctcacgacggtcacggccccaaggcctggtgccctgctgacgggcaccaccgtggccaacctccaggtggcccggctcacccgggttcccacttctcaactgcagtcgcaagggcagatgcagacccaggcaccccagccagcccaggtgcccttggcgaagcctccggtggtgtccgtcccggcagctgtggtctcctcaccgggagtcaccaccctgcccatgaacgtcgcggggatcagcgtggcgatcggtcagccacagaaggcagcaggacagaccgtggtggcccagcccgtgcacatgcagcagctgctgaagctgaagcagcaggccgtccagcagcagaaggccatccagccccaggctgcacagggcccggcagccgtccagcagaagatcaccgcacagcagatcaccacccctggcgcgcagcagaaggttgcctacgccgcgcagccggcccttaagacccagtttcttaccacacccatctcccaggcccagaaactggccggggcccagcaagtgcagacccagatccaggttgcaaaacttcctcaagttgttcaacagcaaacacccgtggccagcatccagcaagttgcctctgcttcccagcaggcttctccacagactgtggcgctcacgcaggcgacggcggccgggcagcaggtgcagatgatccctgcagtgaccgcgactgcccaggtggttcagcagaaactcattcagcagcaggtggtgaccacggcgtcggccccgctccagactccaggcgctcccaacccagcccaggtgcccgccagctccgacagcccaagccagcagcccaagttacagatgagggtccctgctgtcaggctaaagacacctactaagcctccgtgccagtagtcagggcagcagggctgcctctcatctaaagcaaaactaccttcctcacagaaaacgctttattagtgaaccttgggaccatgtcacgcaagagattcagcactgggaaagatataattgaaacaaaatagtgtaatcattttattaaaatgcatcccacactgcaggacaaatggtccttatggagtgccgcgttctctgtactacgtggctcatggaaaaagtgacaacatggcttcctctaaatcatttcacctttcagtccccacccgcacccgtcccctagagccatagtactgtgttctgaaagccatttagaatttctttgtgagcatgtagtgctttgcacgccacagaagccgtctgccgtgtgtgaggagcatacaatggactttctaaagataaggcgtgggcttccacagtgtctgccagagtttagttctttataccttactgaaaaatgcctcgtggtcttcgcagaggggaaggcctgtctaaagtcaatcatccgagatgggttttccattccaaagaaaggcaatatggttccttccttccctcctaaaatatgacttaacttttaagagaaatgttctgacacccacctaaacacacaaggcacgttcctggcctgtgttcaagggaaatgatcagtcattgcattgttattccaaagagcagccaacagtggcctcccccaggccctaccctgcaatgggattcgctttcatttaatggaaacttctgggactgatgcccaactcagtgcactcaagacgcatctccagttttcgggggaagctggtatttgacatagtgtgttaaacagctcctgagaacctttgggacactctgccatggctggcgtgaggcccagaggaccacgcagaggcaatggtagtacagatgtcacagctgagggtacgatgaggcctgggctcagtgagccaggacgaatgtgacagacaccccttgctgccacagtcagccctttgacgaaggtgggctggtgattctggaagtattggctatagcggtgggcccagtcaactcttccttgtggacttacgacagcagattttctctaggataagcttgtgtggttctgccagtgaagcagagaaccacctgtgctgttgtggaaggcgtgccgttgagggggaaaacgaagcccagtatttgctactgtttttcctttttttactatgacaggaaaataaatgcaattttagtggaattgattgacagtgtctccttactttgaagttttcaccaaagcaaaaaggtccatatccaatagtatcctttgtgctgtggcttgattttggcctattttacattatttggtccaggaaattaggttatattaggttttttgtatactaaaaatcagttatggcacaataaagattttctgtttttaaattgtatttcatctgcttcctccccattctctcactttaagtgacattgaggaaggtattctgtcccacaggtttctgtggacagcgatacagcaggagtcagtgaaatcaactggggagctcacttgagctcttgataagaaatgtggagaaaagtaaaaaccaagctttgaagaaacagaagaaattaatcttttagttagttgaacataccaaagcagaggactggaatctgtttgttctaaccaacccgttctccctggcttggcacgtgccgtgagagcgcagcttgccggagggagggccgctgtgtgcgcctcacatctggctcccagtggaaacttttactcctcctcatccgcagatgtgatagaactgaagtatctaggaattctgcctttgtcatttgttttaatttgtgtgccctgttcattttttttgtctttcccaaatcttggtagtctccttatagttgaagataaaatgttgagtgcacttattttagaatatcctagacataactgtctaagtaaaagcgctctattaatctaaaacactacaagagaatttaacaccatctctcaaatgcttttttggagagcttaatgggattctgaatatttgcaatgtggagtttccgccccgatctcacgtcagtgagggtctcctgtctctcaagtgtgtttcctttggctgttccctaatacaaaacacggacatatttttactcgtagcactcaatttagtaacttctagatgctaccgttgacctgagttaaattcatttagtcgtgtacgtaaaaactctccttttagtgtgttattttcttggccttcccttttaaaggttaaagtttctaacctaagaattaagtacgcgttcaggaagctgttgtctaggccttccccttgtgaatctgggttcattccaatacggcaagtaagagttggaaactttgagaacacagactataaaggcagcagcccgaacactgtcagactctaattggcgaccctgggaaacagttgccctgctattctttaaagaaagacgtttattctgatgataaaaacagttagccagactgtttttaaagcacctggcgggaagcagaaggttggatccaagcccttgttcagatttggtgcctgataagacaggggtttctctttttgtgacctttattattattattttgttaactgttgtaaccagttagctgttgtgttttaagatagaaaggaacaagactaaaattgtaaatactttgtaaacatcagcatttgtacttgaatagtaggattttaaagggcattgatagcataccaaacaaaaggcaaaataaagtgacctttttataaaaaaaaaaagaaaaagtcgac

SEQ ID NO: 547892 - DNA, 12339 bp, Homo sapiens
ctggctccgcgtcggccggtcggtttggtcggttgtagtggcctcgccgcccggtccgctgtcgcagcgctcatccgcgccgggagcccttggctgcgtcgcccggcagccgcgcctcgcgagaccgctgtctacggcgctgacgccgcctctgcctcttgaccccttggccccgctgtcctgatccctgaggtcggggcctggtctgcactccaggaaagacgagtgcgcttagtgtgcgctgcacgtgagcagtgaagttgattccacgcgctgcgctgctcggcagctgtcccagaactgaccacggacccctccgcgggtcctgctcctgacaagggccttccggcactgggagttttgtgttagtggaaaggaagaatctaataataccaccacctttacagtaaagacgctgcgaattgacgccttttataataaagacacttatcttgcccaagagctgggctggagtgtagtggcgcaatcttggatcaccacaacctccgtctcccaggttcaagcgattctcccgcctcagcctcctgagtagcaattacagggagcatttcctgaagacgtagtcatgcagcacgtcagcagctcccagagcagccagcgccatgtccagtggcctggggcctgccccggcgcgggcgaggagcagccagcgtgctcccagccgtccctgcccctcacactgccatcccccagccaccaactacagcagctgatggatgggtcagggctcacccagatcgcccagggagcccaggttcagctccagcacccgggtacgcccatcacagtccgagagcggagaccctcccagccccacacacagtcagggggcaccatccaccacctgggaccccagagccctgcagccgcgggtggggccggcctgcagcccctggccagcccaagccacatcaccacggctaacttgccaccgcagatcagcagcatcatccagggccagctggttcagcagcagcaggtgctgcaggggccgccgctgccccggcccctgggcttcgagaggacgcccggcgtgctgctccccggggctgggggcgcagcggggtttgggatgacgtccccacccccgcccaccagcccttccaggactgccgtgcccccaggcctttccagcctcccactcacgtctgtggggaacacgggaatgaagaaggttcccaagaagttagaggagattcccccagcctctccggagatggcacagatgaggaagcagtgcctggactatcattaccaggagatgcaggctctgaaggaggtcttcaaggagtatttgattgaactgtttttcttgcaacactttcaagggaacatgatggatttcttagctttcaaggagagactgtatggaccattacaagcatatcttaggcagaatgatttggacattgaagaagaggaggaggaggaggaagaggaggaagaaaaatctgaggttatcaatgacgaggtaaaggttgtgacaggaaaggatgggcagactgggactcccgttgctatagcaacccagcttccgccaaaggtttctgctgctttttcatcccagcagcaaccatttcagcaagccctcgcagggagcctggtagcaggggccggaagcacagtagagacggacctgtttaagaggcagcaggcgatgccctccacaggtatggcaggaggaatgccccccacgccgcaggccgcgcagctcgctggacagaggcagagtcagcagcagtatgacccctccacggggcctcccgtgcagaacgctgccagcttgcacaccccactgccgcagctgcccgggaggctgcccccagccggtgttcccactgcagccctctcctctgcgctgcagtttgcacagcagccgcaagtggtagaggcccagacacagctccaaatcccggtgaagactcagcagcccaatgttcccatccctgcaccgcccagcagccaactccccatccctccctcgcagcctgcacagctggccctccacgttcccacacctggaaaggtgcaggtgcaggcctctcagctttcctccctgccacagatggtagcatcgacaaggctccctgtggaccctgccccgccctgcccacggcctctgcccacctcttctacctcgtccctcgcgcctgtgagtggctccggcccaggaccctcccctgctcgatcctctccagtaaatagaccttcctcagccaccaataaggcactatctccagtcacttcccggaccccaggggtggtggcatctgcccccaccaaaccacagagtcctgctcagaatgccacctcgtcccaagacagttctcaggatacgctgacagaacaaataactctggagaaccaggtgcatcagcgcattgcggagctgaggaaagcaggtctgtggtcccagaggcgtctgccaaagctgcaggaggccccacgccccaagtcccactgggactatctgctggaggagatgcagtggatggccacagactttgcccaggagaggaggtggaaggtggctgctgcgaagaagctcgttagaactgtggtgcgccatcacgaggagaagcagctccgtgaagaaagggggaagaaggaagagcagagcagactgaggcggatagccgcctccacggcccgggagatagagtgcttttggtcgaatattgaacaggttgtggaaataaaactacgagtagaattagaagaaaaaaggaagaaggccttaaatttacagaaagtttccaggagagggaaagaattgagacctaaaggatttgacgcattacaggaaagttctctggattcaggaatgtctggaagaaaaagaaaagctagcatatctttgactgatgacgaagtggacgatgaagaggaaacaattgaagaggaggaagcaaatgaaggcgttgtggaccaccaaacagaactttctaatttagccaaggaagctgagctgcccctcctggacctgatgaagctgtacgaaggcgccttcctgccgagttctcagtggccccggccgaagcctgatggggaggacacaagcggagaggaagatgcagatgactgtccaggcgacagggagagtcgcaaggacttggttctcatcgactcgcttttcatcatggatcagttcaaagctgccgagaggatgaatatcgggaagccaaacgccaaggacattgcggacgtcactgcggtggctgaagccatcctgccgaagggcagtgctcgggtcacaacctcggtcaagtttaatgctccatctttgttgtatggggctctcagagattatcagaagattggcctggactggctggccaaactttacaggaagaatctcaatggcatattggcagatgaagctgggctgggtaaaacagtgcagatcattgctttttttgcccacctagcttgtaacgaaggtaattggggcccccatcttgttgttgtgagaagttgtaacatactcaagtgggagcttgaattgaaacgttggtgtcccggactcaaaatcctctcatatattggcagccacagagaactcaaagcaaagagacaggagtgggccgaacccaacagcttccacgtctgcatcacgtcctacactcagttcttccggggcctcaccgccttcacacgagtgcgctggaagtgcctggtcattgatgagatgcagcgcgtgaagggcatgaccgagaggcactgggaagcggttttcaccctgcagagccaacaacgtctgcttctgatcgactcgccgctgcacaataccttcctggagctctggaccatggtgcacttcctggtcccagggatctccaggccctacctgagctcccctctgagggcccccagtgaagagagccaggattactaccataaagtggtcataaggttacacagggtgacacagccatttattttgaggagaactaagagagatgtggaaaagcaactaacaaagaaatatgagcatgttttgaagtgtcgcctttctaaccgacaaaaagccttatacgaggacgttatcctgcaacctggcactcaggaggccttgaagagcgggcactttgtcaacgtcctgagcatccttgtgcggctgcagcgcatctgcaaccaccctgggctcgtcgagccccggcacccaggctcttcctacgtggcggggccactggagtatccgtccgcatctctaatcctgaaggcactggagagagatttctggaaggaagcagatctttctatgtttgatctcatcggcttagaaaataaaatcactcgtcacgaggcagagttgctgtctaagaaaaagataccgcggaaactcatggaggaaatctccacttcagcagccccagcagcccgaccagcagcagcaaagctgaaggccagcaggttgtttcagcctgtgcagtatggccagaagcccgagggtcgcaccgtggctttccccagcactcacccgccccggacggcagcccccaccacggcctctgctgctccacagggcccgcttcgaggacggccgcccatcgccacgttctctgccaatccggaggcaaaagcagcagcagccccgtttcagacctctcaggcttccgccagtgctccacgacaccagcccgcctcggcctccagcacagccgctagcccggcccatcctgcgaaactgcgggcccagaccacagcacaggccttcaccccaggccagcccccgccccagccccaggccccctcgcacgcggccgggcagagcgcgctgcctcagaggctggtgctcccctcgcaggcccaggcccgcttgcccagtggagaggtagtgaaaatagctcagctggcatccatcacaggaccacagagccgcgtggctcagccagagacgccggtgacactgcagttccagggcagcaagttcaccctgtcacacagccagctccggcagctcacagcgggccagccgctgcagctgcaaggcagcgtcctccagatcgtgtccgcccccgggcagccctaccttcgagcccctggccctgtggtgatgcagaccgtgtctcaggcgggcgctgtgcacggcgccctgggaagcaagcccccggccggcggtcccagccctgcacccttgaccccacaagttggcgttccgggccgcgtggcggtgaatgccttggctgtaggagaacccggaacggcctccaaaccagcttctcccattggagggccgacccaggaggaaaagaccagactcttgaaagagcgcctggatcagatttatttagtcaacgagcggcgctgttctcaagctccagtctatggcagagacttgctaaggatttgtgccctgcctagccatggaagggtacagtggcgtgggtccctggatggccgtcgtgggaaggaggccgggccagcgcacagttacacttcatcctcagaaagtccaagtgagctgatgttgacgctttgtcggtgtggagagtctctgcaggatgttattgacagggtggcctttgtgattcctccggtggtggcagcacccccgtccctacgggtgccgcggccgccacccctgtacagccacagaatgaggatcttgaggcagggcctgagagagcacgctgcgccgtacttccagcagctgcggcagaccacggctccacgcctgctgcagttccctgagctgaggctggtgcagttcgactcagggaagttggaagctttagctatcttgcttcagaaattgaaatctgaaggacgtcgggtgctgattttatcacagatgattcttatgttggacattttagagatgttcttgaacttccattacctcacctatgtaagaatcgatgaaaatgccagcagtgagcaacggcaggaactgatgaggagtttcaacagagacaggcggattttttgtgccattctctccactcacagccgtaccacaggtataaaccttgtagaggcggacaccgtcgtgttttatgacaatgacctgaatccagtgatggatgccaaagctcaggagtggtgcgataggatcgggagatgcaaagacatccacatatacaggcttgtgagtggcaattccattgaagagaaattgttgaaaaatggaactaaagatctgatccgagaagtggctgctcagggaaatgactactccatggctttcttaactcagcgaaccatccaggagctgtttgaagtttattctcccatggatgatgctggcttcccggtcaaagctgaggagtttgtggtgctttctcaggaaccttctgtcacggaaaccattgcacccaaaattgcaagacctttcatagaggccctcaagagtattgagtatctggaggaggatgcccagaagtccgcacaggagggggtgctgggaccacacactgatgctctgtcatcagactctgagaacatgccgtgtgatgaagaaccatcccaattagaggagctagctgacttcatggagcagcttacaccaattgaaaaatatgctttaaattacctggaattattccatacttctattgagcaagaaaaggagagaaacagtgaggacgcagtgatgactgcagtgagggcatgggagttctggaacctgaagaccctgcaggagagggaggcccggctgcggctggagcaggaggaggcggagctcctgacctacacgcgagaggatgcctacagcatggagtatgtctacgaagatgtcgatgggcagacagaagtcatgccgctctggaccccacccaccccgccgcaggacgacagcgacatctacctcgactcggtcatgtgtctcatgtatgaagccactcccatcccagaggctaagctgccccctgtgtacgtgaggaaggagcggaagcgacacaaaacagacccctcagctgcaggcaggaagaagaagcagcgtcacggggaggcggtcgtccctcctcggtccctgtttgaccgcgcaacaccaggacttctgaaaattcgcagagagggcaaggagcagaagaagaatattctgctgaagcagcaggtgccattcgccaagcccctgccaacttttgccaaacccacagctgagcctggtcaagacaaccccgagtggctcatcagtgaggactgggcgctgctgcaggctgtaaagcagttactggagctgcctttgaacctcacaatcgtgtcacctgctcacacacctaattgggatcttgtcagtgacgttgttaactcctgtagccgaatctaccgctcttccaaacagtgccggaatcgctacgagaatgtcatcattccacgagaggaggggaagagtaaaaacaaccgtcctctccgtacgagccagatctatgcccaggatgagaatgccacacacacccagctgtacacgagccactttgacttaatgaaaatgactgctggcaagaggagtcccccaatcaaacctctgcttggcatgaatccctttcagaagaaccccaagcacgcgtctgtgttggcagaaagtggaatcaactatgacaagccgctgcctcccatccaggtggcatctctccgtgcagagcgaatcgcaaaagagaaaaaggctctggctgatcagcagaaggcacagcagccggccgtggcccagccacccccgccccagccgcagcccccaccacccccgcagcagccaccgccaccgctgccacaaccacaggcagcgggcagccagccgccagcagggccaccagctgtccagccccaaccccagccacagccccagacccagccacagcctgtgcaggccccagcgaaggcgcagcccgcaatcacgacggggggcagtgcagccgtactggcaggaaccattaaaacatcagttactgggacgagcatgcccactggtgccgtgagtggaaatgtgatcgtgaacaccatcgcaggggtcccagctgccaccttccagtccatcaacaagcgcctggcgtcgccagtggctcctggggccttgactacgccgggaggctctgctcccgcccaggtggtgcacacccagcccccgccacgggcagtcggctccccagccacggcgacccctgacctggtgtccatggcaacgactcagggtgttcgagcggtcacttctgtgacagcctcggccgtggtcactaccaacctgaccccagtgcagaccccggcacggtctttggtgccccaagtgtcccaagccacaggagttcagctccctggaaaaaccatcacacctgcacatttccagcttctcaggcagcagcagcagcagcagcagcaacagcagcagcagcagcagcagcagcagcagcagcagcagcagcagcaacagcagcagcagcaacagacgacgacgacctctcaggtgcaagttccacagatccagggccaggcccagtccccagcacagatcaaagctgtgggcaagctgacgccggaacacctcatcaaaatgcagaagcagaaactgcagatgcccccgcagcccccaccgccacaggcccagtctgcgcccccgcagccagcagcccaagtgcaagtgcagacctcgcagccgccgcagcagcagagcccccagctcacgacggtcacggccccaaggcctggtgccctgctgacgggcaccaccgtggccaacctccaggtggcccggctcacccgggttcccacttctcaactgcagtcgcaagggcagatgcagacccaggcaccccagccagcccaggtgcccttggcgaagcctccggtggtgtccgtcccggcagctgtggtctcctcaccgggagtcaccaccctgcccatgaacgtcgcggggatcagcgtggcgatcggtcagccacagaaggcagcaggacagaccgtggtggcccagcccgtgcacatgcagcagctgctgaagctgaagcagcaggccgtccagcagcagaaggccatccagccccaggctgcacagggcccggcagccgtccagcagaagatcaccgcacagcagatcaccacccctggcgcgcagcagaaggttgcctacgccgcgcagccggcccttaagacccagtttcttaccacacccatctcccaggcccagaaactggccggggcccagcaagtgcagacccagatccaggttgcaaaacttcctcaagttgttcaacagcaaacacccgtggccagcatccagcaagttgcctctgcttcccagcaggcttctccacagactgtggcgctcacgcaggcgacggcggccgggcagcaggtgcagatgatccctgcagtgaccgcgactgcccaggtggttcagcagaaactcattcagcagcaggtggtgaccacggcgtcggccccgctccagactccaggcgctcccaacccagcccaggtgcccgccagctccgacagcccaagccagcagcccaagttacagatgagggtccctgctgtcaggctaaagacacctactaagcctccgtgccagtagtcagggcagcagggctgcctctcatctaaagcaaaactaccttcctcacagaaaacgctttattagtgaaccttgggaccatgtcacgcaagagattcagcactgggaaagatataattgaaacaaaatagtgtaatcattttattaaaatgcatcccacactgcaggacaaatggtccttatggagtgccgcgttctctgtactacgtggctcatggaaaaagtgacaacatggcttcctctaaatcatttcacctttcagtccccacccgcacccgtcccctagagccatagtactgtgttctgaaagccatttagaatttctttgtgagcatgtagtgctttgcacgccacagaagccgtctgccgtgtgtgaggagcatacaatggactttctaaagataaggcgtgggcttccacagtgtctgccagagtttagttctttataccttactgaaaaatgcctcgtggtcttcgcagaggggaaggcctgtctaaagtcaatcatccgagatgggttttccattccaaagaaaggcaatatggttccttccttccctcctaaaatatgacttaacttttaagagaaatgttctgacacccacctaaacacacaaggcacgttcctggcctgtgttcaagggaaatgatcagtcattgcattgttattccaaagagcagccaacagtggcctcccccaggccctaccctgcaatgggattcgctttcatttaatggaaacttctgggactgatgcccaactcagtgcactcaagacgcatctccagttttcgggggaagctggtatttgacatagtgtgttaaacagctcctgagaacctttgggacactctgccatggctggcgtgaggcccagaggaccacgcagaggcaatggtagtacagatgtcacagctgagggtacgatgaggcctgggctcagtgagccaggacgaatgtgacagacaccccttgctgccacagtcagccctttgacgaaggtgggctggtgattctggaagtattggctatagcggtgggcccagtcaactcttccttgtggacttacgacagcagattttctctaggataagcttgtgtggttctgccagtgaagcagagaaccacctgtgctgttgtggaaggcgtgccgttgagggggaaaacgaagcccagtatttgctactgtttttcctttttttactatgacaggaaaataaatgcaattttagtggaattgattgacagtgtctccttactttgaagttttcaccaaagcaaaaaggtccatatccaatagtatcctttgtgctgtggcttgattttggcctattttacattatttggtccaggaaattaggttatattaggttttttgtatactaaaaatcagttatggcacaataaagattttctgtttttaaattgtatttcatctgcttcctccccattctctcactttaagtgacattgaggaaggtattctgtcccacaggtttctgtggacagcgatacagcaggagtcagtgaaatcaactggggagctcacttgagctcttgataagaaatgtggagaaaagtaaaaaccaagctttgaagaaacagaagaaattaatcttttagttagttgaacataccaaagcagaggactggaatctgtttgttctaaccaacccgttctccctggcttggcacgtgccgtgagagcgcagcttgccggagggagggccgctgtgtgcgcctcacatctggctcccagtggaaacttttactcctcctcatccgcagatgtgatagaactgaagtatctaggaattctgcctttgtcatttgttttaatttgtgtgccctgttcattttttttgtctttcccaaatcttggtagtctccttatagttgaagataaaatgttgagtgcacttattttagaatatcctagacataactgtctaagtaaaagcgctctattaatctaaaacactacaagagaatttaacaccatctctcaaatgcttttttggagagcttaatgggattctgaatatttgcaatgtggagtttccgccccgatctcacgtcagtgagggtctcctgtctctcaagtgtgtttcctttggctgttccctaatacaaaacacggacatatttttactcgtagcactcaatttagtaacttctagatgctaccgttgacctgagttaaattcatttagtcgtgtacgtaaaaactctccttttagtgtgttattttcttggccttcccttttaaaggttaaagtttctaacctaagaattaagtacgcgttcaggaagctgttgtctaggccttccccttgtgaatctgggttcattccaatacggcaagtaagagttggaaactttgagaacacagactataaaggcagcagcccgaacactgtcagactctaattggcgaccctgggaaacagttgccctgctattctttaaagaaagacgtttattctgatgataaaaacagttagccagactgtttttaaagcacctggcgggaagcagaaggttggatccaagcccttgttcagatttggtgcctgataagacaggggtttctctttttgtgacctttattattattattttgttaactgttgtaaccagttagctgttgtgttttaagatagaaaggaacaagactaaaattgtaaatactttgtaaacatcagcatttgtacttgaatagtaggattttaaagggcattgatagcataccaaacaaaaggcaaaataaagtgacctttttataaaaaaaaaaagaaaaagtcgac

SEQ ID NO: 547893 - DNA, 10723 bp, Homo sapiens
agcggggcggcggcgcggcttccatcctcccgccctcctgacgcggccggagcgcagccctgaggcccagggagaacgacacattggatacagaagggaggtgatcatgcaccatggcactggcccccagaacgtccagcatcagctgcagaggtccagggcctgccctggcagcgagggtgaggagcagccggcccaccccaacccacccccgtcccccgcagctcccttcgctccctcagcaagcccgtcggcaccccagtctcccagttatcaaatacagcagctgatgaataggagccctgcaaccgggcagaacgtgaacatcaccctgcagagcgtgggccctgtcgtcgggggaaaccagcagatcacactggccccactgccgctccccagccccacctctccaggcttccagttcagcgctcagcctcggcggtttgagcatgggtctccatcatacattcaggtcacgtcccccttgtcccagcaggtccagacccagagtcccacgcagcccagtccggggccggggcaggccttgcagaatgtgcgtgcaggtgcccctggccctgggctgggcctctgcagcagcagccctacaggggacttcgtggatgccagcgtgctggtgaggcagatcagcttgagcccctccagtggtggacactttgtgtttcaggatgggtcagggctcacccagatcgcccagggagcccaggttcagctccagcacccgggtacgcccatcacagtccgagagcggagaccctcccagccccacacacagtcagggggcaccatccaccacctgggaccccagagccctgcagccgcgggtggggccggcctgcagcccctggccagcccaagccacatcaccacggctaacttgccaccgcagatcagcagcatcatccagggccagctggttcagcagcagcaggtgctgcaggggccgccgctgccccggcccctgggcttcgagaggacgcccggcgtgctgctccccggggctgggggcgcagcggggtttgggatgacgtccccacccccgcccaccagcccttccaggactgccgtgcccccaggcctttccagcctcccactcacgtctgtggggaacacgggaatgaagaaggttcccaagaagttagaggagattcccccagcctctccggagatggcacagatgaggaagcagtgcctggactatcattaccaggagatgcaggctctgaaggaggtcttcaaggagtatttgattgaactgtttttcttgcaacactttcaagggaacatgatggatttcttagctttcaaggagagactgtatggaccattacaagcatatcttaggcagaatgatttggacattgaagaagaggaggaggaggaggaagaggaggaagaaaaatctgaggttatcaatgacgagcagcaagccctcgcagggagcctggtagcaggggccggaagcacagtagagacggacctgtttaagaggcagcaggcgatgccctccacaggtatggcagagcagtctaagaggcctcgccttgaagtgggtcaccaaggggtagttttccagcacccaggggcggacgcaggcgttcctctccagcaactaatgccgaccgcacaaggaggaatgccccccacgccgcaggccgcgcagctcgctggacagaggcagagtcagcagcagtatgacccctccacggggcctcccgtgcagaacgctgccagcttgcacaccccactgccgcagctgcccgggaggctgcccccagccggtgttcccactgcagccctctcctctgcgctgcagtttgcacagcagccgcaagtggtagaggcccagacacagctccaaatcccggtgaagactcagcagcccaatgttcccatccctgcaccgcccagcagccaactccccatccctccctcgcagcctgcacagctggccctccacgttcccacacctggaaaggtgcaggtgcaggcctctcagctttcctccctgccacagatggtagcatcgacaaggctccctgtggaccctgccccgccctgcccacggcctctgcccacctcttctacctcgtccctcgcgcctgtgagtggctccggcccaggaccctcccctgctcgatcctctccagtaaatagaccttcctcagccaccaataaggcactatctccagtcacttcccggaccccaggggtggtggcatctgcccccaccaaaccacagagtcctgctcagaatgccacctcgtcccaagacagttctcaggatacgctgacagaacaaataactctggagaaccaggtgcatcagcgcattgcggagctgaggaaagcaggtctgtggtcccagaggcgtctgccaaagctgcaggaggccccacgccccaagtcccactgggactatctgctggaggagatgcagtggatggccacagactttgcccaggagaggaggtggaaggtggctgctgcgaagaagctcgttagaactgtggtgcgccatcacgaggagaagcagctccgtgaagaaagggggaagaaggaagagcagagcagactgaggcggatagccgcctccacggcccgggagatagagtgcttttggtcgaatattgaacaggttgtggaaataaaactacgagtagaattagaagaaaaaaggaagaaggccttaaatttacagaaagtttccaggagagggaaagaattgagacctaaaggatttgacgcattacaggaaagttctctggattcaggaatgtctggaagaaaaagaaaagctagcatatctttgactgatgacgaagtggacgatgaagaggaaacaattgaagaggaggaagcaaatgaaggcgttgtggaccaccaaacagaactttctaatttagccaaggaagctgagctgcccctcctggacctgatgaagctgtacgaaggcgccttcctgccgagttctcagtggccccggccgaagcctgatggggaggacacaagcggagaggaagatgcagatgactgtccaggcgacagggagagtcgcaaggacttggttctcatcgactcgcttttcatcatggatcagttcaaagctgccgagaggatgaatatcgggaagccaaacgccaaggacattgcggacgtcactgcggtggctgaagccatcctgccgaagggcagtgctcgggtcacaacctcggtcaagtttaatgctccatctttgttgtatggggctctcagagattatcagaagattggcctggactggctggccaaactttacaggaagaatctcaatggcatattggcagatgaagctgggctgggtaaaacagtgcagatcattgctttttttgcccacctagcttgtaacgaaggtaattggggcccccatcttgttgttgtgagaagttgtaacatactcaagtgggagcttgaattgaaacgttggtgtcccggactcaaaatcctctcatatattggcagccacagagaactcaaagcaaagagacaggagtgggccgaacccaacagcttccacgtctgcatcacgtcctacactcagttcttccggggcctcaccgccttcacacgagtgcgctggaagtgcctggtcattgatgagatgcagcgcgtgaagggcatgaccgagaggcactgggaagcggttttcaccctgcagagccaacaacgtctgcttctgatcgactcgccgctgcacaataccttcctggagctctggaccatggtgcacttcctggtcccagggatctccaggccctacctgagctcccctctgagggcccccagtgaagagagccaggattactaccataaagtggtcataaggttacacagggtgacacagccatttattttgaggagaactaagagagatgtggaaaagcaactaacaaagaaatatgagcatgttttgaagtgtcgcctttctaaccgacaaaaagccttatacgaggacgttatcctgcaacctggcactcaggaggccttgaagagcgggcactttgtcaacgtcctgagcatccttgtgcggctgcagcgcatctgcaaccaccctgggctcgtcgagccccggcacccaggctcttcctacgtggcggggccactggagtatccgtccgcatctctaatcctgaaggcactggagagagatttctggaaggaagcagatctttctatgtttgatctcatcggcttagaaaataaaatcactcgtcacgaggcagagttgctgtctaagaaaaagataccgcggaaactcatggaggaaatctccacttcagcagccccagcagcccgaccagcagcagcaaagctgaaggccagcaggttgtttcagcctgtgcagtatggccagaagcccgagggtcgcaccgtggctttccccagcactcacccgccccggacggcagcccccaccacggcctctgctgctccacagggcccgcttcgaggacggccgcccatcgccacgttctctgccaatccggaggcaaaagcagcagcagccccgtttcagacctctcaggcttccgccagtgctccacgacaccagcccgcctcggcctccagcacagccgctagcccggcccatcctgcgaaactgcgggcccagaccacagcacaggccttcaccccaggccagcccccgccccagccccaggccccctcgcacgcggccgggcagagcgcgctgcctcagaggctggtgctcccctcgcaggcccaggcccgcttgcccagtggagaggtagtgaaaatagctcagctggcatccatcacaggaccacagagccgcgtggctcagccagagacgccggtgacactgcagttccagggcagcaagttcaccctgtcacacagccagctccggcagctcacagcgggccagccgctgcagctgcaaggcagcgtcctccagatcgtgtccgcccccgggcagccctaccttcgagcccctggccctgtggtgatgcagaccgtgtctcaggcgggcgctgtgcacggcgccctgggaagcaagcccccggccggcggtcccagccctgcacccttgaccccacaagttggcgttccgggccgcgtggcggtgaatgccttggctgtaggagaacccggaacggcctccaaaccagcttctcccattggagggccgacccaggaggaaaagaccagactcttgaaagagcgcctggatcagatttatttagtcaacgagcggcgctgttctcaagctccagtctatggcagagacttgctaaggatttgtgccctgcctagccatggaagggtacagtggcgtgggtccctggatggccgtcgtgggaaggaggccgggccagcgcacagttacacttcatcctcagaaagtccaagtgagctgatgttgacgctttgtcggtgtggagagtctctgcaggatgttattgacagggtggcctttgtgattcctccggtggtggcagcacccccgtccctacgggtgccgcggccgccacccctgtacagccacagaatgaggatcttgaggcagggcctgagagagcacgctgcgccgtacttccagcagctgcggcagaccacggctccacgcctgctgcagttccctgagctgaggctggtgcagttcgactcagggaagttggaagctttagctatcttgcttcagaaattgaaatctgaaggacgtcgggtgctgattttatcacagatgattcttatgttggacattttagagatgttcttgaacttccattacctcacctatgtaagaatcgatgaaaatgccagcagtgagcaacggcaggaactgatgaggagtttcaacagagacaggcggattttttgtgccattctctccactcacagccgtaccacaggtataaaccttgtagaggcggacaccgtcgtgttttatgacaatgacctgaatccagtgatggatgccaaagctcaggagtggtgcgataggatcgggagatgcaaagacatccacatatacaggcttgtgagtggcaattccattgaagagaaattgttgaaaaatggaactaaagatctgatccgagaagtggctgctcagggaaatgactactccatggctttcttaactcagcgaaccatccaggagctgtttgaagtttattctcccatggatgatgctggcttcccggtcaaagctgaggagtttgtggtgctttctcaggaaccttctgtcacggaaaccattgcacccaaaattgcaagacctttcatagaggccctcaagagtattgagtatctggaggaggatgcccagaagtccgcacaggagggggtgctgggaccacacactgatgctctgtcatcagactctgagaacatgccgtgtgatgaagaaccatcccaattagaggagctagctgacttcatggagcagcttacaccaattgaaaaatatgctttaaattacctggaattattccatacttctattgagcaagaaaaggagagaaacagtgaggacgcagtgatgactgcagtgagggcatgggagttctggaacctgaagaccctgcaggagagggaggcccggctgcggctggagcaggaggaggcggagctcctgacctacacgcgagaggatgcctacagcatggagtatgtctacgaagatgtcgatgggcagacagaagtcatgccgctctggaccccacccaccccgccgcaggacgacagcgacatctacctcgactcggtcatgtgtctcatgtatgaagccactcccatcccagaggctaagctgccccctgtgtacgtgaggaaggagcggaagcgacacaaaacagacccctcagctgcaggcaggaagaagaagcagcgtcacggggaggcggtcgtccctcctcggtccctgtttgaccgcgcaacaccaggacttctgaaaattcgcagagagggcaaggagcagaagaagaatattctgctgaagcagcaggtgccattcgccaagcccctgccaacttttgccaaacccacagctgagcctggtcaagacaaccccgagtggctcatcagtgaggactgggcgctgctgcaggctgtaaagcagttactggagctgcctttgaacctcacaatcgtgtcacctgctcacacacctaattgggatcttgtcagtgacgttgttaactcctgtagccgaatctaccgctcttccaaacagtgccggaatcgctacgagaatgtcatcattccacgagaggaggggaagagtaaaaacaaccgtcctctccgtacgagccagatctatgcccaggatgagaatgccacacacacccagctgtacacgagccactttgacttaatgaaaatgactgctggcaagaggagtcccccaatcaaacctctgcttggcatgaatccctttcagaagaaccccaagcacgcgtctgtgttggcagaaagtggaatcaactatgacaagccgctgcctcccatccaggtggcatctctccgtgcagagcgaatcgcaaaagagaaaaaggctctggctgatcagcagaaggcacagcagccggccgtggcccagccacccccgccccagccgcagcccccaccacccccgcagcagccaccgccaccgctgccacaaccacaggcagcgggcagccagccgccagcagggccaccagctgtccagccccaaccccagccacagccccagacccagccacagcctgtgcaggccccagcgaaggcgcagcccgcaatcacgacggggggcagtgcagccgtactggcaggaaccattaaaacatcagttactgggacgagcatgcccactggtgccgtgagtggaaatgtgatcgtgaacaccatcgcaggggtcccagctgccaccttccagtccatcaacaagcgcctggcgtcgccagtggctcctggggccttgactacgccgggaggctctgctcccgcccaggtggtgcacacccagcccccgccacgggcagtcggctccccagccacggcgacccctgacctggtgtccatggcaacgactcagggtgttcgagcggtcacttctgtgacagcctcggccgtggtcactaccaacctgaccccagtgcagaccccggcacggtctttggtgccccaagtgtcccaagccacaggagttcagctccctggaaaaaccatcacacctgcacatttccagcttctcaggcagcagcagcagcagcagcagcaacagcagcagcagcagcagcagcagcagcagcagcagcagcagcagcaacagcagcagcagcaacagacgacgacgacctctcaggtgcaagttccacagatccagggccaggcccagtccccagcacagatcaaagctgtgggcaagctgacgccggaacacctcatcaaaatgcagaagcagaaactgcagatgcccccgcagcccccaccgccacaggcccagtctgcgcccccgcagccagcagcccaagtgcaagtgcagacctcgcagccgccgcagcagcagagcccccagctcacgacggtcacggccccaaggcctggtgccctgctgacgggcaccaccgtggccaacctccaggtggcccggctcacccgggttcccacttctcaactgcagtcgcaagggcagatgcagacccaggcaccccagccagcccaggtgcccttggcgaagcctccggtggtgtccgtcccggcagctgtggtctcctcaccgggagtcaccaccctgcccatgaacgtcgcggggatcagcgtggcgatcggtcagccacagaaggcagcaggacagaccgtggtggcccagcccgtgcacatgcagcagctgctgaagctgaagcagcaggccgtccagcagcagaaggccatccagccccaggctgcacagggcccggcagccgtccagcagaagatcaccgcacagcagatcaccacccctggcgcgcagcagaaggttgcctacgccgcgcagccggcccttaagacccagtttcttaccacacccatctcccaggcccagaaactggccggggcccagcaagtgcagacccagatccaggttgcaaaacttcctcaagttgttcaacagcaaacacccgtggccagcatccagcaagttgcctctgcttcccagcaggcttctccacagactgtggcgctcacgcaggcgacggcggccgggcagcaggtgcagatgatccctgcagtgaccgcgactgcccaggtggttcagcagaaactcattcagcagcaggtggtgaccacggcgtcggccccgctccagactccaggcgctcccaacccagcccaggtgcccgccagctccgacagcccaagccagcagcccaagttacagatgagggtccctgctgtcaggctaaagacacctactaagcctccgtgccagtagtcagggcagcagggctgcctctcatctaaagcaaaactaccttcctcacagaaaacgctttattagtgaaccttgggaccatgtcacgcaagagattcagcactgggaaagatataattgaaacaaaatagtgtaatcattttattaaaatgcatcccacactgcaggacaaatggtccttatggagtgccgcgttctctgtactacgtggctcatggaaaaagtgacaacatggcttcctctaaatcatttcacctttcagtccccacccgcacccgtcccctagagccatagtactgtgttctgaaagccatttagaatttctttgtgagcatgtagtgctttgcacgccacagaagccgtctgccgtgtgtgaggagcatacaatggactttctaaagataaggcgtgggcttccacagtgtctgccagagtttagttctttataccttactgaaaaatgcctcgtggtcttcgcagaggggaaggcctgtctaaagtcaatcatccgagatgggttttccattccaaagaaaggcaatatggttccttccttccctcctaaaatatgacttaacttttaagagaaatgttctgacacccacctaaacacacaaggcacgttcctggcctgtgttcaagggaaatgatcagtcattgcattgttattccaaagagcagccaacagtggcctcccccaggccctaccctgcaatgggattcgctttcatttaatggaaacttctgggactgatgcccaactcagtgcactcaagacgcatctccagttttcgggggaagctggtatttgacatagtgtgttaaacagctcctgagaacctttgggacactctgccatggctggcgtgaggcccagaggaccacgcagaggcaatggtagtacagatgtcacagctgagggtacgatgaggcctgggctcagtgagccaggacgaatgtgacagacaccccttgctgccacagtcagccctttgacgaaggtgggctggtgattctggaagtattggctatagcggtgggcccagtcaactcttccttgtggacttacgacagcagattttctctaggataagcttgtgtggttctgccagtgaagcagagaaccacctgtgctgttgtggaaggcgtgccgttgagggggaaaacgaagcccagtatttgctactgtttttcctttttttactatgacaggaaaataaatgcaattttagtggaattgat

SEQ ID NO: 547894 - DNA, 311 bp, Homo sapiens
tatagatggaacgcgcaccccagagatacagctgatatcgggagggttgtttccaccatggaggaatggcacgtgctacaactcaggactttcttgctgtgccatagccagttgctgataacatttaccagcacactcaccgaacttaaggagtggctccttccagtcttatcatccacatcttgcttcttcctgggggacaatgtttgccagaaatgggagagagagggccagaaagtatgttacaccaacagcacgcccccgaaaatggactggaggttcttcatggaaacaaagaatggagatagagg

SEQ ID NO: 547895 - DNA, 12301 bp, Homo sapiens
ctggctccgcgtcggccggtcggtttggtcggttgtagtggcctcgccgcccggtccgctgtcgcagcgctcatccgcgccgggagcccttggctgcgtcgcccggcagccgcctggagtgtagtggcgcaatcttggatcaccacaacctccgtctcccaggttcaagcgattctcccgcctcagcctcctgagtagcaattacaattacaggccgagtctcactctgtcgcccaggatggagtgcagtggcgcaatgtcggcttactgcaacctctgcctcccaggttcaagcgattctcctgcctcagcctccagagtacctgggattacagggagcatttcctgaagacgtagtcatgcagcacgtcagcagctcccagagcagccagcgccatgtccagtggcctggggcctgccccggcgcgggcgaggagcagccagcgtgctcccagccgtccctgcccctcacactgccatcccccagccaccaactacagcagctgatggtccagacccagagtcccacgcagcccagtccggggccggggcaggccttgcagaatgtgcgtgcaggtgcccctggccctgggctgggcctctgcagcagcagccctacaggggacttcgtggatgccagcgtgctggtgaggcagatcagcttgagcccctccagtggtggacactttgtgtttcaggatgggtcagggctcacccagatcgcccagggagcccaggttcagctccagcacccgggtacgcccatcacagtccgagagcggagaccctcccagccccacacacagtcagggggcaccatccaccacctgggaccccagagccctgcagccgcgggtggggccggcctgcagcccctggccagcccaagccacatcaccacggctaacttgccaccgcagatcagcagcatcatccagggccagctggttcagcagcagcaggtgctgcaggggccgccgctgccccggcccctgggcttcgagaggacgcccggcgtgctgctccccggggctgggggcgcagcggggtttgggatgacgtccccacccccgcccaccagcccttccaggactgccgtgcccccaggcctttccagcctcccactcacgtctgtggggaacacgggaatgaagaaggttcccaagaagttagaggagattcccccagcctctccggagatggcacagatgaggaagcagtgcctggactatcattaccaggagatgcaggctctgaaggaggtcttcaaggagtatttgattgaactgtttttcttgcaacactttcaagggaacatgatggatttcttagctttcaaggagagactgtatggaccattacaagcatatcttaggcagaatgatttggacattgaagaagaggaggaggaggaggaagaggaggaagaaaaatctgaggttatcaatgacgaggtaaaggttgtgacaggaaaggatgggcagactgggactcccgttgctatagcaacccagcttccgccaaaggtttctgctgctttttcatcccagcagcaaccatttcagcaagccctcgcagggagcctggtagcaggggccggaagcacagtagagacggacctgtttaagaggcagcaggcgatgccctccacaggtatggcaggaggaatgccccccacgccgcaggccgcgcagctcgctggacagaggcagagtcagcagcagtatgacccctccacggggcctcccgtgcagaacgctgccagcttgcacaccccactgccgcagctgcccgggaggctgcccccagccggtgttcccactgcagccctctcctctgcgctgcagtttgcacagcagccgcaagtggtagaggcccagacacagctccaaatcccggtgaagactcagcagcccaatgttcccatccctgcaccgcccagcagccaactccccatccctccctcgcagcctgcacagctggccctccacgttcccacacctggaaaggtgcaggtgcaggcctctcagctttcctccctgccacagatggtagcatcgacaaggctccctgtggaccctgccccgccctgcccacggcctctgcccacctcttctacctcgtccctcgcgcctgtgagtggctccggcccaggaccctcccctgctcgatcctctccagtaaatagaccttcctcagccaccaataaggcactatctccagtcacttcccggaccccaggggtggtggcatctgcccccaccaaaccacagagtcctgctcagaatgccacctcgtcccaagacagttctcaggatacgctgacagaacaaataactctggagaaccaggtgcatcagcgcattgcggagctgaggaaagcaggtctgtggtcccagaggcgtctgccaaagctgcaggaggccccacgccccaagtcccactgggactatctgctggaggagatgcagtggatggccacagactttgcccaggagaggaggtggaaggtggctgctgcgaagaagctcgttagaactgtggtgcgccatcacgaggagaagcagctccgtgaagaaagggggaagaaggaagagcagagcagactgaggcggatagccgcctccacggcccgggagatagagtgcttttggtcgaatattgaacaggttgtggaaataaaactacgagtagaattagaagaaaaaaggaagaaggccttaaatttacagaaagtttccaggagagggaaagaattgagacctaaaggatttgacgcattacaggaaagttctctggattcaggaatgtctggaagaaaaagaaaagctagcatatctttgactgatgacgaagtggacgatgaagaggaaacaattgaagaggaggaagcaaatgaaggcgttgtggaccaccaaacagaactttctaatttagccaaggaagctgagctgcccctcctggacctgatgaagctgtacgaaggcgccttcctgccgagttctcagtggccccggccgaagcctgatggggaggacacaagcggagaggaagatgcagatgactgtccaggcgacagggagagtcgcaaggacttggttctcatcgactcgcttttcatcatggatcagttcaaagctgccgagaggatgaatatcgggaagccaaacgccaaggacattgcggacgtcactgcggtggctgaagccatcctgccgaagggcagtgctcgggtcacaacctcggtcaagtttaatgctccatctttgttgtatggggctctcagagattatcagaagattggcctggactggctggccaaactttacaggaagaatctcaatggcatattggcagatgaagctgggctgggtaaaacagtgcagatcattgctttttttgcccacctagcttgtaacgaaggtaattggggcccccatcttgttgttgtgagaagttgtaacatactcaagtgggagcttgaattgaaacgttggtgtcccggactcaaaatcctctcatatattggcagccacagagaactcaaagcaaagagacaggagtgggccgaacccaacagcttccacgtctgcatcacgtcctacactcagttcttccggggcctcaccgccttcacacgagtgcgctggaagtgcctggtcattgatgagatgcagcgcgtgaagggcatgaccgagaggcactgggaagcggttttcaccctgcagagccaacaacgtctgcttctgatcgactcgccgctgcacaataccttcctggagctctggaccatggtgcacttcctggtcccagggatctccaggccctacctgagctcccctctgagggcccccagtgaagagagccaggattactaccataaagtggtcataaggttacacagggtgacacagccatttattttgaggagaactaagagagatgtggaaaagcaactaacaaagaaatatgagcatgttttgaagtgtcgcctttctaaccgacaaaaagccttatacgaggacgttatcctgcaacctggcactcaggaggccttgaagagcgggcactttgtcaacgtcctgagcatccttgtgcggctgcagcgcatctgcaaccaccctgggctcgtcgagccccggcacccaggctcttcctacgtggcggggccactggagtatccgtccgcatctctaatcctgaaggcactggagagagatttctggaaggaagcagatctttctatgtttgatctcatcggcttagaaaataaaatcactcgtcacgaggcagagttgctgtctaagaaaaagataccgcggaaactcatggaggaaatctccacttcagcagccccagcagcccgaccagcagcagcaaagctgaaggccagcaggttgtttcagcctgtgcagtatggccagaagcccgagggtcgcaccgtggctttccccagcactcacccgccccggacggcagcccccaccacggcctctgctgctccacagggcccgcttcgaggacggccgcccatcgccacgttctctgccaatccggaggcaaaagcagcagcagccccgtttcagacctctcaggcttccgccagtgctccacgacaccagcccgcctcggcctccagcacagccgctagcccggcccatcctgcgaaactgcgggcccagaccacagcacaggccttcaccccaggccagcccccgccccagccccaggccccctcgcacgcggccgggcagagcgcgctgcctcagaggctggtgctcccctcgcaggcccaggcccgcttgcccagtggagaggtagtgaaaatagctcagctggcatccatcacaggaccacagagccgcgtggctcagccagagacgccggtgacactgcagttccagggcagcaagttcaccctgtcacacagccagctccggcagctcacagcgggccagccgctgcagctgcaaggcagcgtcctccagatcgtgtccgcccccgggcagccctaccttcgagcccctggccctgtggtgatgcagaccgtgtctcaggcgggcgctgtgcacggcgccctgggaagcaagcccccggccggcggtcccagccctgcacccttgaccccacaagttggcgttccgggccgcgtggcggtgaatgccttggctgtaggagaacccggaacggcctccaaaccagcttctcccattggagggccgacccaggaggaaaagaccagactcttgaaagagcgcctggatcagatttatttagtcaacgagcggcgctgttctcaagctccagtctatggcagagacttgctaaggatttgtgccctgcctagccatggaagggtacagtggcgtgggtccctggatggccgtcgtgggaaggaggccgggccagcgcacagttacacttcatcctcagaaagtccaagtgagctgatgttgacgctttgtcggtgtggagagtctctgcaggatgttattgacagggtggcctttgtgattcctccggtggtggcagcacccccgtccctacgggtgccgcggccgccacccctgtacagccacagaatgaggatcttgaggcagggcctgagagagcacgctgcgccgtacttccagcagctgcggcagaccacggctccacgcctgctgcagttccctgagctgaggctggtgcagttcgactcagggaagttggaagctttagctatcttgcttcagaaattgaaatctgaaggacgtcgggtgctgattttatcacagatgattcttatgttggacattttagagatgttcttgaacttccattacctcacctatgtaagaatcgatgaaaatgccagcagtgagcaacggcaggaactgatgaggagtttcaacagagacaggcggattttttgtgccattctctccactcacagccgtaccacaggtataaaccttgtagaggcggacaccgtcgtgttttatgacaatgacctgaatccagtgatggatgccaaagctcaggagtggtgcgataggatcgggagatgcaaagacatccacatatacaggcttgtgagtggcaattccattgaagagaaattgttgaaaaatggaactaaagatctgatccgagaagtggctgctcagggaaatgactactccatggctttcttaactcagcgaaccatccaggagctgtttgaagtttattctcccatggatgatgctggcttcccggtcaaagctgaggagtttgtggtgctttctcaggaaccttctgtcacggaaaccattgcacccaaaattgcaagacctttcatagaggccctcaagagtattgagtatctggaggaggatgcccagaagtccgcacaggagggggtgctgggaccacacactgatgctctgtcatcagactctgagaacatgccgtgtgatgaagaaccatcccaattagaggagctagctgacttcatggagcagcttacaccaattgaaaaatatgctttaaattacctggaattattccatacttctattgagcaagaaaaggagagaaacagtgaggacgcagtgatgactgcagtgagggcatgggagttctggaacctgaagaccctgcaggagagggaggcccggctgcggctggagcaggaggaggcggagctcctgacctacacgcgagaggatgcctacagcatggagtatgtctacgaagatgtcgatgggcagacagaagtcatgccgctctggaccccacccaccccgccgcaggacgacagcgacatctacctcgactcggtcatgtgtctcatgtatgaagccactcccatcccagaggctaagctgccccctgtgtacgtgaggaaggagcggaagcgacacaaaacagacccctcagctgcaggcaggaagaagaagcagcgtcacggggaggcggtcgtccctcctcggtccctgtttgaccgcgcaacaccaggacttctgaaaattcgcagagagggcaaggagcagaagaagaatattctgctgaagcagcaggtgccattcgccaagcccctgccaacttttgccaaacccacagctgagcctggtcaagacaaccccgagtggctcatcagtgaggactgggcgctgctgcaggctgtaaagcagttactggagctgcctttgaacctcacaatcgtgtcacctgctcacacacctaattgggatcttgtcagtgacgttgttaactcctgtagccgaatctaccgctcttccaaacagtgccggaatcgctacgagaatgtcatcattccacgagaggaggggaagagtaaaaacaaccgtcctctccgtacgagccagatctatgcccaggatgagaatgccacacacacccagctgtacacgagccactttgacttaatgaaaatgactgctggcaagaggagtcccccaatcaaacctctgcttggcatgaatccctttcagaagaaccccaagcacgcgtctgtgttggcagaaagtggaatcaactatgacaagccgctgcctcccatccaggtggcatctctccgtgcagagcgaatcgcaaaagagaaaaaggctctggctgatcagcagaaggcacagcagccggccgtggcccagccacccccgccccagccgcagcccccaccacccccgcagcagccaccgccaccgctgccacaaccacaggcagcgggcagccagccgccagcagggccaccagctgtccagccccaaccccagccacagccccagacccagccacagcctgtgcaggccccagcgaaggcgcagcccgcaatcacgacggggggcagtgcagccgtactggcaggaaccattaaaacatcagttactgggacgagcatgcccactggtgccgtgagtggaaatgtgatcgtgaacaccatcgcaggggtcccagctgccaccttccagtccatcaacaagcgcctggcgtcgccagtggctcctggggccttgactacgccgggaggctctgctcccgcccaggtggtgcacacccagcccccgccacgggcagtcggctccccagccacggcgacccctgacctggtgtccatggcaacgactcagggtgttcgagcggtcacttctgtgacagcctcggccgtggtcactaccaacctgaccccagtgcagaccccggcacggtctttggtgccccaagtgtcccaagccacaggagttcagctccctggaaaaaccatcacacctgcacatttccagcttctcaggcagcagcagcagcagcagcagcaacagcagcagcagcagcagcagcagcagcagcagcagcagcagcagcaacagcagcagcagcaacagacgacgacgacctctcaggtgcaagttccacagatccagggccaggcccagtccccagcacagatcaaagctgtgggcaagctgacgccggaacacctcatcaaaatgcagaagcagaaactgcagatgcccccgcagcccccaccgccacaggcccagtctgcgcccccgcagccagcagcccaagtgcaagtgcagacctcgcagccgccgcagcagcagagcccccagctcacgacggtcacggccccaaggcctggtgccctgctgacgggcaccaccgtggccaacctccaggtggcccggctcacccgggttcccacttctcaactgcagtcgcaagggcagatgcagacccaggcaccccagccagcccaggtgcccttggcgaagcctccggtggtgtccgtcccggcagctgtggtctcctcaccgggagtcaccaccctgcccatgaacgtcgcggggatcagcgtggcgatcggtcagccacagaaggcagcaggacagaccgtggtggcccagcccgtgcacatgcagcagctgctgaagctgaagcagcaggccgtccagcagcagaaggccatccagccccaggctgcacagggcccggcagccgtccagcagaagatcaccgcacagcagatcaccacccctggcgcgcagcagaaggttgcctacgccgcgcagccggcccttaagacccagtttcttaccacacccatctcccaggcccagaaactggccggggcccagcaagtgcagacccagatccaggttgcaaaacttcctcaagttgttcaacagcaaacacccgtggccagcatccagcaagttgcctctgcttcccagcaggcttctccacagactgtggcgctcacgcaggcgacggcggccgggcagcaggtgcagatgatccctgcagtgaccgcgactgcccaggtggttcagcagaaactcattcagcagcaggtggtgaccacggcgtcggccccgctccagactccaggcgctcccaacccagcccaggtgcccgccagctccgacagcccaagccagcagcccaagttacagatgagggtccctgctgtcaggctaaagacacctactaagcctccgtgccagtagtcagggcagcagggctgcctctcatctaaagcaaaactaccttcctcacagaaaacgctttattagtgaaccttgggaccatgtcacgcaagagattcagcactgggaaagatataattgaaacaaaatagtgtaatcattttattaaaatgcatcccacactgcaggacaaatggtccttatggagtgccgcgttctctgtactacgtggctcatggaaaaagtgacaacatggcttcctctaaatcatttcacctttcagtccccacccgcacccgtcccctagagccatagtactgtgttctgaaagccatttagaatttctttgtgagcatgtagtgctttgcacgccacagaagccgtctgccgtgtgtgaggagcatacaatggactttctaaagataaggcgtgggcttccacagtgtctgccagagtttagttctttataccttactgaaaaatgcctcgtggtcttcgcagaggggaaggcctgtctaaagtcaatcatccgagatgggttttccattccaaagaaaggcaatatggttccttccttccctcctaaaatatgacttaacttttaagagaaatgttctgacacccacctaaacacacaaggcacgttcctggcctgtgttcaagggaaatgatcagtcattgcattgttattccaaagagcagccaacagtggcctcccccaggccctaccctgcaatgggattcgctttcatttaatggaaacttctgggactgatgcccaactcagtgcactcaagacgcatctccagttttcgggggaagctggtatttgacatagtgtgttaaacagctcctgagaacctttgggacactctgccatggctggcgtgaggcccagaggaccacgcagaggcaatggtagtacagatgtcacagctgagggtacgatgaggcctgggctcagtgagccaggacgaatgtgacagacaccccttgctgccacagtcagccctttgacgaaggtgggctggtgattctggaagtattggctatagcggtgggcccagtcaactcttccttgtggacttacgacagcagattttctctaggataagcttgtgtggttctgccagtgaagcagagaaccacctgtgctgttgtggaaggcgtgccgttgagggggaaaacgaagcccagtatttgctactgtttttcctttttttactatgacaggaaaataaatgcaattttagtggaattgattgacagtgtctccttactttgaagttttcaccaaagcaaaaaggtccatatccaatagtatcctttgtgctgtggcttgattttggcctattttacattatttggtccaggaaattaggttatattaggttttttgtatactaaaaatcagttatggcacaataaagattttctgtttttaaattgtatttcatctgcttcctccccattctctcactttaagtgacattgaggaaggtattctgtcccacaggtttctgtggacagcgatacagcaggagtcagtgaaatcaactggggagctcacttgagctcttgataagaaatgtggagaaaagtaaaaaccaagctttgaagaaacagaagaaattaatcttttagttagttgaacataccaaagcagaggactggaatctgtttgttctaaccaacccgttctccctggcttggcacgtgccgtgagagcgcagcttgccggagggagggccgctgtgtgcgcctcacatctggctcccagtggaaacttttactcctcctcatccgcagatgtgatagaactgaagtatctaggaattctgcctttgtcatttgttttaatttgtgtgccctgttcattttttttgtctttcccaaatcttggtagtctccttatagttgaagataaaatgttgagtgcacttattttagaatatcctagacataactgtctaagtaaaagcgctctattaatctaaaacactacaagagaatttaacaccatctctcaaatgcttttttggagagcttaatgggattctgaatatttgcaatgtggagtttccgccccgatctcacgtcagtgagggtctcctgtctctcaagtgtgtttcctttggctgttccctaatacaaaacacggacatatttttactcgtagcactcaatttagtaacttctagatgctaccgttgacctgagttaaattcatttagtcgtgtacgtaaaaactctccttttagtgtgttattttcttggccttcccttttaaaggttaaagtttctaacctaagaattaagtacgcgttcaggaagctgttgtctaggccttccccttgtgaatctgggttcattccaatacggcaagtaagagttggaaactttgagaacacagactataaaggcagcagcccgaacactgtcagactctaattggcgaccctgggaaacagttgccctgctattctttaaagaaagacgtttattctgatgataaaaacagttagccagactgtttttaaagcacctggcgggaagcagaaggttggatccaagcccttgttcagatttggtgcctgataagacaggggtttctctttttgtgacctttattattattattttgttaactgttgtaaccagttagctgttgtgttttaagatagaaaggaacaagactaaaattgtaaatactttgtaaacatcagcatttgtacttgaatagtaggattttaaagggcattgatagcataccaaacaaaaggcaaaataaagtgacctttttataaaaaaaaaaagaaaaagtcgac
